United States Patent Application Publication US 2018/0305689 A1 - sequence listing, part 131

SEQ ID NO: 1882499 - DNA, 4001 bp, Homo sapiens
cggcagcggcgaaggtcctctactgctacacctggcgtcaccagtggcccgtctgcctcaggaactcctccgagtgagggaggagggggctcctttcccaggatcaaggccacagggaggaagattgcacgggcactgttctgaggaggaagccccgttggcttacagaagtcatggtgttcataccagatgtgggtagccatcctgaatggtggcaattatatcacattgagacagaaattcagaaagggagccagccaccctggggcagtgaagtgccactggtttaccagacagctgagaaatccagccctgtgggaactggtgtcttataaccaagttggatacctgtgtatagcttcccaccttccatgagtgcagcacacaggtagtgctggaaaaacgcatcagtttctgattcttggccatatcctaacatgcaagggccaagcaaaggcttcaaggctctgagccccagggcagaggggaatggcaaaatgtaggtcctcgcaggagctcttcttcccactctgggggtttctatcactgtgacaacactaagataataaaccaaaacactacctgaattctactcccctgtccttgcagtacatatgaactggctgctatgagtgggggtggggaattggctgaaggtagatgccatggaacaggaaggggcacaatgttttctgtccccatgaacagagcaaaaagtgaggtattggtgaaaaaagtttcctcagaacagtttctctccagtaacctctctaccactggtcccttgctgcaaatgtgtataaaacaattttaggacaaggaaatggcagaacaactttatggacaacatataaacttgggaggacttataataccataaagcattacatgctgggattttaagtcagtttaaagctacattcaagcaaattctaggaagacagaggctgaaaagtactaatagagatgccagggctgttggcaaggagggtaaccacatttcatcctggggcctcaggttagagaactgtgtattctttttcaattaaaccgacattcctagcaatatggtatgttgcaaatgcccttccaaaagaatcatgccaaccaagatgagggagagttaagggttgtatatacaggcaagaagtaggtttgaagacatttaggatttcactttcaagaaagaacactgtgccacaaagagattccaagtgcaagagtttgaacctgagggggtaatacaggtggtgtgtgttaaggtggaaggggctgtggggatatgacagaagtgcctggtcaggaaacagagccaggtgtttttacattttattagctacagtatagatcctagagctgcctcattccctcccctcccctcccctccccccaccatggggtcaggccttgccaggagcccctgcctttgctgcctgggcccgctggaactcctgctgcagctgagcaagggtctccctctgttgctctgactgccgctcaagatcccgaagctgggattcgtatcgcttactaaggagagacaagggagacaagcagaaagggagaaattagtaggactcactatggagagtgctaaacgcaagaaagagataggtggaaaacttgagatccaggggagggagaagaaggggggttaaaagggaaggaaagggttggaggaactggaggactaggggccactatggagagctgttctgcaatggttcaacacctctactccaatggttcacttgcatcacagggtgcagcacacggtggtggaataaaaactcacatttcagctgtgatatagtccagcctcttccctactgtggcccgagcctcccccagctcctgtttgactagcaccggacccagaagtttaaagaccacgttggacccatccagcagggccagttcctgatggagggatgggacatatgtgatcagaaccatggctagtacaggtccctcctcgccccacaaatcccagtccctcacctctttcacgatattattttctgttagttgtgcttcaagtttctgcctccccgacatggatttacttaagtctggggatgagaggaaaggcaatttagaaacatcaaatgtgccacctatccccacaatcctagtcaggtggatatggatctgaggaagcagaaaaggatgggggcagcgggtgagtgaacagggaagagtactgagactgaggcggggaagtctctgcacgcgagggcccagatggggcaacaaaccttatctcggtaatggctttgggttgtaagtgcattgggcgagaccataccgaccctgttcccttacccttctgtagctgttgatatttctccacttctccctgtagcttcttctggatcagctccgccatggcggggatgaaagcctactgggtgcgagacaagggcgctgggtctcactctctggaaggtacctgagctcccttttctgatctggcctgcggaaatgatagcactcttgagaggtagccctgaggggcaccgcaacctcccccccgtcccggatatcgactccaccctgtccccaggagatggtgggcgaaacgcaagaccccaagcctctcaaccgaaatcctaacctactcacgttcttccttcagtagtaataaacccggaagtaaacaaggaatgctgggaaaagactgtgccggaagtttctttctgacccttgatgggaagtgtagttctgacatgtttagggagtggagttctgctaaaaagactagactaggacatttttaggcaagatggggaaactaatccagaaaaagaaaccgcaccgctacttagcccctggctccggacctgcctttcttttttaaatcactcttgcataagctgccgctcgcgataaggtgccaaaaactgttccgcccctctaaggagagcgtgccctcactcaagatggcacctagagagcttcatacctggtacgctgctgattggatgaaggacagagggcttccgggagttttcaagccgactgtgtggcagctgagaggagttttgcacgtggatcgccgttcgggtgggcgagatggagacagcccccaagccgggcaaggatgtcccgcccaagaaagacaaacttcagaccaagagaaaggtagaggcctccctgggtgggaaacgaagtttttagctgtggggtcggggggcggggcgtgagtgcggagttcctgatgtgcctgtagaaaccgcggcgatactgggaggaagagaccgttccgaccacagccggagcctctccagggcctcctcgtaacaagaagaatcgggagctccgtcctcagagaccaaaaaatgcttacatcttaaagaagtctcggatctctaagaagcctcaggtcccgaagaaaccccgagaatggaagaacccggagtcccagcgcggcttgtccggggtgagcgtgggacctgatgggtggcgaggcaggccgcctcgttccttgagagtgagagggttggggtcaatccaaggctgtctgctaattgcgtcctcctttcccctagacccaagatccattcccaggccccgcccccgtccctgtggaagtggtccagaagttctgtcgcattgacaaatcccgaaaggtgaggtccagccggagagttgggaagtgctggaggcagggagtgtctgggtgagttggatggaggctgggacaggtagctctcctgtgaccccacttatcctgtggttcttctgccactcctccccaccaacaatgttacagctaccacattctaaagccaaaactcgaagccgacttgaggtggctgaagctgaggaagaggaaacaagtatcaaagctgctcgttctgagctgctgcttgctgaagaacctgggtgagtgagccctaatctggacccccattccctgccttttgggactgtcttttctcgtttttatgttggtatacttgcttcatattgggaagctttactgccatcctaaccct

SEQ ID NO: 1882500 - DNA, 4001 bp, Homo sapiens
ctgtttccaccccctcagaagacacagccctctgcctcctcaacaaggttaagtcagcaagaaccaagaaccacaaaccatccctgacctaggaatcccttcaggatccaaagctccagtttgagcatctttgcaaagtgcctcccacctctccccttgcttccctgcaggtttctaagatgcaaaatgacaagagcccagaagacccctaggaaaggcattctggggacagaaagacagttaggtggctctgcccaagtctcagttctgacacttatcttgggtgggacacttaatgctggagcctcagtttcctcatctataaatggtgaagacttcccttgcagggtgtcatggagattaaatgggtaatgtatggttatctagcactgggccatgatcactgcccaccctctcagatgacctatgctggacacacactccctgcctgcacttgcaaacctggagcccatccaggctgcccccagagaaggggaattatagccggactccagagatccctgccatcattcccactgaaattttaataagccgtagatagaataaaaagctgctgcataatgcatataaggtgtgtggtgaaggcgcgccagctactgtttcctagggggccgcccatggtctgtctataaccagggtccagtaaccctgcacccctcctgacacctcccactgaccatggctaacaggtggggtaggaggggaggctgagggagctaggctaagaggacaaatgaccccaccccaggctctgaattccaacacagcagactcctcacagctcgtgtctccctgggcccaggtcagcacagaccactctccaccgtacggacagggaaaacctgcaggtgaacaacctgtatcatgtttaaggggcagaggtcgaactcaactcctcttacctctctcccagggaagggaagtaactgggcttcaccaacagccacccttcacttgggtgacagctgcctctgtaagaggccaatatggggtcccccccatgcccaaatggccatgctccctagggtgccccacagcgccaggctggcagcctcatccttctatgaggactttgtggggagagcagcaccagggttctgagggtcactgccaccaactccccaacatttttgacttcttgggcttcaatttccatctaaagagccaggggcaatgcccattccagaactactcataactggcctgtgcacaaacaggtgctggcccacgcaggcacccgtttctcacctgggatgaggaagtacaagaatcgaccataagtattcagcaactttacagcaaattgacaaaaatcattttacgtgcactgaatctaatgattaaaaaccctgggcttctatgttcatttttgttcattcgtctttactgcattttaaaattactggtccacagtggattggaaattaagaaaaaggcgagtgttttaagcactggccatgtgacctctggggtgctttaggtttggactgtttgccattggcttcagaatttatcttgaattcctcggcccccggttctctcctggggtctctatagagatctgaccagggttgcaagtggggcaggagtacacacaggtgggaggacacacccacacgcttactgcgcagaatcattctgcaccctccatgcatggtctcgcctgctgaatgaaactccaggcacctccctagccccaaagggtaaaccaagtgaagcaaaggtttggacacccacctgactccctaccagcgctgtcccgggactcaccggaggctgcttgcgcggcctgccccggccccgcttctcagtgccgtccttttcctgcttggaggccaagggctggctggacttcgagctcgactcactcatcttcccttctctaaggagcaggtggaagagtgatggctgggatgctgggagacagaaaagtgcttttagacaaacatctcgcttcagccactttctaccccctcatcacccacaccttcaaggcacactgcagaaaactgtgctcccatgggcccccaggcctcctactctgcccaggatggaggggtctgcccacccccagatgctgccaagggcggggaagggccgttggccctaatcagcttcttatctatctcctgttcagaagggctctttgttgtcctgccttaacaccgccccagtgcagcgtggtggggggggtcccaggaggtacagccagcccagacctagctacatgggtgaggccaccctgggacaaaggtgtggggaggtgagatctgacgtattgccagcatcccctccttctgtagtcaactgctgccctttctctttaagagaaaatccagcctacgcagttcagtgggaaaatggaaagaatgagaccttgcgatctggcagctatggacattgatcccctgcccacctcactgacaatattgcctatctggcaaggtgcaagactcaggaccaaaaagagccaatcacacagccaggggtggtgcccaccaccagctctcttctctgttctcacccagggtaaatccctggagaattcagattggtataattgagggagggaggagatggttgaagctagtgggtgaggtgggggaggaaagtgagcccaaagccaaaggccaccctcctctttccccttacccctcctctgcccaactggagtcagatgggactttgtcagatgggtagggaattctccaactgaaatgcaccgcctaacagaccctggctggccctcatcctttaggatgaggtttagggctcatcctaaaaccttcttggtcattttctagcatcttccttcttcttagaggcctgttggggtttaattaaccccatcaattttgagttttcctaaaacttctcattggaaggagggcctgcaacctgtatttgggaataccctgtattacaggcttaaaaaggacagtcctccacatcttcatcctagtccttatccccaggctacagatggatgagacgccggaggcctaggctacacatttttccagtaaccaatccctgcctgccatggtaaggggtgggacaagcggctccacttctgaacccctctcaatctgtaagatcaaggtaattataaggtacctgcctgaactacctcctgactgcttcaaggatcaaactaggtaatagtttagaaaaacttaaaataatagaaagaaatcttcactctaaccaaaataagaactagaccatttgaaaatgatttatgggccaggtgaggtgactcatgcctgtaatcccagcactttgggatgccaaagcaggaggactgcttgaggtcaggagttcgagaccagcctggacaatacggtgggactcccatgtctaatttaaaagaaaaaaaaaaaagaagaaaaagagtttttaccccaatgagaggaaaaaaacatttttgcaaacttgtgatttctagagggcccaggacctccattttcaagcatcaagagaccctccagacagcaggactttggtaattattctatcttataatgtttcagacttggagacccttttaaacaaggtggttggtgatttatcctgctccgtcattagtggcttggcctgctctgcaattacaggcagtgattagaatcttatattacaccacaggtcccccttcaaactaaacatcaaaattaatcaactaaacgagtgctgacctcatataaggtctgcctggggccccctcatcgagggggttccagttgggcgaagccagtccggaatcccagagagcctggcccggcctgcctggagatcttggcgggtctccctggaagctctcataccatctggtgcctccccccacctcttgctgctggggaccctttaatcccctcagccaaccccccacgaactaaatgaaggcccgaggccctttccagtgaggccaagaaacgttcgtcttttccacctgtttctgaacatcagaggcctgtcttgga

SEQ ID NO: 1882501 - DNA, 4001 bp, Homo sapiens
cctcctgggctgaggtgggaggatcacctcagcctcctgagtagctgggactacaggcatgcaccaccacacccggctaatttttctatcttctgtagagacagagttttgccatgtcatgggtgacatggcttgtttcgaacttctgggctcaagtgatctgcccacctcagcctaccaaactgttaagattacaggcatgagccactgtgtccagtctcatattatgttttgtttgtttgtttgtttttgagacggagttttgctcttgttgcccaggttggagtgcaatggcacagtcttggctcactgcaacccctgcctcccaggttcaagcaattctcctgcctcagcctcccaagttgccggaattacaggcccccgccacgacacccggctaattttgtgaatttttagtagagacagagtttcgccatgttggccaggctggtctcaaactcctgacctcaggcgatccacccgccttggcctccaaagtgctgggattacaggcgtgagccaccgcacctggccatattacgtttaattttataacctaaaaatgtgtgggccaggcgcagtggctcacgcctgtaatcccaacactttgggaggccgaggcgggcagatcatctgaggtcaggagttcaagaccagcctggccaacacagtaaaaccccgtctctacaaaaaaatacaaaattagctgggcatgatggcaggtgcctgtaatcccagctacttgggagactgaggcaggagaatcgcttgaatctgggaggcggaggttgcagtgagccgagatcacgccactgcactccaacctgggagacagagcaagactacgtctctctcaaaagatttaaaaaaaaaaaggtcaggcgcagtggctcacgcctataatcccagcactttgggaggctgaggcgggcagatcacttgaggtcaggaattcgagaccagcctgaacaacatgctgaaaccctgtctctactaaaaatacaaaaattagccaggtgttgtagcaggcgcctgtagtcccagatactcgagaggccaaggcaggagaatcacttgaacctgagaggtggaggttgcagtgagctgagattgcgccattgcactccagcctgggtgtcagagcgagactccatctcaaaaaaaaaagttgtgataatttgttttctcttggtatttaaatgcctacatggtaccctttgattttacctcttatcagcaaatcataaaatatttactatctgactctttacagaaaaagtttgtggacccttgaaatggacactcatatttccattttcggggtcaggaaactgtggcacacagaggttatgaaatatgcctatacttgcaaggcccatccgtggtaacactgcgatttaaacctgggcatcctggctttagactctgtgctcctaaagcacactgccttccacacctttctgcccacctatgactcctaacacctcaccccaccagtgacttacgtgcctgtagaatctactgccacagcccggaccccaccacgatgacagagaatctttgccagtggctccttcatagctggactccataaagacacagtacctggaagagaagaagaaccaaagttgctaatacacacctaagcctgaggttactaaacatgggaaagatgggaactcaagaccaagagataacaaaaaagggaaataaaagggtaactttaagggactcatgaagtacaaatatagaagaaaagcaagtcaggatggtcagagtcaaaactaagccaggtactgaccattgctgtgtccgagatggatgacggcattgtaagggttctgactcataacatcgagccgcccagctcgagcattcagagctgccacaatcttccccactgacacatccaggtaggttagaaaccctgtttctgactgagagagaaagacagagagaatgacccagtcctgattgccctctgtattccctctgctggggtcctaaaggagaggtggtcatcccaagggcttccaaccagttcctgagctccatggccactcacagctgtagccaggaggaagtggaagggcaggaactcaagccgtgttactcggtcacagcggcggatacagtggagctcaatgccctgattgtcatagatgtggagccagcggttctgagcaacagcaagcagtgcctcagaatggagaaacctgggggagaggaagagtggttcaattgggaaatgaggtcacaggctatcattcaatcaggaatggactatctcaccccaactgaccgctgacagtgaggccactgaccggatgtcccgcaccgcctccatgacgttgatctcgcacataagcttctttgttacccaatcaagggcagccacatgacctcggcgccctccaaaagccaggtgtctgttggaggtgaggggcaggcagggtgttaaggcaggggaccaccgactcagacaacttgaggtctgccccacgccagccccatctctccaggcgggcagacacatgttgctgtaggtgcttaccctcacacccaagcaaatcgaaggaccctcccctcatcagcaacccaaacatacactgggaatggctgaagtggttaaggaaacacatcttagttcaagagtcactagaattcaaccttaccttccagttcgagagtagtttagtctgtagggtccaaactgccgcagattcaagtcaaagtgctgggaaagagaagagtgaaaaaaaagagtgccctgcagtaacgccttcttctagcccccattcctctattgtcctgcaccaccaatcaatcccttggctcctttacctcctcaggctcaccttggctgcacttgcaatgtccacagcctccacaatgtcagcctggcatatctttgctgtgtcttccccatcctccccttccagaaacctgaaagcaagggttaggatggcagtaaagcttcccaatatgaagcaagtataccaacataaaaacgagaaaagacagtcccaaaaggcagggaatgggggtccagattagggctcactcacccaggttcttcagcaagcagcagctcagaacgagcagctttgatacttgtttcctcttcctcagcttcagccacctcaagtcggcttcgagttttggctttagaatgtggtagctgtaacattgttggtggggaggagtggcagaagaaccacaggataagtggggtcacaggagagctacctgtcccagcctccatccaactcacccagacactccctgcctccagcacttcccaactctccggctggacctcacctttcgggatttgtcaatgcgacagaacttctggaccacttccacagggacgggggcggggcctgggaatggatcttgggtctaggggaaaggaggacgcaattagcagacagccttggattgaccccaaccctctcactctcaaggaacgaggcggcctgcctcgccacccatcaggtcccacgctcaccccggacaagccgcgctgggactccgggttcttccattctcggggtttcttcgggacctgaggcttcttagagatccgagacttctttaagatgtaagcattttttggtctctgaggacggagctcccgattcttcttgttacgaggaggccctggagaggctccggctgtggtcggaacggtctcttcctcccagtatcgccgcggtttctacaggcacatcaggaactccgcactcacgccccgccccccgaccccacagctaaaaacttcgtttcccacccagggaggcctctacctttctcttggtctgaagtttgtctttcttgggcgggacatccttgcccggcttgggggctgtctccatctcgcccacccgaacggcgatccacgtgcaaaactcctctcagctgccacacagtcggcttgaaaactcccggaagccctctgtccttcatccaatcagcagcgtaccaggtatgaagct

SEQ ID NO: 1882502 - DNA, 4001 bp, Homo sapiens
tgtgtgccctccctccccatccctctttcgacagcaaccccctccccgcaccccctgccccagcacactgcagcacacaatcaggttctctcttcaggaaagaacagtccttgatgacgggtccaatttcacagacaaatgtaagtctaaattagactctgctttacagattcatgagttgggattggattcagcaccaagatcactagaaccagggcagggagagagggcagaagagcagagcagaaaaggagctctagaagcagagcaggaggtgaatggctctgaaaatttgtctcagaatgcacagagacccccgtgtgcaggggccgccctgggcgatgtgtgagcctctgtggtcacagctcccactggacaagtttccactgaagggacaaggacaatggagcagtgaaggtgacccagctgaggactaaccacataaagcccatgatggactcaacaccaaatgggcacaggccccatccacactcggccccccacagccttctccacaccccacctgcaacagactcagcacagcgaacatgcagattctggaaggttctcaggtctttatttgctctctcaaattccaggaattgacttatttaattaatccatcaacctctcatagcaaatatttgagaaaacaaatttatattcagattcttattttcagtagggaagtaagaagttgcagctcagtgcacgtaaagttgagacagagatggagacatccagccccacctctctggaacaagaaagatgactggggaggaaacacaggtcagcatgggaacaggggtcacagtggacacaagggtgggctgtctctccacctcctcacattatgctaacagggacgcagacacattcaggtgcctttgcagaaagagatgccagaggctcttgaagtcacaaaggggaggcgtgaagaaatcctgcatctcagtccctcacaagacagctgtctcaggctacagaaaacaacagtcatgaacaaattctggttagtcatggtaagcgatgacactctaaacagcccaccacacacgcgaaacatcccaatcaaagaatccccattacccaggcctttcccctctgccccacccacccccagacccgccaccccacccactctagaccccaagaatctcaccttttcaagctgtgagagacacatcagagccctgggcactgtcgctgcctggagtagaacaaaaacaggacctggtcagagcccgcaggagacgtgggacaggaggaattatggggtgggtgagctcctccacactcccacccccaccacttacacgcagcctgagagtagctccctccttttccacctgtgggaagaaaatgtcctgtgagggcactgggaggaagcagggccatgagatcttagaggaacctcctagtcttggacccaaaaggaatttccagaagtatgactacagacccagggcaggatcaggaaacacgaggaaagcaagtgtgggtcctggaccaactgccctcctaaggtctgtccttagcagggaccttcccctgactcatgaatgctggaatcaggaccccaacaccacaaccatcaaggtgatacatccatccttcattgtcacatgtgctgcacaaaagagtaagtgctggcacacagggtcccaggctgcgttagcccctgtgtgcatgctgcttcccagtaatgaggcagggaacacttctacctggggcttgaaacccccagtgggacaagaaaacccagaccccacccctcaccccttccctacctgaactcttcctcctacacatcacagcagcgaccacagctccgatgaccacaactgctaggacagccaggccagcaacaatgcccacgatggggacggtggactgggaagacggctctgggaaaggaggggaagatgaggggccctgaccctgctgaagggctcctgctttccctgagaagagatatgacccctcatccccctccttaccccatctcagggtgaggggcttcggcagcccctcatgctgtacatggcatgtgtatctctgctcttctccagaaggcaccaccacagctgcccacttctggaaggttctatctcctgctggtctggtctccacaagctcagtgtcctgagtttggtcctcgccatcccgctgccaggtcagtgtgatctccgcagggtagaaacccagggcccagcacctcagggtggcctcatggtcagagatggggtggtgggtcacgtgtgtctttggggggtctgatgggaagagtcagaaaattcaggcgctttgcatctttcatgggacaccctaggaccacccatgtgaccagcctgagaatggacaggacacctggggtggggaaggggcacagaacccagacaccagcctggacgcaggcacctgggataatctcctattcattggaaagttcgagtctctgagcggggaacagggacttctgctcctgatctgagtggaggtaaagtgactcagaagtgctggaatcagagccccaaacacactgagtgtgaggcagagaacaaggcctgagaggaaaagtcacggttcccaaggctgctgcaggggtcaaaggggacccctgatcagtattctagggactgtcttcccctccatttcctcagagacgtcattccttaattgtctagagagaagagggggccctcagaggaaactcaggaaaactcatgccattctccattcaacggagggcgacattctagcgctgatcccattttcctcctcttctcgtgggaggccatccccggcgacctataggagatggggaaggctccccactgcccctggtaccagcgcgctccagcttgtccttcccgttctccaggtatctgcggagccactccacgcactcgccctccaggtaggctctccgctgctccgcctcacgggccgcctcccacttgcgctgggtgatctgagccgccgtgtccgcggcggtccaggagcgcaggtcctcgttcagggcgatgtaatccttgccgtcgtaggcgtactggtcatgcccgcggaggaggcgcccgtccggccccacgtcgcagccgtacatgctctggagggtgtgagaccctggccccggccccgcggtcagcccagtcccccgagccccgccccgccccgaccaacccgcggggattttggcctcaactgaaaatgaaaccgggtaaacgcgcctggggctctcgccggtcgagggtctgggcgggtcccgcggcctcagggaggcggatctcggacccggagactcggggcgacccgggccgtacgtgggggatggggagtcgtgacctgcgccccgggccggggtcactcaccggcctcgctctggttgtagtagccgcgcaggttccgcaggctctctcggtcagtctgtgcctgggccttgtagatctgtgtgttccggtcccaatactccggcccctcctgctctatccacggcgcccgcggctcctctctcggactcgcggcgtcgctgtcgaacctcacgaactgggtgtcgtccacgtagcccactgagatgaagcggggctccccgcggccgggccgggacacggaggtgtagaaatacctcatggagtgggagcctgggggtgaggaggggctgagacccgcccgaccctcctcccggcgcggctcctcaggtcctgcgcccccgcctgcggtcccctcgctcctcccggcagaggccatttccctcccgacccgcactcaccggcccaggtctcggtcagggccagggccgccgagagcagcaggaggacggttcggggcgccatgaccagcatctcggcgtctgaggagactctgagtccgggtgggtgcgtggggactttagaactgggaccgcggcgacgctgattggcttctctagatatccaatacccaatgggagtgggaagtggggacgcgtcacgagtatcctggaagaaggacccgacacaagt

SEQ ID NO: 1882503 - DNA, 4001 bp, Homo sapiens
gagaacttgagacatgttaaatgtacttctcacagccagtcactgccaacatcaggattccaacctggtctgcctgactccacgttgtgtgcctggtatcccactaggagccccaaactgtcacctgctggatgggtgggagggtaccgagccccagtaggtaggaggggtccaggaagcagaaattcctggaggctgcactggacaccgattacatctgtgggcgattagcacacgagccttcagataattgcttttgctttaagctgaagtttcccttttccttctgattgcaaagatcacaggaggttcagaaaatacagaaaagcccaaagaaaagaaaaataaccacaacaagtagctggctggacctgtcttgagaaccaaaattcactgctcatcctcattaggttttatacctttcttaccaagaaagtgctgttaacttcttaaaagctaaaaaagcaaaagctgctcagagtaaaaaccctgtgttcttcatttcagggacagggaaggcttgttttgagaaatgcagcatctcccccgaccccccgactcccacacataccaccgatggactcttgctgttgcccaggctagagtgcagtggtgcgatctcagctcactgcaacctccacctcccaggttcaaacagttctgcctcggcctcccaagtagctgggatcacaggcgtgagccaccgcacccagccaaaatacagcattgttaagcactgcttttatgctttaaaataaccgttctcagccgggggtggtggctcacgcctgtaatcccagaactttgggaggcccagacgggcggatcacaaggtcaggagatggagaccctcctggctaacacggtgaaaccctgtctctactaaaaataccaaaaaactagccgggcatagtggcgggcgcttgtagtcccagctactcgggaggctgaggcagaatggcatgaacccaggaggcggagcttgcagtgagcccagatcacgccacttatactccagcctggggaatggagcgaagactcaaaaaaaaaaaaagcagggatgaacttgttcccctatttaccaaagtcaaactaagctcattttagtcaaaggttaaagcagtactgggtgctagaggcaagaactgccaacagggaaatgcctcagaaaaggagggggcttagcctgcctggggcaaggacctggaatactgttaacaggatctggctggggatggtgactcacacctgtaatcccagcactttgagaggccgaggcagaattgcttgaactgggacccacagattgagatcgcaccattgcgctccagcctgggctacaaactccatttaaaaaaaaaaaacaaggtccattaattatacttttgtactggtttgctgtgccttgttttccttaacatttactcattactaacccaaagcataggatactccacatgtggtcttcttaacacagaaatgctgactaaaatccttattttaaatttacatggaccaatcctgtcaaaaagcttcaatgccgttagcaaccctatcacatatgcaagactgcctgattttgatggcagaaaaacatcctcttccctatagtacccaactatccatcatcaaagtgacaaactacacaactagccatcagcagtgccaaggccctcacttgtcagctgacaaaccaccccccaccctcaatcacaggcagacagagggaactggtaatagaatttattcaaatgtgccttaatataggcgctggggcttgcccatggtgctcttgatatataaggcccggacattctgccagtttttcttgagcaatgacaccaagaagttgacagccaggtgaatgttatacacaagctcatcgtctgtcatcttcacgtgaccaacagctacagccagacataacacctgggaggagggaagagaggatcaagtcaggttggtggacgaatagcagatggcctgtccttcctcccccagtggcctggtgagcaggtacttggacccgggccaagaccagggttactccaaaagtttcaatcctggtgggtgctcttactggcatatttagagacttggataagatttagaccctgccaacaccttcacccatagcaacccgccagacccactcaccttcttcatttggaacttgattgtggacttcacctcatccactttggccaccatgttttcgttgtgtgtgagcagggaagggaactttcctgccttatttaaacctgggccgaggattcgtggaatctgcttgatcagagactctgaggccaaaaacgcatcatacttcttggctgatagagagaggaagccattggcattgcttagaacctggtcaccaaggcacacctcaaatgtggcaggccagaaacgcacttgaatcaatcatgtaagtgacctccaagcagcaccctctctaagaccccgcctcagtcttttccctagcccaaacggtttccagaaagtcctctggaccttcactggtcccaaaacatgctctcagaaaaccaggctgacccatgatccatggcataaccgctgtacaacggatgctctggtcaagactgcctgggctcgaattctgcctatttcttagctgtggaccctggacacgtgacaactgggaatgtctgcttcctacctgtaaaagcagtctaatgccactgcctaaacaacgcagcgtaaagatttccaaatcatagttcaccagcacctggctggtcaacttacaatgcctggcctccctcatcaactggaatcctcatagcaatacaaacatcaaaccaccccaaagctaaaacagcactcaggcaagctaggcaaccaccgccgatcctttgctattctaggcccctcatcatttaaaaatcgaaaatggcagaaaagcctttctaccgcccccaccacacatctcacatgcaaaaccacagcggccggactcacccagcttcttgaccagttttttattcttgttgagttttttcagcgcctcgatgtccatgtgggggatatccacggccttagcctcgtcacagtgctgctggtcccccaggacacacacagagaacttagggcggggagtggacttaagcctgcgttttgggggacagcaccaacaggttacgcctagccctgggtcccaagggccggtgaagggtctgggaccgcagcagccaccgagccttacccggagcgttcacattcaccagcagccagcctggcttctcaggctggccggcgggctcggccgaggcctacccacgcctcccctcatgttttaagacccagggtgggggtccgtccagccgcgcctgcccggagcagggggtctgaactaccctagcacatcagtaccgacgtgcccgcctccggctcagcgggagcctgcaggggaggggcaagcacgggggcactgagggctgggtgggatcagaacggtgccaacctgacggtgcccgagaagcgcttgtccttctggggatcatagttcttcaagctgatctgcaactccaccgtctccaggaaccttcgagagaggaggggggttaagcacccgccggccctcgccacccgcgccgtgccccagggtcggcactcacttgcggcgcttgcgctggttcccgtgcaggacttcccgcaccgcctcgtacagggtgtcgcgagagactttgctgctgcgggagagaagcgacagggcgctcagggccgcggagtccacacgctcggactgcctggaagcctccgaggtctaggcttcgagacgggcgggcggcccacggcggactcccccgtagattccggacaccaagtagagcgacgggagctcagacccagacccaagccccggtggaagagggaggctctcagtgatcggacctggtaggaagggcgacccgcaggccgacccgccttgagaaatgccccgcggcgcaggtggcgcaagggtccgcggcgcggcctacagg

SEQ ID NO: 1882504 - DNA, 4001 bp, Homo sapiens
gctgccacaactatccctttatgcttatcctcatggcgttctgtattatttctgttggagagagtctcaaaaatggctctgctttttatttctatttaaatattttttgttagatggccctccagaaaggctgcaccagctttaaaaccctcggttcccttttctttatgctgggtgtgcactttacctcagccctcgagggtgcctctgcccacacctgggccagcacccaataacgtttccctcgtggcatctgcagcaacagccctgcccgccccttccaactctgcccccagcccccagcaatggcacagacatttctcgttacgttactcctttggtcttcttctcgaacctcctctcactccccctcccccgatactgggccatcttcctctgccagcccttcactgttgttctgtaagtttctctgggtttcctcccccgtcacctttatgcccatgacagtcagacgggcctcccactccctctgcgcctcatccctcttctctccctgggccacctcgcctcgtggtacagggcagccaagtcatccaaaccaactgcccaatgaacgagggctacacaggtgagtgtgcggaaaaggagagaactcacatcgaccctggcattcatgcattctacaaatatttattgagtacctattaagtgccagaggccgggaaagatgttcagctcaattaggtgaggtctgtcttggaggcgagggagacattaatcaaataatcacacaaatcaatgttgggtttcaaattgtgctgggtgctatgagggagtggctcacagacatgtccctggcagctgccttgcctgaaggaaacgtgttatccagggaatggcattggaactgagacctgaacagagggcagggtttgatcagatgaagcagacgatgaagagctctccatgttgctacagcaggcctgggccagagggccgtgaggcacttcatagaggccttgagaagaggtctgggaagcccggggtaggacggtaggcggtgggggagaggaacgtgtatttatgagacacgtgctcttggccctgcctgcatttctagccaatctagaaataacaacaggaaagcactcactcccggcactggcccctctgagaccaggagaccttgggttcagcatgcactgatggagaagaagcaggatgcagaggcctttaccccctctctcactgattacatggttatagccctacactctgcctttgcagatgccatgcttacccttagctggacactcagatgcctcctaccagtaactggagagagaaagtaagcctctgggtcgcagcaagggggacaggcaagggtcaggacagtttggcttttgaccaatccacacttgcctagctaagcccacctctggcttccagaggcatgcccccaccatgtccgggaatgtgtgtcaggcaatgctttcttgctggatgcatggggaagggttctagtttctcattcacttcatgtgttctgctcttggagtaagggcacctctcaatagaggctaagaaatgctgatccctgtggataagagagccacttaacttggccatcggccactgagcccatcatccatctaaagtctctccaaatactggtcagatggaggtttccacagctgccattctaaatgacaggacatgtgaccgagtctggagccccatcccagctacccctcagccttccttccagccaaggacaacccactctgcccagagaggccacattgccctccagccaagggaccccctcctttccgccctaggaaagaagttctgtcctctatccccaaggagactgcatatccttcaccacctccactgaagtttctaatgttagatggtccttctcttcacagcacctgcccaagtctgtgtttagatgcctcgagcctgatccttccaactaacatagaaatgccaaggcccggcatacttccctggccatcctacacccttgttgaaagccggagtctcatggacttaaaagttcttcaaaaatgaagccagctagcttctacccccatgccacagcagccctgcacagattagtaagcccactgtgactctgcttagtccaccctcctgcccatccgcactgatcaccaaccactaagccctgcctgcgggagtccaaggaactcactaggtctctgactcaacctctagtgaagagggggtttcccaggagtgaagtacctatgagggttactgccccttctttctggattttggctctgaaagtgtggaataagagagtgcacagtgactcttccacttctcaatccaagagaactccatacagttctgttctattccaatgacctctgatcagaaggaaaatggctattgcaataacatagcactgagagattctgaaagaatcaagccaggcccttttggagatcaaagctttcaggaattaatgctcaggtaattcacggagaaaatgatgtgtgggtaatttctggaatcttttcacctgggcagacacatgactcccaccagagctctcccacctgttgctttgggtgccagccagaaagcattgtccccgcccgggctggattctagccttgggtcaaacgggctacagtgccaatgaagatggtactcagcgaccttggttcaccagcagaacctgagaaaccctcttctacctgaaaggaggagcagccccttgagggcagcacctgccagtgagtgtggagccaggccaccctgtccttacaaaactcttgcaatgtttgatagagagtagacatccgagggtataaagtacttttcctgtgcatcttctcaattcccaggtagtctcagtgagctcgaactattcacccagaaaagacagtatgaactagctttaccctgggcccctgaccaggcctggtggtggcagctccaactccatgcagacaggagctgggctgccctacctggagaagctagccacctactctgcccaggaatgtcttgggtgtccccagaaggcctgctccttccaaagttgaaagcaatggtgatctgctgaagacactggaactccgcaggaaactgctgagcaaaggaggcaaggaaaaggatattcttggaatatccagaaaaccaagtcgggagggagatgcttaagggaagagaaggggctatctcctagggagtggtctagaatcttcccatcactgacacccaacttctgcccattatcggaggtgcatctgtcccttggtgagggacaggtaaggaggactccagcagagcctcagcaaacaagagctgtctgcctgctgcaggggagggtgtatgtgtgacagggagggttggagaaggggctgccttccaccacttgtagtcctaggaatccatggacacccttattgtggctgcgggccagtgttccaggggcccttgtcctggggtgggaggaaggagctgtgaagatgccagcctactagggacaggggtaggaccaggtgtgcagcctggaacaagggacagagggaggaagcagcaccatcagcactttttccttaacacctgggtgtgggtttgggtgtgcatttcttaggcaaagaggcatctcagtgcatgttttaagctgccatctcctccttttaagcctcctagttaatatctgctatgtgaattatttactgggaacagatgttagagtttaaagagcactgagcagagatctttggctaatcaatttattttaacaggtttaagtctttactacacacccaattggagatttccctgccactggaagcctgtgctcctacaagcctgtgttacacatatttccagctcgccccaagcttgtttcctgctctttagcccctccccatcctggccaaagtgcctccttctcttggtatcctatttgatctgcagaagtctaatttgacctggagaaagaatttttcctcctaacatcagtcctcaggttggactaaatggtcact

SEQ ID NO: 1882505 - DNA, 4001 bp, Homo sapiens
cggcattcctcgggcacaggtgtgggcggggccgccaccaaaggctgcctgattcagagcactcagggagtcctttcgtcagggggaacccctccacatcctaccaatccctttctagaagaaatagcttctctagaaaaggaagcctgcagctttaaggctgattccaaagatagttctcgtaactccatgaactcttaatttgcaactgaagctgagagtcagaatgatacgactgaggaacccaacaaggtccagaaaaggaagacggatagacttcgacatcagggctccacaatgatctacctggaggctaaccagggcatccagggaaatcaatgccgaaaaggaagggagaggctgtcactagttcaaaaccaagcatagcagagtgtcccagttgtggagaaggaccagctaggagtgaaggaccagccaagactgagaaggaacagccaggagtgtcacagtcacccctgctgagaaggatagtcaatcccagaggtcagtggagaaggacaagacagtgccagagaggagcagcttctgtgacaggagagtagtcacagaccctcaggagaaacccactgaggagccccttggggaccaaaggacagtcactgacaaatgctctccacccctcgagtttctggatgactctctcatttagaaatccgaaagcataaagatagggaggtggtgatggagcacccctcttcaggaagcaactggtctgatctggagatctccacggtcagattctctcaggaggaacccgtcccactgaaaccctcagccattccagagccttcttccttcactactatgtcatgtacctgcctcatttttacagtagtccttggtgtgagtatgtcagctagtgcaccagcagccccaagcctgccggctacctgtctgtgagcagcagcagcaatgacgcagcacaggctgggaggagcagcccgagtgcctgagtgattcttcccccaactctgcagtgagcgcccataacgtctccagagatgtggaggcctcagaggaaggcagctcccagaattctcactcatttcacttctccagaagctcgggaggaaaagaggtgaagcaaagaagaacattccaagaggagatgcctctgtgtccttgtggaggacacacatccagctccctgccaaagagccactgggagccaagcctagagcagggcttcactgatacccactgtcatttggatatgctgtattccaagttgtctttcaaagggaccttgactaagttcagaagaatttacagcagctccttctctaaggaatttcagggttgcatctctgacctctgccaccctcaccctgacaaattgcctacggggggagctgttgaaagagaatctggtctggggggcctttggctgtcaccctcattttccatgttactacaataagagtcaggaaagaaatcttttacaagccttaaggcaccccacgactgtggcatttggagaaacaggcttcaattactcctacaagtgcaccatgcctgtcccagaacatcacaaggtatttaagagacagcttgagctggctgcgtctctagagaagctttggtgatcctctgccagcaagctgacgaggatctgctggacaccatgagaaaatgtgtgttctctgactacaagatacacaagcattgcttcactgcagctacctggccatggaacccctgctgaagtactttcccaacgtcggtgggcctcatggcagtcctgacgtactcctccacctgagaagcccgggaagtgctgaggcagatcccactggagagaatcatcatggaaacggatgctccctacttcctccctagccgggttcccaaaagcctttgccagtatgcccacctgggcctggccttgcatacagtcctggagactgccagagtcaaagatctagtctcccacaccctggccactttgcgtgagaacaccagttgcctctacagtctttaagcagagagggcacagtcattgggagtctcccagaaaagggcaactagcaacctgacgtaatacaggctggcctgaagtctgtgtcccagggggaggatgtgtttggaaggccgactggaacacagaaaaccaggacgggatatttttcctcaaagcgggtcatgaggcttcagtttctgggtagtgggtgtggaatgaggggtaaggggactgcctgtaatagcattggggttttgcctcccagccaaaatgctccaaggtaggagcaaagaaggagtgtgacatgagggtacaatgagtttgccaatccaaatcctgttctctgcagcctgtgtttttgagcagcctgtgactaaagtcaccctcctattcgtctaaaaaaaaaagaaaaacatagtatgggtatacatagggtataaacagctatatataaggatcagtactatccaagaccgcagatagttaatgggggtctgggaacaaatcccccaaaaataaggggtgtctactgtgtcaccaagttagataaactgaaagctgattcttttctggatgagttcacagaacacagtttgattgtaagccttttcacctttttttttttttttgagacaaggtctcactctgttgcccaggctggagtgcagtggtgcaatctcggctcattgcaacctgtgcctcgcaggctcaagcgatcctcccacctcagcctcccagggagctgggactacaggcatgcgccaccacggccagctaatttttgtatttttggtagagacggggtgtcaccatgttgcccaggctggtcttgaactcctgagctcaagtgacttgcctgcctcagcctgtcaaagtgctgggattacaggcgtgagccactacgcctggcctggcctttccacttttgtcaaatgcttttcatgactgaagtttcacacataatagaattactcacgtttgccatattcctagcgtaacagaagccaaccacaatagtccaacaatgaagaatttaggcaaatagaaagttaaacactttctttctccctaaaaagaaaaaaataagaagtaagaaataaagaaaaccaaattggtaattgtacataacgtgatttttccattgagtatgggcctgcagacaggcttccatggataaattcacctttctgggctgtcctcagagttcgggagggaggacacagtctggaacctcccccggcagtgagggcggctccggctcacctggacacgaatcccgtggtacacgcacagccagaagagcagcagggcgcacaggaacatggactgaaagaggtcatccagcatccctgggagccagctgttgaccaggaaggagagggggaagaacggatctggaacacaaagggcagaaatccatgtggaaaacaggcccgccagcacctggcagacagcaccccatacctctgcggggtcagcacctagcagagagcaccccatacctctgcggggtcagcacctggcagacagcaccccatacctgtgcggggtcagcacctagcagagagcaccccatcccactgcagggtctgagctcactaccagcttttctccctggtcagagccaaaggaaaggtagtgaaccaatggctattttgttttccaaaacacctaaaagccactgaacagattgctgcactgatcacgacagagcgccgtatgccactgccatcagctcctcccggagcctgggagttccgactgcggcagctcgggaagcaaacacttttggagcaggaaaagaggaacagccagccatgtctggccaccttcagccaagttccaggactgctgtgtctgtagcacgtccaagttttaactaccgaacagccgcctatttgttagagagccaggcatctgccccagctcggtggaacatggctcctggggtggcagggagcacacggctacatgttccttctggggctccctacgggctcttctgggcctaggccatctc

SEQ ID NO: 1882506 - DNA, 4001 bp, Homo sapiens
tcagggtgataatgaaaatggcaaatttttataagttacttcccatatgccagctgttctataaaaactcaccatgctctgctgctggattcggtttgccagtattttattgaggattttcgcctcgatgttcatcagggatattggcctgaaattttctttttttgttgtgtctctgccaggttttggtatcaagatgatgctggcctcataaaatgagttagggaggagtccctctttttctgttgtttggaatagtttcagaaggaatggtaccagctcctctttgtacctctggtagaatttggctgtgaatctatctggtactgggctttttttggtttgtagcctattaactattgcctcagtttcataacttgttattggtttattcagggatttgacctcttcctggtttagtcttgggagggtgtatgtgtgcaggaatttatctatttcttctagattttctagtttatttgcatagaggtgtttatagtaatctctggtggtattttgtatttctgtgggatcagtgatgatctaccctttaacattttttattgtgtctatttgattcttctctctttttttcttttttttttaagtattttttttctttttttttattattattatactttaagttttagggtacgtgtgcacaatgtgccgattagttacatatgtatacatgtgccatgctggtgtgctgcacccattaactcgtcgtttagcattaggtatatctcctaatgctatccctcccccctccccccaccccacaacagtccccagagtgtgatgttccccttcctgtgtccatgtgttctcattgttcagttcccacctatgagtgagaacatgcggtgtttggttttttgttcttgcgatagtttactgagaatgatgatttccaatttcatccatgcccctacaaaggacatgaattcatcattttttatggctgcatagtattccatggtgtatatgtgccacattttcttaatccagtctatcactgttggacatttgggttggttccaagtctttgctattgtgaatagtgccacaataaacatacgtgtgcatgtgtctttatagcagcatgatttgtagtcctttgggtatatacccagtaatgggatggctgggtcaaatggtatttctagttctagatccctgaggaatcgccacagtgacttccacaatggttgaactagtttacagtcccaccaacagtgtaaaagtgttcctatttctccacatcctctccagtacctgttgtttcctgacattttaatgatcgccattctaactggtgtgagatggtatctcattgtggttttgatttgcgtttctctgatgaccagtgatgatgagcattttttcatgtgtctgttggctgcataaatgtcttcttttgagaagtgtctgttcatatccttttcccactttttgatggggctgtttgtttttttcttgtaaatttgtttgagttcattgtagattctagatattagcccttagtcagatgagtaggttgcggagaatttctcccattttgtaggttgcctgttcactctgatggtagtttcttttgctgtgcagaagctctttagtttaattagatcccatttgtcaattttggcttttgttgccattgcttttggtgttctagacatgaagtccttgcccatgcctatgtcctgaatggtaatgcctaggttttcttctagggtttttatggttttaggtctaatgtttagtctttaatccatcttgaattaatttttgtataaggtgtaaggaagggatccattttcagctttctacatatggctagccagttttcccagcaccatttattaaatagggaatcctttccccattgcttgtttttgtcagatttgtcaaagatcagatagttgtagatatgcggtgttatttctcccatccaagtactaaccaggcccgaccctgcttagcttccgagatcagacgagatcgggcgtgttcagggtggtatggccgtagacgatgcggtgttatttctgagggctctgttctgttccattgatctatatctctgttttggtaccagtaccatgctgttttggttactgtagccttgtagtatagtttgaagtcaggtagcgtgatgcctccagctttgttcttttggcttaggattgacttggtgatgcgggctcttttttggttccatatgaactttaaagtagttttttccaattctgtgaagaaagtcattggtagcttgatggggatggcattgaatctataaattaccttgggcaatagggccattttcacaatattgattgttcctacccgtgagcatggaatgttcttccatttgtttgtatcctctttaattccgttaagcagtggtttgtagtcctccttgaagaggtccttcacatcccttgtaagttggattcctaggtattttattctctttgaagcaattgtgaatgggagttcactcatgatttggctctctgtctgttattggtgtataagaatgcttgtgatttttgtacattgattttgtatcctgagactttgctgaagttgcttatcagcttaaggagattttgagctgagacaatagggttttctagatatacaatcatgtcatctgcaaacagggacaatttgacttcctcttttccgaattgaataccctttatttccttctcctgcctgattgccctagccagaacttccaacactatgttgaataggagtggtgagagagggcatccctgtcttgtgccagttttcaaagggaatgcttccagtttttgcccattcagtatgatattggctgtgggtttgacacagatagctcttattattttgagatatgtcccatcaatacctaatttattgagagtttttagcatgaagcgttgttgaattttctcaaaggccttttctgcatctattgagataatcatgtggtttttgtctttggttctgtttatatgctggattacatttattgatttgtgtatattgaaccagccttgcatcccagggatgaagcccacttgatcatggtggataagctttttgatgtgttgctggattcagtttgccagtattttattgaggatttttgcatcagtgttcatcaaggatattgggctaaaattctcttttttggttgtgtctctgcccagctttggtatcaggatgatgctggcctcataaaatgagttagggaggattacctctttttctattgattggaatagtttcagaaggaatggtaccagttcctccttgtacctctggtagaattttgctgtgaatccatctggtcctggactctttttagttggtaagctattgattattgccacaatttcagatcctgttattggtctattcagagattcaacttcttcctggtttagtcttgggagggtgtatgtgtcgaggaatttatccatttcttctagattttctagtttatttgcgtagaggtgtttgtagtattctctgatggtagtttgtatttctgtgggatcggtggtgatatctcctttatcgttttttattgcatctatttgattcttcttttttctttattagtcttgctagcagtctatcaattttgttgatcctttcaaaaaaccagctcctggattcattaattttttgaaggatttttttttgtctctatttccttcagttctgctctgattttagttatttcttgccttcttctagcttttgaatgtgtttgctcttgcttttctagttcttttaattgtgatgttagggtgtcaattttggatctttccttctttctcttgtgggcatttagtgctataaatttcactctgcacactgctttgaatgtgtcccagagattctggtatgttgtgtctttgttctcgttggtttcaaagaacatctttatttctgccttcatttcgttatgtacccagtagtcattcaggagctgg

SEQ ID NO: 1882507 - DNA, 4001 bp, Homo sapiens
tcgaaaacagggtgtggaccaagctggataagaccaactgacccaacatgctgctggatttgacctaggtttcacctaggaccttattatatgctcattacacacccgctagtgccatgacagttctgagaacactcatgtttggttaaaaatgggtggcaccacagacctgagaaatctccacctttgccaagaattttcatgaatattcaaccccttggttgaaggagcccagaaaggtaaaacccacttgtgcatgtctctctcttgagtacaactgcactctcttttcttaaatgtctactttttcctttacaataaatctctgtactttctttcttttttttttttctttttttgagaccaagtctcgccctgtggcccaggctagagagcagtggagcgatctcggctcactgcagactctgcctcccgggttcaagggattctcctgcctcagcctcttgagtagctgggattacagccgcccaccaccgcgcccggctaatttttgtattttttagtagagacagggtttcatcatcttggacaggctggtcttgaactcctaacctcatgatccacctgcctcggcctcccaaagtgctgggattacaggcatgagccaccgccccggccagtactttcactatttcctgactcgcccttgaattcattctcatgacggtgtcaagagcccgtacgaccctgggctcaaggtcccattggcattcaggaacctcccccagcctgccagtatcataacaatactaagtggggagaaatgttgctgaagggagtgaaaaatgctacaactactttggaatataatttgatagtttctaatgaaacctcacaagtccatatttaagtatttaaccaagaaaatgaacacatgttatctatataagtcttgcagatgaatggtactagtttctttcagtaaattaataggatcactagatttttaagcttgttctgaaatgacttttgtttgtttacaaatttgttacatttctataaattaaaaagtcacttatattacaaatccccagatatcaaaactgttgtattatattttgttcatgcttcctataaagacttatacaccacatacacatgactctataaaaatgggtattttaaacttcctcctttattattaaataaaacaaggaacttttgtgaattaagaagtaatagattttatgacaaattcacatgactcagaaaatatacaaattgtagtttatcatagaattgtgtaagggctcaaatggttgagattctcattctgtttcctctaattatccctccttcctcatctgcatttatggagaacacacattgagcaaaatatgtgtctgtcctactgagaaagtttatcaactctaactcacagaactgagaacaaatgctgagagtgttactgttttaccaagatgaacttaaccaaacaaagagatagaaaccaaattcaaagccaagagccttacatatagataaaaatggaggaatgagaaaatagcatttatcggggaatcatgagttaattgtgttaccaggctttagggaaaggggctgagtgagcagtcaatataatattacatgaatagttcttagaaaatatcaaggaaaaatatttcccatggattttaactgcttggattcagcgcatagaaaacagaagaacacttgagtgtaatattaataaagacctttaaaaagatgttatataaaaagaaaaaatcacaggccaatgaaaaatacatgcaaaattctaaataacattttagcaaacaaaatctggtgattaaaagtataacacaaaaaaaaaccaagtgagatttttcccaagaatgtaatagtagtataacattttatcaagacatttaaaaataagcataaaaatagatgtctgagtcctgtttataaaatttaagacgtattcctcccatccaagtactaaccaggcccgaccctgcttagcttccgagatcagacaagatcagccacattcatggtggtatggccgtactcaagagctattcccaaggaactaaaaagtgtgataaaataagagtacgagattatcactgaaaagaagttcacaatttcatgcacacacataaaaaagtcataggccaaaagcaatatagacatgagagtctgggggaggttaacagcatccagtctggagcccgagtacttgagggttattctgagtttctcatatttctgtggtcttgagcaagttgtgggactatctttgcctcaagtctttatattgttaaatcaagtttagcctaaagctgcctttttacgtattttatgttcagcctaaaggtttctctgtacatagtgaactgtaacctaaatgaagatgtaaacagactgaagcctacttttgtgccaaccaccaagttttgggcaatcaagggctaactgttcaaaccgtgttcaaataaggcaaacgcccaccaagctgcaaccaatttggttgtttctgtacctcacatccattttctgtacgtcactttcctttttctgtccataaatcttccaccacgtggctgggctggagtctccgagcctacactggctcaggaggctgcctgattcgcagatcgttccttgctaaataaaagtcttaaatttaattcacctgaagttttttcatttaatagatggcatcagaagtgggctccaaagtagagcatctaatgacccccaggagggctgagtgactaagcgagatacccaccaacaaggactaaactctgtttttttttttttatgttgctcaaattcctatctaagtggtctggggagtcaggccctacaaaccataaattctcatcagatggggtttatttaactctgtatatcatgacttactttccaatctgactctggcataacaaggaagaaaatcaaaatactttactccaaaacatgtttctctgacatatcttgaaatggccctgcaaagctatcccttgtaggaaaaatccacattctacagagaatccccttctctgccacctcgcctttttttccccttccttgctttccagatccagggaataatcaactaagagacaggcatccttttaaatccgataagaaacgttttacaacctgctctctctgaagtcagctatccgagaactcccgctgcacagtaaaacttgatctccacaatcctttacctttcttttttttgagataagagtttcaccctttttgcctaggctgaagtgcatggcgcgatctcagctcactgcaacctccacctcccaggttcaagcaattctccttcctcagcctcctgagtagctgggattacaggcatgtgccaccaggcccagctaattttgtatttttagtagagatggggtttcaccatgttggtcaggctggtctcaaactcctgacctcaggtgatccacccacctcagcctcccaaagtgctgggattacaggcatgagccaccgcacctggccactccttcaacttaacctaaacattttctttctgttgatcccaggtcttcaaataaactcaaccaattgtcaaccagaaaatgtttaaatttacctgtagcctggaagctccctgctttgagttgtcccacctttctgaaccaaaccaatgtatttcttaaatgtatttaattgatgcctcgtgcctccctaaagtacataaaaccaagctgtaccctgaccaccttgagcacatgttctcaggacctcctgagggctgtgtcatgggccgtggtcactcatatttggctcagaataaatctcttagaatattttacagagtttgactctttttgtccacaccattgtggccatttccctctcatagcgactggggatcacggcaagttctcttttagattctgaagctccacggatttgtgttttggggtctccaatgtcttcgagcaaatttctgagccaaactgggtttggaagtcacaatagaaactgac

SEQ ID NO: 1882508 - DNA, 4001 bp, Homo sapiens
cactgtaataaacatcacagactgtgtggcttaaacaacaggaaatttttttctcacagttttggaggctggaagtccaagatcaaggtgtgtttctcctgaagcctgttttccttggtttgcagatggccgccttctccctgtgtcctcacatggtttctgctgtctctgtgtacatgcctgtgtcctagactcttcttatgaagacactagtcatatgagattaggacccacgctttaaatctcctcttaccatagttacctctttaaaggccctatctctaaatacagctgcattctaaggtactggggcttaggctttaatacatgaattttaagggggccacaatctaacccatcacaagtactgtgttgttatctcatctgcagacctcttgagtctcctttcatctggaactattccttagtgttgtctctcatgacctgggtatttttaaagcgtatacacctgttgttttttaaggatatttctttttttttttttttttttttttgaggcggagtctcgctctgttgcccaggctggagggcagtggcgctgtctcggctcactgcaagctccgcctcccgggttcacgccattctcctgcctcagcctcccgagtagctgggactacaggcaccgccaccacgcccggctatttttttgtatttttagtagagacggggtttcaccgtgttagccaggatggtctcgatctcctgacctcgtgatccgcccgcctcggcctcccaaagtgctgggattacaggcgtgagccaccgcgcccggccaaggatatttcttaatttggatttgtctggtgtttcctcacaattatatgaaggtcttatttgtgacaatgagttcacgtgcggatgtgtcctcagtgcatcctgttagcaggcatgtgcttcgtcactgagcctattaaccgtctgcacttgaaaggtcctgtctgcaggtttctccacaggaacttacccccactttctcactgacttctttagaagagagtttatacataaatctctacgtccgttcattctgtctgtctctttctgtctctacgatacctaacctccagtctaataccacagaatgctctagccatctcattttcatcttcggaactttttttgttacagtgagaaatttggctctccctattcagcatcaatcttattccaacttgtccctcttattttttaaggaagctgtaagaattgcttccattaataaagttttattatcacaatttctcttaattctacctgagctaagatgccaaaaagtactgataattctgacaccaaaaattattttaatgagctatcagttgagaatttactgaagttcacctttaatattttaggaaagtttcagaaacctttattagccctcattaataccagcattttatattgccgctttgtattacagcaatttgataacagggctgtttcaaaatgggatgtgggaaaaagtcattttgagtaagaatatgtgtgaaagttaagaatatggaaattgatcatcttaaaatttattcatttgtccatgtatcccttgaaatattgttgtatactttcaagaatacataaattaagaactagactagcaggttcaaatgcttttctaagtcactaattgtggtatcataatacctggatttaatcatgattaaaccacacagaaaaaaaaaaaaaaaacttctgaaaagttttaataggcattccatttttacattgattatttagttaaattatttagggtaaaattttggtaaaataactagtattagttgatattggaaatgattataatttttctaaacacttcaaaccccatcacaacagtggttttctccaacagtgacaagtagtatatggagcagcagttctgtcgagtagtcacccgcactggaccaaagctggttaccttttctttctcccatccaagtactaaccaggcccgaccctgcttagcttccgagatcagacgagatcgggcgcgttcagggtggtatggctgtagacaccttttctttctgagatggagtttcactctttgtcacccaggctgtagcgcaattacgtgatcttggctcactgcaacctccgcctcccgcgtttaaacgattctccagcctcaggctccccagtagctgggattacaggcatgcgttaccatgtctggctaatttttgtatttttagtagagatggggtttcaccacgttggccaggctattctcgaactcctgaggtcaggtgatccgcctgcctcggcctcccaaagtgctgggattacaggcgtgagccacctcgcccagccaaagctgattacctttaaggtatacattgaaaatatattcagtgcagctgcaagctctctgtggaatttattaccttttttcttttttttttttttttttgagatggagtctcaccctgtcgcccaggctggagtgcagtggtgccatctcggcttgttgcaagctcctcctcccaggttcacgccattctcctgcctcagcctcccgagtagctgggactacaggcacccgccactacacccagctaattttttgtatttttagtagagatggggtttcgccgtgttagccagggtggtctcgatctcctgacctcgtgatccgcccgcctcggcctcccaaagtgctgggattataggtgtgagccaccgcgccctgccccattttttaactgcagtatatttttctccttactaaagctcataaaaattatattatttttgaagtttttccaactcaaaaggaataagagatttgagtccacagcttcataatgattccttcttccctcttctccctggccttccagtctgatgaagactggtggctgggtttatttcaaaactttgttccaattcagaaagaccagttcacatgtcttctttacaatgatattttttgccttgttgaagaaagcatccatgtaaataaaaaaataaaagaaaatagctccaaatgtatgctggtttcaataagatagcatcgcgtttctttatagtgggatccctagaaccttacccacttgaaaaggttgatgccacgaactactgccaatgaccaagacccaaattctggtcatcactgtggcaccgagatgcttgcggttgttcttgagcaattttgctttgctgttttgagcatttttttcccaagcatcatatgaaaattaggaaaaacaccttgtattatgcgttgtcccaaacaatcacatctgcgggttccctaccttttcctgaatgttctactttctagagaacatacattagtaatgatcaagatcataaatatgaaaaatctttgtgcagcatgaagtgctttttaattgttgaccgttattgtcattttaattgtgttgatcttggggaattcagagtatttctgctgttgaacaaattattgtgtccgtaatagaagcatgttttgtacatgaaaattcttgtttctaatactgaacatgataatgtaatggcatattttattgtggtcttgtttgattaagagcctatctaagaagcagggcacataggccatgttaatgcttattatgtttttattttcctttatttcatctttagaaatacttgaatacattccttttatttaattaaaggggaacgtctctgattggcagcatctctctttcatttattgagctaacatactgggaagtactatcaacagaaaacatcttttaaatccaagtcaattaatttactcatttatactgtgattttaaagaaaccatttaatatgccttagaaaagctaataggacagtagtatcagttacatcttttgcttagaaaaataaatcttttaaaacagattagctctgtacattttggatagaaagacatttaacatgaaaggggcatgaacaaaatttgctattaaaatgaaattagttggttagggacaaattgaataagtggttgaacctttat

SEQ ID NO: 1882509 - DNA, 4001 bp, Homo sapiens
gcagttgttgcaatcctagtctgcttgcaacatggttggtggcacagaccttcccacacctctatgccagatgtcttaaggatcagcccaaagcttaatgtctccagggatatccacttccttcctaagggaagatagaggtgcttgaaaatgtaggttttattattattcaggtatggtgaggccaacagaccaggagatgatggccattgaagagatagtttattactcacagttcccaggaggagggcgtacactgggccacacagggaagcatcaggtcagtcaggaggcagagggaaagggggaagctatgggcagaaggctttattgtgagaaggaacaggtgaggcaggcttaggattggctggcttggaaaattacagcaggctctgggccatagaattgccttagttgtctggtacctggccctggagtgactgggactggtaactggtggccttgagtgtgagagcccaataaaggaggtggttggaggtgtgggctctggattggttggcttgaatgtgaaagatgtgtttgtaggtgaatcctgtactgtctgtgggaactggctaactctgggaggggctgtgtctctaccatcagccaggctccaagatgccaaaatatcaaatacagaatctagaacatttggctattccagagagctcatgcaaagatggtattaggagctacttttccaatcaacagcctccaatactgttttctctccagaatcatctatcagggaagagacttataatcagaaagtaacagaacaaagagggcaggccacagttaggtataagcaagggattggtctttcctggggtggacctaaagggtcgcagctttaaaagcatcgattgttattagagtgttaacagtagcatctcacgtgtgaaggtagggaagaacgagacgaggtcagggccaagaccctgaagggggctgtggacccagagcatgtctcataaatcccaagtcagattctgttgactcctgggactttctgtttgtttcccccctgatttctcctttttttcagtttacccatgtgtcagaagcacctggggagctctttgaaattgctggggctgacccctggccactgctctgcatcagaatcccctggaggctggtgaagcacgtttccaggtgccatacccagaatttctgattcaaaaggtctggggtggggcctgagaattagagcctgttcctaacacgttcccaggtgatgctcatgctgctggtctgcagcccctggtctgcgagccactgactagggattctaactcagtaggtctggagacggtcccaggtggttctgacctggtggtattctgaagtccacacctggagaaacaccgccctgagactgaataaattctgtgatgaacattctcactgtgctgctgccgtgcaagggagaactggccgaagagttatttggccagcttgagtgacgcggatcctgagagcgctccggggtaggcagttgccccggttggacacctcgtcagagcagcgcgtggcaggccccggtggaggatcaatgcagtggctgaacaccgggaaggaactggcacttggagtccggacatctgaaacttggtaagactggtctttggaacttgcccactccatttgagtggaagcgtggcctgatcacccacggcgtgcctgtactggcactttggtttttgtttttgacttgacttgaattgcttgatactttggttttggttttgacctggcttggatttctggatactctgattttggttttgattctggtttggtgtaaactgaaaaagtgtgtgtgtgccttttttacccgttctttgttttgtggtgtgagtgtggtgtgagcttggtgttttgtctcagggaaacatgggtcagacacaaagtaagcctacagcacccggtattcccaggcggtctcccatccaagtactaaccaggcccgaccctgcttagcttccgagatcagacgagatcgggggcgttcagggtggtatggccgtagacgtggctggaaaaggccagatgggccccccaaagtgtggggcctagcccaggggtcccagttgcctgggcctaggagttttttccgtgatgcaatatcattctggggtttgtcacaatgttagaaacacaaaacttgccagatcacctggcctcattttgggcttgaaaaaaatggggtcgccaaagataaaaagagtgtccccgaactgttagccctcctgaggttagaacgccttagccctacccccaatgcccagcaccgtggtaactgctttagttccagaagtacaaagtttcaacatccaaggtataagggtgacccctctgtgagacatttactcttctaagaaaacttagttcctcactcttcaaaagctgcttgggaaaactcaggcaatgatgaaagtgagcaccagcttcaaacttcagcatgtccccaggtttctctcatttgtcacatcagctaaaatattacagggaattttttttttctttgcgaggagaaaactaactttgttttagccctgtgatctataaatgcaaatagtggattggagtccatttccagtgtaaagagagttgagtgatacaaatgctaaatggaaaatccactttccagtagctttctgtagcctggacaaatgcataatttattctcagatagctagactagcaaactcgcaacagggagcgtcatgccagaatgcatttgtgcaaggaatctgaatttcaaaggacggctttgcctggagagacaccacccagaacaatgtgggtttaattaaggtttagagcagcgctttgttcaggtggggttgataggaaggctccaggtaagattttacttggtaatagattattgaccaatggcaggcaagggtggctggtttgcctattttactattcatgaccttgggactgaaggaatcagaatgacagtaggcgatatctctgtcagcctgtttctggagggaaaggcagttttgtgggtggataaatagacctcatttgtgttgccttttgcacctggacctgatgttctgttaaagccaagtgtgagaaatacttctctgaagcaaagggcacgcttgggtgagattaattaacctgaataccaaagatctactgtggcaccaagataaggagcagtgggcagaccctgcccaaacagaagcagagtgaagtcctggagggcagagctgtgctctgagaaggcagtgcaggctccttagcatgagtcagtcacccttggtttgcacccaacccagaaaggggtcttgaggaatcccagcgcatcacagccagccacgggtcagactgagtcgggacaataacaggattccagggtcgtgggtgcggggcagtaccttacctgcttgcctaggtggaaaggatatcaggaagagctttgcggggtgaggctttctggaataaatggagtcataaaagatgctatcagaagaaagggataaggcagaggtgcagcttggtaggatggggtgcaaagaaaaatccatttctgcattcctttttccactgacatttccttcccagctgccccacccacaaccacacacaaacagaacaaaacaactcctggggcccagtggttactccccataccttcctcctaaaattgctctccttggctgggcacggtggctcacgcctgtaatcccagtactttgggaggccgaggcgggcagatcacttgaagtcaggagttcgagaccagcctggccaacacagtgaaaccccgtttctactaaaaatacaaaaaaattagtcgggtgtggtggcgcaggcctgtaatcccagctacttgggaggctgaggcatgagaatcgcttgaacctgggaggcggaggttgcagtgagccaagatcgcaccactgcactccagcctgggctacagagtaagacttcgtctctaaataaataaataaataaataattgcgct

SEQ ID NO: 1882510 - DNA, 4001 bp, Homo sapiens
aggatgagacgctaagactgaccttgatgatgatctcagggatggttagcacggtggacttttgcttggccagaacatccctggtctcattgatgcgagctgtgacaaagaagtgcagggacgcttgttccagcagctgacccatgtactcgccggcttggatcagcaccgcctctttcttgactagtaggagaaaacacacacaggcctggcatcaagacttgagacagggtctgctttacttttctccaagtttccctacccctcccacattagcctggaagccaccaggaacacagcaaaggtaaggggcaagtggaacaaagagtcaattggggataagctgtcctgcttcttaggtaaagaatgtgctggaaatttaatattcattgaagtctcactggagaaaatgtgtcaaaccttccaaacagttcttttgctgttgtaaaagaaatgccatggaaaagatgtgattttcatggcaaagaaggaccaatgggttttaatggtggctttgatttgggccgggatcatcccaaaatggaacatgtggggtgctgaagtccaaggcccccattccacataggatcccttgtcaaataagaagtgtctcacctaggccatgggccacactcagactaaattgtcaactacctacacattttctctgtagcattccacattttctctccaatctgatatgatttttctatttaagagaaggaagctgttgaaaccagtttctaccaaaggcattcaactatctccgaacctctgtttgtgatttagaagacctctgtgccaaacaattgttttctcaatggaaaccagtcactgatgtcagatttctaggtcctggggacaagccaatgagaatggcatttggaagatggagagtggtcctggctcccctccaattaccatctgggctgaggatggtgagttctatcttgtggctctggctcactttctctctaactcccatttcccactgtccaggattctagagagcaatgggcagtttttctgtaggctgagcccaggtgtgcacccactgctacctggttggagccagatgcctgtatgtgccgacagctggcagactccgcaggtgaatgggtgactcattcctccatccccagccacagagaacagactctatgaaccttcacagaactgaatgtctttactgctttccttctcagtttctggcttttgccaaagacttccccttcctgtggaagttattgaaggaaacagcttcatggccaacagtttgagcacagagggtaattcattttagcctgctgtactgaacagcagttttgcagcagggtggggtgcctgtggatgggcatgcaccagagcagagggcagggcccctgactccccactggctcgaaggtgtgggtgcattgagccatgcccatcatctgtggaggaactctcacacctgcgatggatctgcagcagcttgctctggaccttgaagaccaagaggctgggaaagcctctgtcttgggcagcacttctatttggaagtctctttacagatgcgtaagtgctgtgccttgcttccaggacttctgattgaagagttctcagtcatggctctatatcacaatcacctggggacccttaaagacctaccaagctggctctcattccaggccaattaaatcagagccttggaggacctagacatctgtatttttaacagctctgcagctgactctgatgtgcagccagggttgagaagggccactccaacaaccaggggcatccctgtagaatcagccctgcagacagcctgggttccagtggaagggatggctttccagtccaggtctttgctgttcctcctgcggtctgcacaccagcagcaccatcatcacctgggagcttgttacagatgcagattctctgacttcttactgcaccagtgaagtcaggatctgcatttgaataagaccccagacaatgcctattgaagtgtgagatactctgagagacaggaggttctaacagcagaaggggtaagttagggcagagttagggtggactgagaactacctgggttttaaattgaaaggcctgcatcctgagaaccccatcaatccctggaaaactagaaaggttggtcatcctagactagtagttgtcaataggaggcaatgttatccccaggggacatttggcaatgtctggagaactttttgattgtcacaactggggtggagggtgggttactactggaatctggtggataggggccaaaaatgcagttaaacatcctacaatgcacaggatagtcccacaacaaagtatccagcccataatgtcaatggtgctgaaaccaagaaaccccgcatagggcaggtggattattagaatgtattggcctattttgggcaagcgctaaagagctagctttgttggcttgattcctggggcagagctattccatttagagctgactctttaaagctatgaccttgccttgaccttggcccccaggtcctgccttttggaatgacccgctctcgtattgctgtctttggacctaagcctggaccctgcttcctccatggctccccttgcaattaattgtttagatgagtgaggttctggccctctattggttacagcctcagatgagcacaaatggtcagtttatcgtgtctctagatagaatggatgaagtggcaaggtggaaggcctcgaagaagatgccttttgcctctagctgtttccagtaataacaataataaaatgacttcttctgactatttctagaggactatgtttgaccactggatttcttttggctaatgggatatgatttctttacagaggctcttgctacctttataatctcagtatcaggacccctttcttctctgaggtagaacactccctaaatcatagcactaaagaaaccaggctgtgcttcagagcccaagagaacagtgcttctgaaatagtatgttatgtaagtgctgtgttttgccactgcacaagaaattgttctagataaagtttattaaacgtggcaggagaaggaggaataggttttcgctctatgagcggtagggctgggatgctgccaatatcatttacggtgtctggggaaagccaagggagacacagactggagctgcctcatctcttttccaaaaagcaaagaaaactaaatatagccaagtggaaatgatagcacctttgaaggtacggagaggtttaagttattcagatctcccaagctgattccagcacacacattccctttaatcatcaatctggaaagtatgcctcccattctacttggaaagctttctttgcagcagaggcatctaagaatgcttgatcaaggcctgaagttatgtggctttttgcaatacactgcaatttaatttatatttcaatatacaatttattggtcacagttaataccacctgcctgcagggcaaaggaacaaagagtctccagttcccttcaagttattcaggacaacctggggctggccaagcgaatgggagatgtgttcctatggactcaggcataggtttggtcagctgtccctaggtcgatgactgagagaatgatatcattctactcacccatacaagctcattctttaattggattaaagagggaaggggaaggagattatgagacaggacacttgtgaggtgggaaaagggctggcatttggttctttgtctaaggatctgtgctagactccaggtaatgggagcacaaggaagggacctggcccacttggggccaagtttaccctgaactggctcactgtcactgctattatctgtctactctattatctgctttgcctctcattgctgtgtgggggcttgaacacatcgactcatctctcgagcttcagtttccccaaatgtaaacatgttggaagttaccatttactaagattctaccatgtggcacacatttcacattcatcactcatttggcttcctccata

SEQ ID NO: 1882511 - DNA, 4001 bp, Homo sapiens
ggagcagcagaggcccgcggcactcaccatgcagacccagcactggagggctgagtggtggggggtctggaaaagtgaagcgcacagtgtactccttagggcgcttcaggagctcaggggcctcctgggattcctcatcttggtttttccgtcggcatttctgctgcttccgagtcagggcttccttcgtttgtttttcctggagaggaagaggaaaaaagagaaacctgagccctgcgcggcagtccttgaaatgtaggccagcgttccagagtctccttcttcctccactgccaggagagaacagtggcccccagcccagaagtccctcaggtgctcaccgcctgcttggtggacttcccgcctgccttcagctccttcagctttttctcttgcttctcatactgtttcagcagttctttctgcttctgctggtacatctttttgaaggtcactggggcagaagaggggaccaggcatcagtggttgctcctcttcccagcaaagggacaaccagggactggtggtgatggggtaggcatcactgtctggaattctgacaggattcagtttatctaaataggccctcccactcaggcctcttttcgaggttctatctcttccctgcatccacacacaatcctacttactgtaattgcccctatagtagtggagccgctgggcatcgaggtggatgatatcagtgcagacatcatccaagaagccctggtcatgggagacgatcagcaaggtcttccgccagccctggaggtagctgggtttcagagaacagggtgtaagtgtcacagtggtcaagtgagagagaattcagaggaagcaggcagacaacgggggctgggagggaaaggggggtctgaatagagctccactcacaggcacagtggagaagggctaaaggaaaacagggcagggagggaaggggaagaaagtgcagaatgggaaccaatgatgcaaaggccgtaacgcacttattaagccagatgacagcgttgaggtccaggtggttggtgggctcatccagcatcagcagtgtgggctccatgaacagtgccctagagggtgggtagcagagggcagggtcagggagagaaagatccttgctcagacaaccccagagaaaactcggagatagagcctgagaccatgaacactccttcccaagctctcctcagagaagttctcgggcaggatacggtttaatttttttgagacagggtctcgccctgttgcccaggctgtcgtgcagtggcacaataagggctcactgtagtctaaatctcccaggtctaagtgatacttctacttcagcctccagagtagctgtgaccacagcgtgcgccaccatatccagctgatctttaaattttttgtagagacagggtctccctatgttgcccaggctaggatatgttttcttcccccttttgtgaagatagagtctcactatattgcccaggctggtctcaaactcctgggttgaagataatcctcctgcctctgccttccaaagtgctgggattacaggcgtgacccattgcacccagctgcagggtatgttgatgagaactcaccaccaagtagggagataaatagagaaagaccctaagttctcacaacacagatagtaaggagggagaggtaagccttgagcctccctattggccttggaagaatgagaagggaaagaggaaaagggccccggtggtctgaggctggaagggagggcagtgaggtgaatggcccacctggccagggagacacgcatgcgccagccccctgagaacttctgtgtgggtcgattctgcatttcagggtcaaagcccaggccagccaggatccgccgtgctttggcctctgcagctgccgccccagtggcccgcaattcctcatacacctgggaggagggagaagaggacacacgtctgagggtcccaggaacccccaagtctttgcccgtgtcccctgcgccatctcctctaccttctctagcctctcagcagctgtgtcatccccttgttccagctgtccctgaagccgccgctcctcttccagcagcttcaatcgcttggtgtcagctcgaagaacagcctggactgctggtgtctcatctgctaccacctctgggaggcagagggagaacagtcaggcagcctcaagagccaagagtctcatctttctttcccttcaattacatttctgttttgcctgaccctgcccagctctttgtacttgttccaaataaaacactctcaagttcctcattgaccctcccctcctttccttagcatccctttcccggtctccagtctccctccacatcccttccaactccatagccacaatttcttctattcttggctggctggcttttctacccaactgcccaccccaccaagccccttttctccccagtggtctcaccctgctcacacagcaacacatcaatgttgggagggatgctcagggctcggttggcaatgtgcttgaggagtgtggtcttgcccttgctggggaataaaagctattaggacctggccaccactgagaaatctcttcttttccctccaggcccttttttgcctccagctccctcctcttctcacccattgggtcctaccagcccgtagcggcggccggctacaatgtacaggtctgcattgacgaacagctccttgccatgagcggagatgctgaacttctccagctgcagccatcaggaaagaggtggcagagggaagggatgatcacatgaaaattctccctttgggacaggagcggccactttctccctgcagggaagcctctgacaaaccgctacctccagcataatccccttcctctccccacagccggtccccgccctgttcgctgcctgtaatgggagccccatgcatcctcagctagtctagtctgtcccacactattttctgccaagggtggaccccacttctactggtttttctatcttcttgctcaagttggcagaacctaaggtgtggaaaatgcctccaatctttcttcccactgaactaacccattcacacaccacagccactcagggaagatgagagaactggctcttccctaggtaagtggactggaaggggccccttgagaccttaccttgatgtcagatgcattttctaacatggcttggcgggaggacatctccgcctgggacacggagaagtcattttcagctgcattggctgcttttaatgaagccacttggcgctcatactccatctgagaaggtaggaaaaactacatttgaagccacagtctaccagtttcccatcaccatgaaacagcccatgctggctgggcatgctggctcacgcctgtaatcccagcactctgggaggctgaggtaggtggatctcttgagctcaggagtttgagaccagcctggccaacatgctaaaatactgtctctacaaaaaatacaaaaattagccaggcatggtggtgccacccatagtctcagctattcgggaggctgaggtgggaggatcacttgagcctggtaggttgaggctgcagtgaacagagatcacgtcattgcactccagcctgagtaacagtgtgagaccctgtctcaaaaaataaacaaaaaaccccaaagtgaaacagcccatgtcatcagacattgagataaggttcacagaacacaattattttcttactccgattgttttacttggagtagcccccaaacctttccttcgtgtccccaatcgcatgtcccctagttgaagtatttaaaaatcccctacttttgaccgctaagaaccaaggtcttacctgttttttcagctttttcttctcctttttgctaagatgagcatagggatcatctgccttagactctcctccttcctcctcctcttcttccccttctccttcttcctctgaaccctgtgagaacccggggatggtcaaaactagggactcctggctgggcgcggtggctcacgcct

SEQ ID NO: 1882512 - DNA, 4001 bp, Homo sapiens
aagaatccctgttgacccccaaatccatccatcacaacatattgaggctcccctaactgacccacaaagtaaataagccttaaaggatacaaaagaaaagggtcttctctagctttcttaggaaacagaaaaaccaacagcttttcaggtaaaccccgtgtgagcatcaaaatctctctcttctaagtgacaccacaggcataatgtaaggatcattggattgagagtttagatatccaatgtttcttgttttgtctctgatactaattagttactttgtctcactgagaatctactttttgtcattaaaatgagtgaactaggccatataatctttgtcttttttttttttgttatgtaaatctttttttttttttttttttttttttgagacagagtctcactttgtcacccaggctggagtgcagtggcgtactctcagctcactgcaacctccgcctcccgggttcaagcaattctcctacctcaacctccctagtagctgggattacaggcacccactaccacacccagctaattatttttgtatttttagtaaagacggggttttgccactaaatctaatagtgaccatacagtaataggctcaataaattccatccactctctgagcaaaacataatgcagaaagttcttgaaatctttgtctactgctagtctgtctaccagccacatcccttaaagtctccatatggaatcatattttggtttaaagttggacagtttcctttagccaatagtactttctggtcagacattttatcaagatcccaagacccctaaccatgagcaacatttcctttcatctgtgggtcctcagtagttacctgcttttctttctgaaacacaccctgtttcacttgaatgccagtaataacctctcagatagatattgggggtgacattacagacattttctaatggaagtttctgagggccaaggaaattaaatggtcaaccaatgccatttgggatgtttgttactgtgaagtcatcatgcctccagactcataatcttatgttccttttcttataatttgctgaagggatttttagattataatgtctatcgggagcaaccattttgagagttacaaacattgtataagataattagaaacaagattcataacacagaggtgtttcatttctgttcgctgaagcaagctattggccattgtgaacccactgaccacagggtcagcttgcataaacgaaaacagaattatgtcactgcaccttgtccagaactgttattgtgcaagttaactaaatttatgtagttctatgtcctgcacagatgcgggacttttcttctaggtcactttgcaagccgggggcccccagctggcaactcctttccaggcctcgctctgccacactggcatgccccagcttgcctgtgtcatagcttgtacccctgtttggtgattcctgagctcttctactgcacccaagaaggatgaggatacactggacattgaagggtgaggagggcagagaatatttttattgagcaatggaacagctctcagtggaatggtgaagcagtgggtgattacctaatccaaaggcaggaaagtcccccatgtggctgggtcgcaggctttaaaccttccacttgaaggtggggtttcactgtgtacccgctcctatctgcctaggcatttggctgcctcctgtctctatcagcactagagatagcaaatataagcgtcttcatcagccaaccaagcacttttaattagttaggtgagtatgttgtaaaacaacagaaaatgaagactgtagtgaaccagatactacctacccttactcagctccagcttactgttgccatatgggaatgcaggcccaggatttccagatcttctcatttttccagaaaaactagtttcatctgtgaaatctcttgattgtgaaatgttggaaactaattcaattttttattctgtacaggttaaaaaaagaaaaaaaacaaaacaaaaatatcccactatccatgcccgtaggtcagagtaggccagcagatcaccaatatacagttcctactaaatactagtgttaatacaagaaaaatatttgacttattggtttacaagttgcagaaaagtgaaaccaaaactaagttctaaggaattagcatcaggtaaaagtagaaggctatagcacaattatcatggataggatgaagaccaaagtcctgagtaaagtatttgcctaaatttccaccctttgtgcctatgatccagccatatgcaatcacttgttcttgagtaaaccatacactctgtcacttccaggcctttgcacatgcaggtcctcgtgtctagataacttccatagcttcctcttgcttttatcaatcaccttatcttcatgctccagatcacaggtcaagtctcatctgttccagctaatagagagcagctccacaccctatctgatgcttctgtagtgctaagctctatgctttgtgattcacacagtactattcttgtctgttttcttgtatttcttcctgatgaatccagaagcgacttaaaggcaaaatccctgttttattagcatttgtagtctcaacttctaaaacattgtatggaacatagttagtgaaaaatatttcttaaatgaatatatgtgaaataatgtaataaagatatatttttataacctttcagataatcaatttgaaaggtaaaaatattatttcaagtagaaaatgagcagcatttctattttcagtttacagaacttcctgagaatcctttatatttaaaattataagcaaaaggcaggtcctttccatttcttcctgacttaaaagtagatatgatggctggattgatgacagccatgttctaatcacaaggaaaaggcttaaagaattaacagagatgtcagacctgacatagttaagtcattgagccaactccaccatccaataatgtctgggattcgttttcaagaaaaattaacttttttttttttaattctaagctaagatactttaaagagaggcagtatccactcaaggaaaaagcatcattctagaaggaaagatttattctggtaaagggaaataaaaaataattataccatatgtgaattaatgaagcttcttagaagaaaaggctgccctacatgaattaaattattattacttactatctcttccaaacaaatgcacatacatataaagttactcactaaattgaaagcatactttatttctgaagaaaataagtagcatttagaaaccagggtatttgtacataaagcaaagactgggttatacagcacacaaaacaagaagggaaaaatctatacaattacattaaccagttttttccagtggaactaatgaatgtaaacatctccttggtttctttcacaccattgcctgtgaggtttttaaaaatacacttaaagtgaacattaggacatttttaatatgacaatgacttcattttattaatactgtttccaagttatacaatccctaactcaagtttcagttagtgtttgcaaatgaaagacaacctaaatggagttacattttctttcttcttttgaaaacaactttgttgaattgttaaaccaactaaggcactggtttctattatttttcaacaacagaaaaatataaatggcaaaaatattaaagtgtctttctagcagagtccatagctgagtaaaaagcattattcaaagagtctgaataagggagcacatcaccactggctccgtcttctgtctcagagtcacctcagtcttgaaatactgagtcaatatcctcagaagccgaaggacgtgtcaggataatccgaggtaactttgagataatcagaggttgttgaaaaatgagatggagtggtttttaaaagtaaggaggctagtggaaaaataagccaaatgtcaggaattgccatagaatatgagtaatcaagtcaatgtagttacagacaaagctgtgataa

SEQ ID NO: 1882513 - DNA, 4001 bp, Homo sapiens
agcccaggaactgaaaggcataaagaaaccgagtgctagaacacgaagatgacatttagacacagatgcttttctgcaagtcaccacactttaattttaagaaaggagactagcgatctattgaataattcattccctcatggcactggttcaacaccccaggctcctctgctgagaagcctccttatgtagctgtactggacaagtgcggtagaaaagacagaacccagtggggatgacagaattctttaattgtctgcaaaagaggaaatccagttggtggagagaaaaattatttccacattggaaaaaaaagtaatgacaaaaataaaaaggctttgtcaaatatagttcactcttctcattacttgccttagtgtttcaaagataaacgctttttgttacaacacatcacagataacgcaacttcgcctgactgaacccggcgtggggagactgcagagatggcgctctgcagccaaaacaaagggtgggggaggggaggggcaattacaaaaaagacaccttatgaaaaaaaatccctacaattcacaaagcttgctactgaaattaatttcaggtttccacgtccacggggacacgtacaggatttaaaatgacgatcacgtggcatctctcagggccaaatggggcgcatcaaagcttcccctcgacgtttattaactctgcagtccgttctctacgtctgcgaagaattggcagataacgatgtgtctgagagaagaggcgttttctaaggagacacacaaagggagtgggaccctccaacctcactctgtgagaggaacaccgcacagcagtgtgggggctcgaacaccccaagagcggcagagcgcggttcagaaaacatgacccttgaaatgcacacaaagcctaacaacgtgtcctccgcggaagaaaacagcttgaaaaggtcggctttgaagtgacccagcggaaaggaatcaccctggaagaaacacgcagcagccccggggcaatgcgcgggcaggaggagcagcgagcgcggggagcgcagggcccttcggagagggcgctccaccggccctgcgctccgtacctgtgccgccacgcccaccggtcccctgctgagcctagcaccgcccatttagacccagcaccacccgtccggaccgaacctagcaccgcccgtccggacccagcagcgcccatttggatactgcaccgcccgtccagacccagaaccgcccgtccggacccagtaccacccatcggacccagcgccgcccatttagacccagcaccgccagtccgaaccgaacctagcaccgcccatgggacccatcgcccgttcggacccagcaccgcccgtccagatccagcactgcacccccatttggatccagcaccgcccgtccagacccggacccgccagtccggaccgaacccagcaccgcccatcggatccggcgccgcccatttagacctagcaccacccatccgaaccgaacctagcaccgcccatcggacccaccgcccgtctggacccagcaccgcccgtctggaaccagcaccgcccgtccacagatccatcaccacccatttggacccagcaccgcccgtccccgcccgtccggaccgaacgcagcaccgcccatcggacccagcagcgcccatttagacctagcaccgcccgtccgaaccgaacatagcaccgcccatcggacccatcaccgcccgtccagatccagcaccgcccatttggatccagcaccgcccgtccggactctgcaccgcgcgtccggacccaacacagcaccacccatcggacccagcactgcccatttagatccagcagcgcgcgtccgaaccgaacctagcaccgctggtcgggaaggaacccggtaccgccggttgggacccaccaccgccagtccagacggaaccctagcaccgcgcggggcccgccctccgacacctccctccctggcggccgcggcagcagcacctagtggagcggcccggaggtgcggcggcgccgcgcggggcggcggcgcgcacggcgggcggcggcgcgcacggcggcgggcggggcgcgggcgggtgcgggcggcgggcggcgggcgccgggcgcacaccggccggcggggctgaggcggcgcggcgcggcgcggactgagccccaggcggaggccaagtcggaggacgcggcgcggccgcggaggcggaggcagccgcggaggcggaggcggccggcggggggtggcgaggggcgccgggcccccgcggacctgtcgtcctcggcccgtcctccggccccggccccgcgcggctgaggaggcgcggccaggaccatgtcggcgggcggccgtgacgaggagcggcggaagctggccgacatcatccaccactggaacgccaaccggctggacctgttcgagatcagccagccgaccgaggtgagcaccgccgggcgcggggcctgcgcgacccccgcccgctgcgccgcgccccgcccctcccccccgccgccgcccgccagccgcggacccgccctcctttccccctcccccctccgccccttctctcccctccccctcccccaggcccaccgcgggccccggcgtcccccgcagcccccgtccccctgccgcggtgtatcccggggtcgcgcgggccgagcgggggctggcggggcgcggcagtcacctgttcccctctccggccgctcacctggtggctcacctgggccgccgcccccacccccgcgagcgcggcgcggccccggcctcatccccggcggcgcggggggcgcggcggcgcgcggggccggcgccctccacctgcagcccggttgtggctcgcggcgccccttcgccgtggccgggatggagcctgtgacgcgcgctgtgcttcgggttcataaacttgcaggctgccagctgggaggggaaagtcagtatcacaaagttcgggaggtgcgggctgcctgatggcacaggcccggagtcggacgcctccgaggaaaggcgcgccttctccaccttcggggccgcgaggaagggccctctgcggcggcctctgcccggagggaggcgccggccccaggctggctccctgagaggaggaggaaatcacgctcgctcctggcctggtaacaatgggggttgtttatagcaaagctgctgaaagcgttccgagcagcttttaaaaaaatgtttgagtccaagtccactaggaagggctccgtggagaggggagggaggtgaagggtcggggagcaaccctgtaaatcgctccgcaagggtcggttccgcgctctgttcattcggtggctgcacagactttaccagcataaaaaaatttcactcaatatttgtgcccgtttaggaaatcattttaatagcgtctatttttgatttgttgtaataggtaatttatagttaatacttgctataaaatactagctcctaggcaacaaaacatgtttggcagatttgaacattcttacgaaatgtaatccttttatcattaaattccactttatgtttttgagagaatttgactattgcttctctgatttcttgagtttttgccagtcatgggaaggactctatttcttctgttttcatctgtacctgtgactgcacttgacgtgggtagctagccatttgtcttaatactgagttgaatactgacacacgccattaggctcaggttgtcaatttgagcatagatgttatgttaagttactcctgattcattcatcttctgtaatgattttatgagttaggttctagtaagggagttagtactatgtacttaagtgttcgttcatagactagtgtatctttagaaaggtgacatgataatttagtttcaggattatgttttcttttagaataatgaattcatttttctttttatcacaaggtaaaaaaagttgaccataaaacattttcttggtgtgtagctttttttttttgtttgaatggattttttttttttttgagagattt

SEQ ID NO: 1882514 - DNA, 4001 bp, Homo sapiens; identical to SEQ ID NO: 585475

SEQ ID NO: 1882515 - DNA, 4001 bp, Homo sapiens; identical to SEQ ID NO: 585479

SEQ ID NO: 1882516 - DNA, 4001 bp, Homo sapiens; identical to SEQ ID NO: 585487

SEQ ID NO: 1882517 - DNA, 4001 bp, Homo sapiens; identical to SEQ ID NO: 585488

SEQ ID NO: 1882518 - DNA, 4001 bp, Homo sapiens; identical to SEQ ID NO: 585494

SEQ ID NO: 1882519 - DNA, 4001 bp, Homo sapiens
atctcaaatgaattaaaggccacttaccttgatatctacacagtccaataagacatgttgtagacaattacctcccacctgtttaatgattctccggttctagttagccggcataatcaattttgctaaaaaggtatacctctcacgtcttgggaaggacgtcccaaataggcaacttacttaattccaggatgagtgacagaatctacagaccctgaggccatctcacttgtacttgccttaatgtaactagtaaagcatacctggcagtgcagcacctccacaggaaggtgctccagaaagcaattgtttgctctcaccctgctgagaagtagcaatatccatgtggcttaagggctgtagctgcagccatgagcagtgttagaaaaatatcaccaccatttgccagcatgagatgccaaactgcaaataagagacatgtcgattcaatgaagcagaaacatttcacttgtttttaagattacttgcgagaactttattgctatgtgtttgtctgcctttaaataagaaattgcatttttaaaaaaccatctcttctcttctccctacaaagggacgaggctttcctactcgggtgaatattgcctgtgctgcttaccgaagaaagggagcagtcttggcaagcatcttattagtctaaaaataaattattcagaatgcaggttcagatacagattgcagggagagataatagaataggttttccaagcctgatcatgctatgaagacgtggtgtgtgcttttcaggaatccacttaagtggaatcagctttgactaatacatactagaaataatattgctgccatccagctagtgtctgtggtacagcatcctcagaatgtcttcaagtatccacggcctctttagtctctgtaagtgcgcatatgtaaaagtgtatatgtattcccaagcaagcttcagaggcatgcttctcattgttcttttaaggaaatgtcttcctggccgcctgagaggggcatgtctcacttgaggtttgtctccctcctgctccccctgcctgggtgaaatagttgaccacatcagcagccgactgcagtttgtcatgtggtttctcatgtgatgctgggtctgcagcacttgggagcaagagtctttgtgactggcactcatggacagacagtggtgttcagggacagaacagattttggagggggtggggaggccaataaaccaagaaacgtcagaaataaaagtcgcatgaagtactctgatctctgtatttccttttttttttttttttttttgaaatttgattttaactcttgcttttttttatggtttgtgtctgttttttccacccccgctggcgccgagctgcgctgttttgtgtttctttttttttttttttttctattttttttttttaaattctgaagccagaccgtctttcctcacagctccacggctgcatctccgtgggcacgcaagcttcccctggttacctgagctgctcctgccgtctcccgcctgggcttcgccgtggtgcacccgatcccggaatcgtgcgtctgcgccctgcgaaagaaggacctgctggcggagctccggccggggtctcctgcctcgcagctgggcgaggggacttggaggacagggtgaagctgcagaagacctggggtgggatggctagagaggacgccaaggactggggaaggggaagttaggaataccttacatccaatgcccacccgtgctccgcagggcaagggcagccgtcgcctcggccgcgtgcacccagctcaggctgttcccagggatttagtctggggggacaacccatggcgagatgtggtggcattttacctcagagtggagctgaagatggataaacaaggtatctgatgtatctgcctgagaaggcagagctggagaaaggcggagcgagggagcgcgtgaaaagaaagagatgccgaatgccgggtgattgtctgccgcttgctgtgcattctcattctagggaggatggcataatttataacccagcacatggatagaggaactgtaaattgtagtctggatgtccccggcgctgtcgacgaaggaactgatgggctaggtgactgtaccagtgtccccagagaaaatcgcagcctcgcagcatggatttaaatgcatgtgcatgcatgtagagacatgaaaaaaggtttctgaccattttacacaggaagtctgtcactttgctggatcgggcttgattgcagcttgtgttttcagctccagttcaacacccatttcctgactagtgagacagcatggccaaagcagctgcatgcagaattttctttttactgtgaaagcaagccccctctgttttaactccttccagttctgaatgctctgtgctttgctaggaccgattgtggggttttgttttcttcttctacaaatccctgtaaacacagctgtattcagtaatggcaaaaaaattctatcctgtaaatagaaatctgatcaatttaatcaaaataaatgtatcccagatgactttgagaccagctggctaccacaggcttcagatgctaaatgctcagtggagatgaatacagtgttatatttacatgtttcagagtgccgggatcagcctataatttgcaaaaagaaattattttctaaagacgagaggtggtcctaccagctcacagctgatggttaggtacaggtgtaaatgctgttcatgtgatttggagatttgcagtgttgcatttcaaaaggcatgtgccatgaggcagagtatggctgttgttagtatggagaatgcttgcttctaacttgctgttatggagagccgaatgccctctgaatagcttctagtgaggttgagggcaggcacttgaggcttgttgtagattcagatgtgagagctggggttctccaaccccagctcagtggagtcagctcaaccctgggggtgaggaggtttcccagttgtcatggggagctcttctgggacgcctgtctggcccttccactgtttgttactaattctacaaaggcagctctgtgtgttggattatgtttggccagctgttgatgcattcctgcggatggggctgggtgaggatcttattactgtactttcaaactgtagatctgtgtgcagggatagtacagaaggaaaggaaaagcaataagttacagaatctgatcattcttacctctttctccagatagtcctagagtgaatccagaaaggctttaaagtgaaaagaggaaagagagagtaagtgattgggggtgggtggcatgaggagaagagaatgaaacagagcaagcgcacaagagaaaaacagccttagaacttcaaagctgcatagacaagcagaatgtcaccagcttgtaattagcggttcatggttgcgtcagtgactgtatctatccaagaataactatgtgatatgtgccacaaagtgaagaagatagtcataactaagttatcaaacccagttcaaacaagggcaaatggattaagaaattttctgtttgtaaatcaaatactgatggattacacagataagacttaactgaattctgcgtaattgaaggctgaattatcaatttgtcaggggggatatgttcattaaatgaaactgtgaacgcttaaacatgcaaattaatcatgcgagaaaatatcagtgcaagctctatcaatacaagatgttttactaaatagccaaaaatggcactgccagtctcctatctctgtatccacacataaatttttttgtttgtttttgtgcatttcaatagagagaagtcaaaagttacattcgagtaaatagggtaaattaaattctaaaattcccactttagaatttaaaaaacaactaaggagttttgatttttggtgatctcccgagtttaaaccttgaaggagcttttgctgtcttgaagccaaacagcagctagtcagtaatcgttatgggaagtcagggtaccacagttgttgagatttcaaggc

SEQ ID NO: 1882520 - DNA, 4001 bp, Homo sapiens
accatcagtcaagatacagaacagttgcattaaaaggatcccacatgctacctttttgtatccctactcactccttccatctgcctgcctcctctgacaaccactataatttgtcatttcaagaatactaggtgaatggaatcatatagtatgtaacctttggcatttagctttttcttcccttcagcattactcccttgacatccctcaaagctgttgcatgtatcgatagtttgttcctttttattgcacagtagcattccatagtatggatgaatcacagctttttagtcatttacccattgaagggcatttaggttgtttccagtttgggctatttatgaacaaagatgctagatgctacaatcatttatgtacaagtttttgtatgagcatgagttttcatttccctgagataattgtctgagagtgcaattgctgggtcaaaagataagtgtatttttagttttataaaaaagtgcaatactcttttctggaatggttgtaacatttgacattcccatcagcaaagtctgagtaatccagtttgtctgcattgtcatttggtggtgtcaatattttttatttttatcttagctattctgataagtatgtagtgatatctcattatggttttaatttgtatttccttaatggttagtgaagtttaacattttcatgtgcttattattagccatagtgtatcttctttagtggcatctcctttcctatcttttgcccattttctaattgaattgtttaggtttttactgttgaattgtacacattctagtcttttgttggatatgtgatttgcaaatattttctcccggactgtagtttgtcttttcatccagttaacagagttgcagagcaaaaggttttaattttgatgtggttcaatttatcagtttctccttttatgaattgtgcttttggtctgaattctaagatctctttgcctagctgtatgttctgaagattctctcctgtttttcttttctgaaaattttatagcattatgttttatatttaagtctgtgatccattttgaatttatttgtggataagatatgagtttaggtcaaaatggtggtcatgcttctcctccccttcctccccgtctcccttcctcacctcctccctttcttcctgctcctcttcctgctcctcttcctcctcttcttcctcctcccccttcccgcttctcccccttccttctttctcccacctcctccttcctcctcctccttactttcttcttctttcttttctttcttcttcacttgccctacatagtgattttaagagctatagtgccttctcagcctgaatccaaagtgattcctgtagtaaaggtaactgccggttcatgaacaacctgctcaatgttaacctcttcttgttcctaaaatgtagagtcaggggagcccctgaaactgagaatacaaaccaaaactgttctggaagagcagcacagttttttcaactcagaaatgtaaaattgtcttgcttatcatgacctcttctgaaaagtattctaaaaatgaaacaaaaaacgtatcctaaaatgctgaaatgtgatcttgggagcatagggacagtggcacaaggatgaaatcagtgatgctcttaagacagtaagacaacatgatttgtaactaggaaatgagagagatggagagaggagaatggagagaagagggggtaggagcagggagagagagaaagagacagagagagaaacactgactgacaaacctgtagtttagctcttacaatgcagtggaagccagaaatggtcaagctattaaaagcaaaaggcaaaccaaagagaaaagaacccccttcagcctataatcagaaaagagccatccaaagttatacatcttttcaaatgccttctgacttaactgtggaattaccatgtggaactagcaacagaacttacttgaaagctggtttctgacaatgtagagcagagttctctggagcagcgtacttaagggcagtccaagcaagatctctggagagaaggataaaatgtcaggccaagggtgaggccaaactgatgcaatctcagttttctctaaactaaattataccaccttacataaatctcaactggtgttctgaggaagtcaaaaggaagatttaccctgatgctgtgcctgctgccacaattacatatctgaaaccctaaaaactgctttttagcctgcttcccccttccacctaggaaaaactaggaacacctagtttttcctcctgagtagttaaatagccaatgttttctttgtgtgctatcttatcatgtggtttcataatcgttgtgtgactgtgtttgataaatagtcctttgccaaacctgttttgttgacgtttcgctctttaacatcaaaatagagtttaaaataccctattttaataattttggattgaaattagtgatttgagggtcacccagtctttcctttcttataatttatcttgaaatatgcctgtgtaactctaaatagaggggtggattaatactgctactagatagagtaattctggataagacctgatgaattttttggattttctgaccctggtccaactggttttcaggtgcttcaggatagttttataacagttgttaaatctagattgaatgatttgtgaaactttttcacaaatggttttgcaaataatttatatatgcaaaattagtatatgtctatattaatttcttgatccctgacaggtcttgaaaaccaaatgaaaaactgaattactaaagcaaattatactttctgtactatttgtactgtgtacaatttatgctatcctctggggtgactatcatgtgtcatttgttacacccctgctgactcttccttccccttgtagttagaatgcaaaattttctttagtattgccatacagggctgtcttcttacacacttgcttgacattatttggcttttgtgatttccgagtaggtccttgtatgccattggttgaagattctttgaaagcattttttcaggatcaagcgttgattgaagatatccaaaatacatctgtagttgaaccaaatggtgttttgtgggaggtttacttttcccctctgataaggtgtgagagcctgggagtaaacagtgagtaatatagacgaagacacagactgggtgttcatgtaggtcccttgttggctcccacctcccctattccctggttgtcatgaaaagcagaactgctgctcccacctccgctttcctcttaacccagcctttcagagcagcagtaggagccagcaccacctctgtcatcattctcagtgacaaaggatgcaaagtgtagaacatttcttagctcccatctccagcctctgccctggcaattcttcacccttgaacctctgacccacaagcagaacacctagtgtttgcagttcactccagtgtataacctctggcaagtcttctaagcttcctttaccttacatttcttcagttgttaaatgttgctaaaaataaccaactaacaagatgcttttgaagaaggagacatcccaaccagccagaactggagagaagctcaaatgggacccagcaaggagggccagagctgaacagctggtccccttattctcttttccatggcagaggagatttgaacccactgtatagctttctctgttgtgtgaatagtacactttgtagctttcgtgttcaagtaaaatgaaaccaagatggctatgaagattgagggtaatatacgaacagtacctgatacagtgagtactcacacattcctttaataacaaatcattcctgatcttacttctgtgtctacctacatcttcacctaattttcatcttgacctcccactttcagcccatgagctgctcctgttgttcagatcagggaagaaggaacacttaacgacaatccaaattggaaccatatcatttcccaaagatactttgctataagcacagttagttaggttc

SEQ ID NO: 1882521 - DNA, 4001 bp, Homo sapiens; identical to SEQ ID NO: 585511

SEQ ID NO: 1882522 - DNA, 4001 bp, Homo sapiens
atgtatacatatttataaaaatatgatacattccattttaaaaacatttttctgctaaataaagtatgaatactctcctttattctaatggctacttaattttgcccatacagatgtaataaaatcaattcaattaattctttattgttggagatgcaaattactgaaaaatttttgcaattggaaatacagcaatgaacatcttatattcttgtgcatttgcccaattatttttataagataaattttctgggacccaatttcattttgaccagagcttttacttatggcttcaacctgctgccttcaatgggagctgattttgctgatacagaagatagtattgcctctactgggttcttcatattagttcctctgactcgagtcttcattctagttacaatctctctgaaaatttctcactttgggttttctattcctttactagagactatatggagcttggccaaagtggcctttatgatttccacatttccccttatctttcaacatccttcctctgccttctctttaaatgctcacaaatctaggcagaattctattcttgactacccttctttgtagtctatgctctcccttagctagtttgtcctctgattctatttatgagaatgattcatccttaagagctatcctttcccccatttttttgatgtgtattcccatatattccttggcatcttcccatgataatagtgcaagtatcttaaagttagtattccccagactcaatgctttattccaaactcccagcaaaacaaaaacaaataaaaataaaaaacaaaaccaaccccacctcccaaacaaaagaactcattttcttctttcatattctctcttcaaaagttgaaggtgcccactgagccaccatcaaagggtcattcagatttagattgaatagacatttattaactgtatcaagtcatatcggtttcctgcttaaaactctctagtggctccccattgccattaaagtgtgactcaaactccttacaggaaccatcaggcttctgtgatctggcctctgtctgcctcctgcccagatcttctcccaggctcctcctgcctctctatgatcagctgcctgctttctgaccttctcttcaaagtacaagtgcatgtgcatctcagagactgagcacttgctcttcctttggccagaaccgcgttttggataatgtatttggtgttgtaactaacaactcattgccaacccaagatcatttagattttctgctatatgtttttcttttggaagttttatagttttgaacttcacatttagtctgtgatctattttgagttaatttttgtgaaaggtaggtctttgtctatattcttttttttttttttttggcattatctatccaattgttccagcaccatttggtgaatgctcaaccctttctccatcgaattgccttgggcctttgtcagagatcagttaactattgtgtgggtctatctttgaggactaattaatataaatttaaagattcctttattgaaacattctatcagcaaatatttcattgagtaactactatatgatcagtactgtttcaggtactgggaacatatctaggagtcagaaagagatttacggaaataagttagcttttgagtctcatttgtacagtatttccttttctggcaacccaaaaacttcattaaggaaaaaagaaggaggtaaaaaggacttgcttaagcatcatggccatgaagaagggagaggggaagatgacatttctagactggaacttattttttgtaaggatgagaactcagaggtgtcagtctggtgctgactcctcagggaggaacttctgggctcctgtgtgtcccattcaaggatggtatatttgtctgtttttacgctgctgataaagacatacccaaaaagaggtttaattgtacttacagttccacatggctggggagacctcagaatcatggcaggaggcgaaagacacttcttacatggtggtagcaagagaaaaatgaggaggaagcaaaagtggaaacccctgataaacccatcagatctcaagagacttattcactatcacgagaatagcacggaaaggaccagcccccataattcaattacctcccccgggtccttcccacaacacatgggaattctgggagatacaattgaagttgagatttgaatggggacacagccaaactatatcagatgagtattacttggctcctcttcgctgtacacaaagggcatgtctatggcagtatttgaaaaatagagaatgagttgcaagctagtcaattgtgtggaagaaaaaggaaaggaaagaaaagtaatttcagggcgggtgcagtggctcatgcctgtaatcccagcactttgggaggccgaggcaggcggatcatgaggtcaggagatcgagactaacctggctaacacggtgaagccctgtctctactaaaaatagaaaacattagccgggtgtggtggtattaacctatagtcccagctactcgggaggctgaggcaggagaatcgcttgaacatgggaggtggaggttgcagtgagccgagatcgcgccactgcactgcagcctgggtgacatagtgagactccgtctcaaaaaaaaaaaaaaaagatttcaaatattgttttttcatatttcatattaggcatttagaagtgaaagggaccttagatctcatctatcccaaatcccaaccctgtggaggaatccgtctacaaaagctgtagcagaaaccagcctgtacttgaacctttccagtgacaggaaactcagtacctcggagctgccacttaattatagaagaccctcccttactcagaactgaactctgtcttccagagactcccaaatatgtgtcctaattttattctctgaagcaacagacatatatatctaatgtcctcgtttgcaagaaagtcctttgcatatggttaccaggggttcactaagtcctggattctttctctctgcacttccccttaagtcttggctttgagactttttaaagttgttttctggttggctaaagcccttgttaaaggtgctgctcaaaatgaacacaacactcctggtatttgagcctagggtttagttgatgtgggttgctaacaagaaactttttttttgagacagggtcttgctttgctgcctaggttggaatgcattggcgccatcacggctcactgcagccttgacccctgggctcaagccatcctgctgccttggcctcttgagtagctgggaccgcagatacttgtcaccacaccaaaaacattaacacaggttaatgtttttgaattttaagtagagacagggtcttgttagttgcccaggctggtctcgaactcctaggctcaagtgatcctcccgcctcaggcctcccaaagtgctaggattgcaggcatgagccactgtgcccagtcaagaaacaccttaattatacttaactataattctgtttatatgaatgtcttatctatacttctgtttatatgtttatactctttttttctcccagaggttaaatgtttaaagttcctcatgatgcctcgactaaagatgcttctacgtgaaagtgttgtttcaatctgtaatttcacaatattttattttggaagctggtggcaacaagctggcaggaaacatggaccttaggaaaagcaaacacattctatttgctaatggtcactaagcgattgtaaccaaggcaagcttattacagaaaggaacaatcagctgaagtgtaaagacagagcgtttgaaaaatcctaacccttcttccctgcatgctaaaatcagctaacagagataaactagtagctggttcttaaaagagggatttgtttacactacgtaatttttatcagtgggacaacctgtttgcctgcctgagatcttattacttattaatgcatattacctgtgaataagaaaaaggtgcttgcatttcagaagtttgtgtg

SEQ ID NO: 1882523 - DNA, 4001 bp, Homo sapiens
gaggtagcggaggtcttgctgatcaagcccgtgagccaggcccaggtagagggtaaggaggaaagcaaggaggagacggtccgtgcccagggtaggcaccacccacagcactgtcagcagctccacacacactgggtggcgcaggtgggagaagagtctgagagcccggggagacttcagggccagaggctcgcccagccccagcacatggtagtatacctaagagagggagaagagcttagaaatggagtcaagcccttttctcatcttgggcacttctttcctcctcttccaggcaccacccttctagaactcaggcccaggaaccccccttctgagacttggatccctgatcctgacttctgatccatgtaccttccccaggcccaggaggcccatgcttgctgcccttacgagggaaagtcaaagggaagggccacgagggagaagcagggagacagtagaagagcatgggaggagggaaacccttgaaagggaacgaggagttctaaaatgggtcagaggtcataggtagggatctcggagcctcacctgtttgaggcccatgagctcagcatagtcaaagacgagaaggatgctaaagatgaggagccaggagatgacatggagcacaaagcagaggagcggcacccaggtggcccatggctcagcccgagcctcccacaacacagggcctttgggtatgggctcccagtaccgcatcaccagctgtggaaggataaggggctgggtatcccagtggcctagtctgcccgaccttgggagacccagacccagatctgcccccaccacaggctagcctgcaactctcccccacctctctcctaagcatcaccaccaaatattcaccatgtggagggtgcgtgctgggtgaggtcccaaagatgtaaggatggcctgtctctaccctgagaacttatagaatagatggggtgacctgatagctacgcaaagtagtagcctgtgccaaccacccagtgaaaagacagacaaggccttctcttcagacctagggaagtggttttgaagaaagggtaggactgaagagaagggatctcaagcaggacataaacaaagttgcagaggtgagaagcatatcttgtgcttagggaaggacaagtacacccttcttgataaaaagtaggatatgtgctgtggaggaatggaagctgagattagttcctcaattctcctcctgaacccatattttgcccctccaatccacggcacccctcccacacttggtctcccttggggactcaactgccaggatttcatacctgcaaggccagggcctcatacctgcaaggccagggcagtgcaggccacatacagtgacctctgaaggaccccaaagtaccgggatgtccatgccttcactctttcagctgccatgaggctgtgctgcccaacaaatagaagcaggagccccagatcccatgccaggggggcaaggatgctgcggtcctgcagggcagccagccatccctggcgggcatctacaggaagttgagggaaaaagagacaaaagatcgaaacagtggcagaatgtttcccccaccctcatctcctcttggatccccaggccatgtcccttactgctttcaagagccttaatgcttcctctctaggctgtgcccatctcacttttccatccctagtttctgccctcttccctaggcctcctgcaaacctggggaagaggatttatagaacaccacatgttaggcagttgcaaaaagcatggctggagaggccacgctggattgcccctcttacttcggttctccaaatgctccttctttttaacactctcctctcaacagtcctctctacaaaacactttacttagaatactccggtcaccgcccttttcggctccctcagtcctcactctcccgcctctccaaaactctaatccttgagttcctaatttagaactcaggtctccctcccctgtagcttctcggccgctttcaaggttcgagttccctctcttggacttcccctgtcatttgtttccaagccccgccctcaatccctctcctacggctccaccttcctcctcccagttcatcctcgatccctcccgctcacccggaccaccagactccgggatccctccaagaagtggccgaagggaggtaaagcgcacgaactccactccggtgccaaaggccaggatgaaagaggcgagggcagcagggatcaggagcagtgcaggggccatggcgagaaatggaggggtggggaaaggggcggggtcgggattcccgctgccacaggccccgcccgcggccccgcccccggctgaatccagcccaggagggcggggctcctgcacgccaccgccaggcttccggcccgcctggcgcagccttccccatccagctgtggatccgtcctgggatgcgtgtcccggcctgctgtctctccgtcacagaagggaatgttagaatcccgagagagagctgttaagggtagcggctctgcagccgctcacgtgggttgaatctcagctcgtctagttttcccatctaaaatgaaaagttactgttttaccacaaaataaattaatgtatggaatacattgtacagaatacaatatacagaataaattctgtaacttactataaagttgagttgttgactggccagttgctaagaatggcaaataacttctctgtaaatactgaaaggtttgttgtaatagtgccagagattgttgattagtaaccacgagaataaacatgttaaaatatttgtgatagtaacctttgtcagaattaaagatcatgcagctaaggaccttgtcacagtagacgtacacatagtagggaccttagatatcattagactaattccatcaacttatagatagaagaaacaggtccagagagataattgcctgagttaggaagctgctaatcctgtaggctaagggaccagataattgctgagcagcctctcgcaggctttacattccttctccgtctcctgggctcagtactcccaccctcctctgaatcaatgctgttgtatgctgtaccagacatcttatgttttcccttgaattcagtctccaccctgctttctgcttcagtaagttgtcccaaatggacggtatcaatgaaagtcacagtttttattgagaaagtcctctcgccgggcgcggtggctcacgcctgtaatcccagcagtttgggaggccgaggcgggtggatcacgaggtcaggagatcgagaccacggtgaaaccccgtctctactaaaaatacaaaaaaaattagccgggcgcggtggcgggcgcttgtagtcacagctgctcaggaggctgaggcagaagaatggcgtgaacccgggaggcagagcttgcagtgagccgagatcgcgccactgcactccagcctgggcgacagagcaagactccatctcaaaaaaaaaaaaaaaaaaaaagaaaagaaaaaaaaaaaaagaaagtcctctctacacgactgctctgtcctcatctttttgagcttggaggtgatcacaacagagctgtgggtactaaggcactgcactattctttctgatttccctacaccctgcctacttctttgtaattatcactttattaaactctcccccaaattatcctaatttcactgtgctattcatttcctgctaggaccatgaatagagacacttaccacacaaagcaatgtgctacaagctatggggttcattggaagtgtaagaggccagactcggtggctcacgcctgtaatcccagcaattcgggaggctgaggtgggtggatcactttagaccagaagctggagaccagaatggccaacgtggtgaaaccccatttctactaaaaaattttaaaaattagctgggtgtggtggtatgcgcctgtaatcccagctacttgggaggctgaggcaggagaatccactgggtgatggagcaagattctgtctcaaacaaaaaaat

SEQ ID NO: 1882524 - DNA, 4001 bp, Homo sapiens; identical to SEQ ID NO: 585532

SEQ ID NO: 1882525 - DNA, 4001 bp, Homo sapiens; identical to SEQ ID NO: 585542

SEQ ID NO: 1882526 - DNA, 4001 bp, Homo sapiens
tagcaaaagcgatttcaggcttccttcttcagtagagctttggattaaactttggggtgtcatctagaatgtctctcttccacttagtagaatgtttccagaacccggctgcactttagaatcgctggacggattgttttgctttgctttgaaatatcaacatccagggttccatccctccccacaaacctcccaatattgttatttatctggagtgagttcaggcattatacatatttttaacaccaccaccgcccccccccaggttatcctaatataacacgactttatcctaagaggttatcctaatataacacgtgtatataatacacacgactgggagcccttgatatttagtcaacaagtattagttgcataaatgccatacatctggcctccaggaggtgcttataatggaatatagctgagccagaaaaaaataaagcaggcaaagttttaacgtttattggaagggaaaatgcattatagatgttccaaagttgaaaaaaatgatctgggttagtgaaacctgttgtatgaaagaaagtggtttctggtgaattactctgaagacgtaagcagagtaatgaggtggtttgcaccattctagagccgacttgcttggctgagagcatatttcaacgcaccaggccaattaaggacatttttattcaagcctagtctagttcagcaatgagcctgctattattcaccgatgaaggatgtagctggaatgacatgtttcattcaggcatgttacgctcaataccaggtagagcaccttaggggcccgcgaggcgagctggccaggaaagctaccgttcctgttgcgacagcgccatcgcgtggcaacaggtaaaaatggcagccattttgcagcctcacaaatcccctggggttcgtcctgtttattttcacaaaaccaggcatgtcttgctcttcttaatgtgcgtgtgcattcaccataagcgttcataatgtttatgcaggtccatactgaataaagccttcccagataaccaagaccatccaaactctgagtaagcacacatctgctgtgtgctaaagagtgactcagaatgcggaggattattattgagccttgtttttagagatcggcagaaaaatccacttgcgaagagagaaacaaatatcggaaaactctttttttttaattaaggtctcactttttcacccaggctggagtgcagtggtagtaccatagctcactgcaaccttgaactcctgaacttgatcaagtgcccagctattttttatttgttttgtttagttttacccaatacccagacttcaaggataaatttgttttgtagagatgaagtcccactacattgcccaggctgatcttgaactcctggcctcaaactttatacccatctcagcctcccaaagctttgggattacaggtgcaagccactgtgcccagacacgaaatattttttaaaggaggcttttgacgggaaactactaacaagtttctaatggtaagaggagctgctgtgtactgttcaaacaaattaccctactctaatgacctaaaaccataagctaaatagcagatgttgggattcaaagacagattagagtccatctaagcaactctgaagttgtatagaagaaagtgaagaatgatttacttaaaatggttcatattttttaaattgaattatagtgaaggagaaatttttttccaactccttgccatgttattagagaagtgaaaaagaagccagtggttctcaattttggccacacattaacatacctgtagattctcattttaaatatcctgatgcccaggtaacactctcaacgacttaattcagaacttccccagatgatattttgtgagttgcatttgaggaccactgaaccagaagcttcctatgcttgtgatatgtcactaagtcatgattacatatatcatcagcagggcacctctttcctcttcctacattcacctctcaactgccttcaactgtcttcaactgtcatttacccttcaagattcctttgttgatgtttattttaatcagacttccataagggttgaagaggtgtaaagaagcttaaaatactgacctgggatttgcctcctgatttctgatttctgaatcatttagcccactacactttgagacatctgaggtatcacatattatttcaaattgtgccttcagcatctaacatgcctgacacacagaaaagactcaataaatattaaatgaataatcttgtcagccggacagcaccccattgacttaccacaaaactctgaaagttgatttgtgaagcgaagagtggaaggagatgtgaagggaagagatgtcagggggtgacgtttgagacagtgagtactttagaatggggagtagtttaaacccacaaagaaaacacagcatggttgtgttacctgaaatccccagatcacagactgctaaattgatagtcattatttcagcgggtctcagcttcttctttcgtctagaagacatgtaaaggacatatccatttccaaatgtggacagaatccctacaaggaaaaataaaaattccaatcgttaaaactaagatttcgagttcactcagatatgaaacacttctcaacttcaaaaatggacaccatagatttagagggtagtgagaggactctaaataaaaaaatctaaattaagaagatgaaataaaaagcatgagttgtgagtgacaggccaatggggcaggagtcagggattataagactgaacttacccagaaaaaggcatcgctaacttccccgcgaggctcaggaaagtgtgggaatcccaatggtcagttcttgtcctggcccccagagtggagtactttcctcagccatttttatagattattggctttatagaactccctccctctgatcagtagggttaaacccttagctcttgataaattctgaagatgaagccaaccaaagaaggtgccttcagtatcactgtcaactcctaagggagcaccagtgttcaggagaggcagaggccaggtatgactggcataactcccttcaagaaaatggacatctcccagagacgccccaggacttccgcctctttgggagacatggacactgagtgtctggcagataggacagccttcagctgctactggactagatatcaagggtaagtgggtgacaatcgagaacctgggcactgtccctcccaccaaggggagagaaagtgaccctcaacccaccgaacctaccaacaatgccataagtgtgttcccactttttcatatccttttattaatgactagttgcctttggcattacaatgaaactgttcgaaagttcttacaaacccagtttaaatccaaaaagacccaatccctactgactttatttaagaaaagaatacacctacttccatagcttaacatgtagagtagatttcttcaggaattcttgcttcatagtgtagctgtgtataaatgagaatctggtacagctgcctttagtagtaaggaataaggagagtattaacaggagaaacccagagttttctattttaatttctacttctccaccacaattcattttgggggcaaagaaagaaatgtgtgattcagctgatggtatgaaaccaccaggaactaactgcattgtgctcttaggaaattctgactccctggagtcagtgctgcttaatggtccattaaaacctctttagctttcataaagcagaagaagagaaaaataaaagagattacggagttccagagcaaaccaactaaaatgaaacaggtctcactcaaggaaaccagctaggaaagcaaaatgtgaaaacgtggcttgaaaaagtataaacttaatgccacctactttgtatccaaaaagagtaaaaacaagtatccattttcgtttgatacacaaggctcattgaaacacctttcatctgtctacatctcttttgaaaatatttgttttcttacttttccttcct

SEQ ID NO: 1882527 - DNA, 4001 bp, Homo sapiens; identical to SEQ ID NO: 585550

SEQ ID NO: 1882528 - DNA, 4001 bp, Homo sapiens
tttgagacggcgtctcactctgttgcccagactggagtgcagtggcacgatctcagctcactgcaacctctgccttctgggctaaagcaattctcctgcctcaacctcccgaacagctggtattacaggcatgtgccaccacgcccagctaattttttttatttttagtagagacggggtttcaccatgttggccaggctgctcttgaactcctgatctcaggtgatccacccgcctcggcctcccagagtgctgggattacaggcctgaaccaccatgcccggccttcctgtttacttctgagccctgggccaacatacttcagaacagaaggcccctggtggctggaggggctctcttctccctcttcatggccctgaaggggcggggcagtggtgacactgagagggacaggagaattggacctgccttgacaagacggcagcaaggcctcattccctggggcctagaagaaggtgactgcgctgggcatacacaggggagaggattcagagtattcaagacgaatatattgggtagaaaaagttatttaaaatatttgaaacaagtctcatttttacactgaaatgtcacagtccttcaggctctctgttttagccaaaggacatcaggacatggtcttacccgagatatagccagattcagtataggtacttcttagtgttaggtgttctaatgcctgtgtcctgccccagccctccatgagagccaagagctgtgctgaatagaattgctgagcccttgcagaagagggtgtcatattttccaaatattccctttgcaagataaactagccagaaggtaggaggtgtcaggcagcgccgagcaccggctgggccagacctctggaagagcaactgggaatgttgattacagggcaagaatctaaacagcagtgatttattttccaaagttgctggcactttttaatccctttttctctcttcctcttccctttaacagggcagagcaaacaatcttcaggccaatgcaatgctttgtgggttttttgcattgatttgtacatgaaaccatgttttttttttttttttgagatggagtcttgctctgtcgcccaagctggagtgcagtggcacgatttcagctcactgcaacatccacctcccgggttcaagcgattctcttgcctcagcctcctgagtagttgggattacaggtatccaccaccatgtctggctaattcttgtatttttaatagagatgagatttcaccatgttggccaggctggtctcgaactcctggcctcaggtgatcctcctgtcttggcctcccaaagtgttcggattacagatgtaagcctctgctcctggcctgaaaccatgaattttttatgtggccattattattttataaatgctgctttctttctctatctgttcttttcagtacttagccagcgtgcagagaagcttcccagttaggaggtgaagaaacacaaggctgcactggatgcggaggctcccacctggaatcccagcactttgggaggccaaggctggaggattgcttgagcccaggagttcaaaaccagcctgggcaacatagtgagaacctgtctctacaaaaaataaaaattacctgggtgtgatggtgcacgcctgtagtctcagctacctgaaggacagaggtgggagaatggcttgagaccaggagattgaggctgcagtgagtagagatcacgctactgcattccagcctgggagacagagcaagaccttgtcacaaaacaaaacaaaacaaaacaaaacaaaacaaaacaaaacaaaaaaaacacaaggccacccttcctcacgatgccgcaggtcccctccccttctctcagcatggctggagagcccctcaactgtggcctgctgtccttgatccagtgccccacgctgccccacccttctggggagcccacctcaaagagaactccctggaggctcctacagtggcctccggctgaccaaagtgtgctgtgggcagaagcccctgcctccctcaccatgtacttcctcatcccagatctcagtccctcaagggccaggcaggtgtcatccaagacgacaagccatctcagtctcatgtactgtggggagaagacctcccagagccctctaccctctccttgagtcatacatgcttttttttttttttttttttttgagacggagtctcatttgtttgcccaggctgtagtgaagtggcaggatctcagctcactgcaacctccaccctctggattcatgtgattttcctgcctcagcctcttgagtagctgggactacaggaatccgccaccatgcccggctatttttttttttttttttgtatttttagtagagacagggttttgccatggtggccaggctggtctcgaactcctgacctcaggtgatccacccgccttgtcctcccaaagtgctagaattacaggtgtgggccactgcgcctggcccatacatgcattttaacagctacattcatggatgcatttagcaagcaacctggcttcacatgcaaggcacagtgctaggaattaggtctacagggatgagcaagatgtggaccccgcctctgctgtctccaggccactagggacgatggtcggggaatagaccactgagattgaagtgatgaaagtctcaaggaaagaacagggaggcagaggttgcagtgagccaagattgcgccactgcactccagcctgggcgacagagcgagactctgtctcaaaacaaaacaaacaaacaaaaaaagaactctggcattccactgaacacgttctccttcaaaactgggtccaatcattctgctgacaccaagagagtgcctaaagggacagcccaactcaggccttagatttatcttgagagaaaagtcctagaagcattttgattctcatagatgaaaggacaccagcacggaggacatgattggtcttctcgcctctcaagctgcggtggtgctgtccgatttgtgcatagccagaggaagatttcctgagaagccagtcaagcatgagctccagggtccttgcctgtgtgcccctcttccaaggtcctgtaccgattttttaaaaattcataattgtataatacttttcttaaatggtgtggggcacaaaacatagacctgcatcgtaagacctggctctacccctggaatatgtttctgatctgaagatgacaacctggagcagtaagcccttcagtccttggcaacaattaatcatgttttgattgaacatggctcctaattgtaaggaggcttcaatgttaagaagtggtttgtcttcactgtactgtagattctgacttcaatacacatgtgacctcaaaaagtaaattaatgccgccagatccaattcttcacatcctttctgtcagtagcgcaggttcaagaaggcagctggacacactgcctggcacaaagtgggtgcctgcctccaggttagtgaatgcatgctagcaattgtggcaaaaacttgttagcctcagtgtgtttgaagtccttggtttaaaaaaataataaaaaatatagaaaagttgcaagaataattcaaagaactttttagttcttgaataatttgaaagtaagggcttggtgtggtggctcacacctgtaatcccagcaatttgggaggccaaggtgagcagatcacctgaggtcaggagtttgagatctgcctggccaacatggagaaaccctatctctactaaaaatataaaaatgagccaggtgtggtggcgcatatctgtagtctcagctactcaggaggctgaggcaggagaatcacttgaacccaggaggcggaggttgcagtgagctgaaatcatgctattgcactccagcctgggcgacagagtgagactctgtctcaaaaaaaaaaaaaaaaaaaaaaaaagtaaggccgggcggctcacacttgtaatcccagcactttggaaggctgaagtgggaggattgcttgagc

SEQ ID NO: 1882529 - DNA, 4001 bp, Homo sapiens
tctttaccgtgtgtctctaccctagggcgtgagctctgtgagagcagggagcgcctttcactatgacatctccctcgccaggaagcacgccctgggcctagtcagccttcaaaagacatttgttggctgggcccggtggttcacgcttgtaatcccaacactttgggaagctgaggcaggtggatcacctgaggtcaggagttccagaccagcctggccaacatggtgaaatcccgtctctactaaaaatacaatcattacccaggcatggtggtgctcgcctgtaattccagctactcaggaggttgaggcaggagaatctcttgaacccaggaggcagaggttgcagtgacccaagatcccgccactgcactccagcctgggcaacagagtgatactcctgggctttgccctcgtgtgtgacttaggcagggtgctgggctttgccgtcctgtctgacttaggcaggagcgctgggctatgctctcctgtctgatttaggcagggcgctgggctttgccctcatctctgacttaggcaggggcgctgagctttgccctcgtgtctgacttaggcaggggcgctgggctttgccctcctgtctgacttaggtaggggcgctgggctttggagcgtgtcctgtgtcaaaggtactgctgtcttgagggaagaattatcagcccaaggtaagattccttggagacactcaggctttggaaaacacaaatagatgctgctctcgtggagaaaggtgttcattattctgtttaaaccaagtcagaggaaagtattttaaataccctccaaagctcccggaaatgcagggcccacctgtctgttcaaagacagaccaacatccttcgtgtgagctgcagcctaagcaggggtctggtgtggacgccacgtgacacactcaccgtctcctccggatttctcactgggttcctctggggaccacgcaggacccgcactagatgagcatcactgaggctgcaagccggtgtgcagaccccttccagacgctcccccgccgtccagtgtgccctgtagaggactcagtgcaagtggcctcaaaaggccattcacattcacattctcagtgagaccaaagagaaggagaccaagtgtcctgacccctctgacagccagagttaccccagcacaccctagatcagcagttctcaaagtgggctcccggggcagcaacctcagcgtcacctgggagcttgggaagaggagctcgtgttcttagggccctccctagagccgctgaatcagaaactttgggatggggtctgtcaatctgtgtttggacaagttccccagtgactgtcacacaccatgaagtctgagaaccactgttccaaaccgaggcttctaactggatgttcattcccagccatttggaaggctcagctgaaagccagtgagccagaagccagctccactgatcctgctttccagactggccattctcacaatgttccattaggcaatagggctcttcggggaaattaatagaatgtaggcttcaggaatcatcagaaagctgcagcttccctcgtcagggaagctgacgtctacatcgtcctcagtctagaacaagaataataggtgtaccttagaaaaatgtgctttcagtccatcagtaaaaagccaatattgtaaaatcctattatctttgcttcaagtgttatcaaaaaaataataataataaaataaaggcttagaagtttcactgttcaacatggcatttcgaaatattcgatgtaattgttgtctttacatttgagacttttttaaaaaatgaatcatttccattaatacagaaagaaatctttctagtggaggctcaaaattcaaataatcagaatcagttcttctaaaatgacttacgtataatcttgtttgccagacactgaagtaagatgtctgtattagcattttctccattgccgcaggtttctgtctctgtgggttcgtgaaaacaacctacagccaaaactatgtccacatacagcaaacccacatgccacttgatttcatcaaatgcataataggggcattctagaaccagagctttaaatggcctttttgtctccttcctcatacatctggggcagcgaacatgacattaaaatgcagccagaaaaatgtcccataaagaactttattgacaacaaggtaaatttttaataactcttcagtaggcttcattcaagagggggtaatatgtcatatgagtaggatttttacagctctcataggaattccccatattaaaagaatgtttgcagtttagagagaacccaactgcaaaacattcctgaactgtgacaatatttgtctcaatctaatattatgtggtggatctttgtttgtggagaggggagaggctacgtcctgctggagtgatttttccatcaattcagggctcagcaaatatgacccaaacaaacaaccaaattgattaaaatgctttattgagaaggaagagattgagtcttggagacctgtttcaatagctactcatgtcaccagcagggcaaaggccacatagctgacaaataccaccacatctcacagaagaggctgaggcgtcctggccgaataatgctttattctggaaaagatctgtacgaatctgcaaagcagtgaaaatgtgtggacggcttctgtttcttcagccgcaagggaggccacccttcattgccggaggaaggcccgccctcccggctgtggttgctgtggagctcacaggggtgaaggcatgtggaaattcactgcaccatgccagcctgcaggactgggagcgtagttcccactaaagagcaaacactgtactgtttttccaaaaaaaaaaaaaaaagttaaaatctggatcccaatgtttgttcacagcagggctgtaaaacaagtagacaaagatctcaggggctttgtgacagcatggtggattggagttaaaaagaggtggtgtcatttggatacacagatagtctaggcgagccttgagagcagagaaactggcctccaatctaaaacacaaaatgagggctagagaccggtgtgaggtggagagtaaaaccctttggttaggattcaaggccaactaaactgcagctctgcctttactctccagccttactttctccatctgcaaaatgggagggaggcattggaggtattttgtgaaaatcacttaatactgtgctgacacgtaatctttcaatagaagataagtgaaacatataaatataaaatatgaaataaatagagaataaacaaggtgaacagaggccaggcgcagtggctcatgcctgtaatcccagccctttgggaggccaaggcgagtggctagcttgaagccaggagttcaagaccagcctggtcaacagggtgaaaccccctactaaaaatacaaaaattaaccgggaatggtggcacgcacctgtaatcccaggtactcgggaggctgaggcacaagaattacttgaacccaggaggcagaggtttcagtgagcactccagcctgggcgacagagcgagactccatctcaaacaaaaacaaaaacaaacaaaacaatgtgaacagaaacctatacactccactctgaaatcccagacaagttcatcttagatgatgtggccattcgggtcatcaggggaaacaacgctgtgaccagcctgccttctgtgacgtggcaccagtttccagtgtcacgcagatgtcacagccctgaccaggttccatgcacaccatggaacccgtttgtttaagtttgtttatggctctgaaaaccaaggcatgaaactttaatgttttccacattacacacctgagaagtgatgttgggtgttagcacagaataccagaaagcatttctttttggccaccgtgaacatagaccctattactttgaagtttgtttcctccacattttattggtgaaaatgtcagcctggttcagtccatccttcaaagatgtgtggctcctttt

SEQ ID NO: 1882530 - DNA, 4001 bp, Homo sapiens
gcaggagcctgtaatcccagctacttgggaggctggggcaggagaattgcttgaacctgggaggtggaggttgcagtgaactgatatcgcaccattgcattccggcctgggcgacagagtgaaactccatctcgaaaataaataaataaataaataaataaataaataggcctggcatggtggctcacacctgtaatctcagcactttgggaggctgaggcagccagataatttaaggtcaggagttcaagaccagcttggctaacatgatgaaacatgacgaaacccccgtctctgctaaaaattcaaaaattagccagtcatggttgtacatgcctgtaatcccagctactcgggaggctgaggcaggaaaatcgcttgaacctagaaagtggaggttgcagtgagctgagatcacgccactgcactccagcttgggcaacagagcaagattccatctcaaaaaatatataaaaaataaaaataggctgggcgcagtggctcacgcctgtaatctcagcactttgggagaccgaggcagacagatcaactgaggtcgaggtttgagaccagcctgaccaacatagagaaaccctctctctactaaaatacaaacattgggtggggcgagtcatcgtctgacgtctggccgtgagatgtttcgggagccggggtctctccgctgcagacatgacgaagggccttgttttaggaatctattccaaagaaaaagaagatgatgtgccacagttcacaagtgcaggagagaatcttgataaattgatagctggaaagctgagagagactttgaacatatctggaccacctctgaaggcaggcaagactcgaaacttttatggtctgcatcaggacttccccagcgtggtgctagttggcctcggcaaaaaggcagccagaatcgacgaacaggaaaactggcaggaaggcaaagaaaacatcagagctgctgttgcagcaggatgcaggcagattcaagacctggagctctcttccgtggaggtggatccctgtagagatgctcaggctgctgaggagggcgcggtgcttggtctctatgaatacgatgacctaaagcaaaaaaagaagatggctatgtcggtgaagctctatggaactggggatcaggaggcctggcagaaaggagtcctgtttgcttctgggcagaacttggcatgatggagacgccagccagcgagatgatgccaaccagatttgccgaaattattgagaagaatctcaaaagcgctagtagtaaaccgagtttcatatcagacccaggtcttggattgaggaacaggcaatgggatcattcctcagtgtggccaaaggatctgacgagccctcagtcttcttggaaattcactacataggcagccccaatgcagacaaaccaccccttgtttgttgggaaaggaattacctttgacagtggtggtatctccatcaaggcttctgcaaatatggacctcatgagggccgacatgggaggagctacaactatatgctcagccattgtgtctgctgcaaatctcagtttgcccattaatattataggtctggcccctctgtgaaaacatgcccagcggcaaggccaacaagctgggggatgttgttagagccaggaacaggaagaccatccaggttggtaacactgatgctgaggggaggctcatactggctgatgcgctctgttacgtgcacacatttaacccgaaggtcatcctcaatgccaccaccttaacaggtgtcatagatgtagctttggggtcaggtgccactggggtctttaccaattcatcctggctctggaacaagctcttcgaggccagcattgaaacaggggaccgtgtctggaggatgcctctcttcaaacattgtacaagacaggttgtagattgccagctggctgatgttaacaacattggaaaatatagatctgcgggagcatgtacatctgcggcattcctgaaagaattcgtgactcatcctaagtgggcacatttagacatagcaggtgtgatgaccaacaaagatgaggttccctatctatggaaaggcatgaccgggaggcccacaaggactctcatagagttcttacttcgtttcagtcaagacaatgcttagttcagatactcaaaaatgtcttcactctatcttaaattggacagttgaagttaaaaggtttttgaatgaatggatgaaaatattttaaaggaggcaatttatatttaaaaatgtagaacacaatgaaatttttatgccttgatttttttttcattttacacaaagatttatatattttttttttgagacggagtctcactctgtcacccaggctggagtgcaggtggcatgatctcagctcactgcaacctccgcctcctaggttcaagcgattctcccacctcagccacctgaatacctgggactacaggtgcccaccaccatgcccggctgatttttgtatttttaatggagacggggtttcaccatattggccaggctggtctcaaaactcctgaccctgtgatctgcccgcctcggcctcccaaagtgctgggattacaggcgtaagccaccacgcccggccagtatatatttttaattgagaagcaaaattgtacttcagatttgtgatgctaggaacatgagcaaactgaaaattactaaccacttgtcagaaacaataaatccaactttttgtgcaaaaaaaaaaatacaaatattagctgggcatggtggtgcatgcctgtaatcccagctactcgggaggctgaggcagaattgcttgaacctgggaggcggagactgcagtgagctgagattgtgccactgctgactttgtctcaaaaaacaaaacaaaacaaaaaaacaaaatgaaaacaaaaagccagggctgcctctgctcaataatgttctatctttgttccgcctcttctctggggtctcacttcttgggagcctgtgtgaaggtgaattcctctgaaagctgactgcccctatttgggactccccagtctctttctgagaaatggtgacattgttcccagcacttcctctcccttcctaggcagcttctgcagccaccactgagccttcctcacatcctccttcttcaggcttgggctttccacctttcaccattcccctaccccatgctgctccaccgcactctggggagggggctggactgggcactcttgtcccccaggctgagcctccctccatccctatgctgcctgcttcccaggaacatgcttgggcagcaggctgtggctctgattggctttctggccgtcaggaacatgtcccaacatgttgagctctggcatagaagaggctggtggctattttgtccttgggctgcctgttttcaggtgaggaaggggatggtaggagacaggagacctctaaagaccccaggtaaaccttagcctgttactctgaacagggtatgtgatctgccagcagatccttgcgacagggctgggatctgatgcatgtgtgcttgtgtgagtgtgtgctgggagtcagattctgtgtgtgacttttaacagcctgctcccttgcctttttcagggcagaagtcctcccttagagtgtgtctgggtacacattcaagtgcatggttgcaaacttttttttttaaagcactgaatagtactagacacttagtaggtacttaagaaatattgaatgtcgtggtggtggtgagctagaagttataaaaaaaattctttcccaaaaacaacaacaaaaagaattatttcattgtgaagctcagtaccacaaaaatttaaataattcattacaagcctttattaaaaaaaattttctccccaaagtaaacagacagacaatgtctagtctatttgaaatgcctgaaagcagaggggcttcaaggcagtgggagaaggtgcctgtcctctgctggacatttgacaaccagccctttggatggtttggatgtataggagcga

SEQ ID NO: 1882531 - DNA, 4001 bp, Homo sapiens; identical to SEQ ID NO: 585583

SEQ ID NO: 1882532 - DNA, 4001 bp, Homo sapiens; identical to SEQ ID NO: 585600

SEQ ID NO: 1882533 - DNA, 4001 bp, Homo sapiens
gaaactgtggtcagtaatagtgagccctcactgatttcctccaaaggtggattctgaggtctgaggtaaaacatcagaacgaccaaggtgaacacctggctccacttgcacctttatcacttgtgacttgtgttcctcagagaccaatggctggtaagtaatgcaggagttgccactggagcccgtatgcagagagaaagataagccagaccgaaactttttggaaggagaaggcttcaaggggatcttcttaaatactgcgttgcacatgaagtgctggaaccgttcagcgtagaagcctgggcgatgcactgagacagcgtccccatcatgtaccacggctttccaagagtgctccaacttcttaagaaacgtgtaagactgtagaatgtcaatgatgccaatataaagcagaagcctttcccctttactattctgagcagggatgccacccatatggtcatcggcctccatggtgtcgcccagccgagcctctccctggatgaattccatggctgtggaatacagagccttttggggagccagtctttgagtgtcgattgacacttgaagagtgtcgctgcttaagggctctcgttgtgcatgatctatattgtggattgacagccagaggctatagtccattatcttgaagctctgcagcaccaaacagtcacgctgcagggtcttacagagagcattgtacgtgtcagcatccaaaaaaagaccatcagggatgtcttgtaagaagtctagatctttaaatgtgggaagaggcttctctcgctctttctgggaagcccggcgtttgtaggttgagcctttgaggtcatatttgatatgcattttgacggatcttggtaaaagattgttcatcaccacaatccgaatgttcttgccacctgtctgcacacagtacagtccaaagaatttaggcagcaaagtccgagggttctggctgaggttcaagtagtatcctggaagcagcttctgcagaaactccgcctctttatgttggagtgtcttaataatgagttcatcgtcgctggacacatagaacagggaaccactagctccagagctacagagttcaatcagcggctcactgcagagggagcacaagtaatcatcgggcgggataccaaatagctcccgaaagtagcggaaggcaaccggcgcataggtcttgaaacggaaggcattgtagtgatgagcaggggtcaggttgctcccttcactggggaagaagatactctccaccacgtagaaatcttgcatgaggacatcacgctctggtttggtactcaggctccccacagtgtaagtaatgcctaactggatggcacctttcaaggctgttgaggttgtctttttatatgttgtctctcctgaggaatcgacacctcgatggcctgttttcttgatgggcatgccagaggcataaggcacctcagatgccgtggggctcaagattccagatgctgaggacgcggtacaggaaggggccccgggatcaaaggatgaaaaaccgaccgccaacgacggttgggaggaggccgacgccatcttggcagcccccttcccggcagccgcctggctgtctttccatccgcctcttcctgttctcggaatcgaatcttctccacgtgtctttacagaacccgcgttctgcgggccaccttcccgccgcctctggggcctccctcagacctgtcatcgagccggctgctggaccagctcaaggccgcaccattcgcctggcatgggggagaacgcccgtctcgcacgccctccacaagttcaaccgctttcctcagaggagactttccgctttcacagaagagtaagctcaagctgactgcttggaccctgcgtcaggaaaaagccacatctgaagaaaaaaaacaaaacgaggcgtgaaaagtcccagaggagcgaacgccgcctctctgtcctccctacccacggcctgtttaccgcccaacccagccgcttcgatccgtcagtttccttctttttttctttttttctttttttttttttgagacggagtttccctcttgttgcccaggctagagtgctgtggcacgatctcaggtcaccgcaaccttcatctcccgggttcaagcgattctcctgcctcagcctcccaagtagctgggattacaggcacgcgccaccacgccctagctaattttgtatttttagtagagatgggggtttcaccatgttggtcaggctggtctcgaactcccgaactcaggtgatccgccctcttcggcctcccaaagttctgggattacaggcgtgagccactgtgcccagccgatccatcagtttatttacgtgatcaacccattcctacctaagcctttttttttttttttcaagttgcacctaatgactcgaatgccctatcatctcgggtcctctagcctcacttctctcttagtatcagaaacatacttgaaactccaattcatgtatagaagctttctcaaacaacaccagtgtgttatggaagaaagacctcagcgctctagaagtgtgataactgatttaagaatctgcttgtgccactagctgattgtttgatcttggataagtcactcaacatccctggggctctattgctgcctctatgaaatgggaagggaggagtttaggtaaatttacatgatccctccatactctaaaacctatggaattaaggaataatatttattccctaccatcctgtcaaaacctatgataatgacatgctaacaaataatgccgcaaatatgttctctaatgagacagaaaaattgtacactttatttatatgaaatttattatgtgtgctgctatgcccccagcatactaccatgaatggacaagtatttgtgataataaaatatttataaatggggattggcttttgtttatggcagaatagtccatttaaaccaacctccctcagagaacaaatttttttaaaaatttggtcggatacattggagtcctaagaagttagtgaataattatagtactgagatctgggaaaagaaagaagtacagagaggtgagcatttgggcccactgtttccttagggacctctgcatgttccattagaggtagctgagagtctgataagcttagcagagtttttgacaaactcagtggattagggaacaaaaaactgagtttggggtctgatacagcaattgtctgctaaacttcccaaaacttcggattgagaccctgaaaggctatatagcatgggagtaaatgtgtatagaaatagaccgttcctcacagacactgcaattcagctgcgaatcacctcaatccctggtgggatcaagataattgagatgggtaatatccctagatgtctataaagagcaaatttatattcctctttggagaaatatattaataacattgtcctagcccttaaattctctctcattttttatgtgtaatgtccagaattcaggcagtcattattatgtacataaggagtcaagacaatgtgactgaataccaagagaaatgatagacaatagaaatggactcacaggggatcctgccatatctcagtaatatcattctcttatacagattttaaagtaacactgattaatatatttaaagaaataaatgacaagattggcaacttaagcagagaactagaaatgctataaaagaacaaagttctacaactaaaaattatgataaaagaaaaactcaatggataagatttatggcagattagagacagctaaagagagaaggagtggagtaggaaaatctgaagaaaatatctagaatgaagcatagaaaaataaaagtttagaaaatacataaaagaggctgggcgtggtgactcatgcctgtaatcccagcactttgggaggctgaggtgggtggatcaccgaaggttggaatttgagaccagcctagccaacatggtgaaaccctgtctctactgaaaatacaaaaattagccaggcgt

SEQ ID NO: 1882534 - DNA, 4001 bp, Homo sapiens
cttgaactcctgacttcaagtgatccgcccgccttgaccttccaaagtgctagaattacaggcgtgagccactgcgcccagccagaaattttgaaaccaaacttagacttctctacagctacattagatgctagcagtgaatggagcgaaggctatataatccggaggtaaggaaactggctcaaaaatggtacagccagccaaatggtcattcaagtacagatgctccccaatgtacaatgaactcatggtaagctgaaaatatcgtaagttgaaaacacacgtttgacttacagtttctcaatttatgacgatgatgtgtttacttgggtgtaaccacaccgaaagttgagcatactgactgtgtattgtctctgcaccattataaagttgaaaaatggttaagtcaaaccattgtgagtcagggactgtctggaaagaaacatgggcatttcaaacataaaaagacacaggaaatgagcccttcttggaaacaaacagacacactgacaaaatctagccaatcaaaggatgaatcaaaagttgatacttgagatgccatggtaaaagaaccagtgattcatcgtgatttcatttagttataaaactaagactaaattatatctgaaatggccaggcgtggtgtctcacacctgtaatcccagcactttgggaggctgaggctggtggatcacgaggtcaggaattcgagactggcctgagcaacatggtgaaaccccatctctactaaaaatacaaaaatgagccgggcgtggtggcacacgcctgtaatcccagctactcaggaggctgaggcaggagaatcacttgaacccgggaggctgaggttgcagtaagccaacaatgctccactgcactctagcatgggcaacagagcaagactccatctcaaaaaaaaaaaattgtatctgaaatgaagtttacaaaacacaatgcaaatgttatagatcctcacaatataaacatatttttaaaattggggctgggtatagtggctcatgcctgtcatcccagcactttgggaggctgaggtgggaggatgccttgagcctaggagtttgagatcagcctgggtaacacagtgagaccctaactctccaaaaaaaaaaaaaaaagctgggtgccatggtgcatgcctgtagtcccagctacatgggaggctgaggtgggaggactgcttgagcctgggaggctgaggttgccgtgagctgtgatcatgccactacagtccagcctgggtgacacaatgcgaccctgtctccaaaattaaaaaaataaaaaataggccaggcgcagtggctcatgcctgtaatcccagcactttgggaggagaggtgggaggatcacctgaggtcaggagtttgacactagcttgggcaacatggtaaaagcccatctctactgaaaatacaaaaattagccgggcatggtggtgcatgcctgtaatcccagctacttgggaggctgaggcagggatattgcttgaatccaggaggcggaggttgcagtgagctaagatcgcaccactgcactccagcctggggtgacagagtgagactctgtctcaaaaaataaataaagaaagaaagaataaaaactgggatatgagtagaagtgaaactataggtaatgtaagagtgcccagtgctccatcctttataacagggagcctctgactgtctaaattaatgtatgtttaaaaaatcttgatctcaagatgtattcagaaacttttctcttagtttggaagacttgtttatctctaagaatgaagaaatactgatgtcaagttcagcaattccttcactttcactacagtttcttctgttaaaatataatttttttattttaaaaagcatatatagtatcatcctgttaaaagaaaaactttagataaattcaatttaacagtttacctgagcaacaaacaactcacgaatcaggcagcactcacaaccagaagaggttcacagagctctatccagcagcatgagctgcagtttttatacactgatgacagaagtaaaaaaccaaaatcactcgattggctacagctctgcatctgctttatttgggcataatgtgatgagctggccgcctgtgattggctgaaacctggctattacaaaaaatacactgttgagttagttttctgttcgtttatgtacaaagttagtttttcacacagggactcaaagtagggagaaagactcaggctaatggcctcctgcttatttaacaattctattttttataaaagcatttctttttaatcttttgacatatcgttttttttttaagacagagtcttgctctgtcacccaggctggagtgcggtggcgcgatctcagctcactgcaagctccgcctcccaggtccaaacaattctcctgcctcagcctcccaagtagctgggactgcaggcgcacgcaaccacgcctggctaatttttgtatttttagtagagacacggggtttcaccacgttggccaggctggtctcaaactcctgacctcaggtgatccgcccgcctcagcctcccaaagtgctgggattacaggcgtgagccaccaagcccgaccaacatatcctatttgtgtaaaaatagaaagacatacgcaatgattttcacttcatgttaaagatgaatatatcttgatagtgggatagaaactatttttacctttttaaaaacagctgcattatttgtattcttataatgattttgggaaacaatatggtgattttataccaatgtaaaaaaattttaaatataaacatttaaaaaaatccatgaacccaacaaccagaattaacaaccatcaacactgtcatattttctttagattgtttcataataaaaaatattccacacaaaaaattgaagactgccatggattgttctccaggaccagtcgctgcccatccactccctatatagtacataatttatatttctctatatttaaatattcactaattaaaaaatacaatgtaaaatgaaacagacaatgtaaaatgaaatcctggactagaaataactcaaagtgtggggtttttttttcagattcacacttaaatttttttctgataattttgaacacatacaaaaatagagaaaatagtatacaacaaattcccatatacctgttacccagattcaacaattatcaagattttgccacacagaattttgaaattaaaagcaaaagctgttatctacagttcagctgcaatttgttcagctaggaaacaaacaccttccaaagaagacaggaagaaccaagatcagctgtgctctttctctgtgcaggtactaattcctaaaacagatccatttaggagtcacagcaactctgaaacctacatactattgtcagcattgttcagagtggaagatgaagctcagagggatggagattcttctgtaagcttagccagttgcttgtccttccaatactaccccacaacaccttccttcatgatcccatcctagccaatttcagtgtgccagagtcactggaggttattattctgttgaagaacacaaagtaagaaagtctcgctaaaagtctgtgtgaatcaatccctggattctctgggttggaggaggaccctgcatttttataggtaatttcagtcaggaactttcggttatttatttaatttagaaaacacctgatgtaattttccttgtaagactttttcttataactacttagataaaagggagaaacattttctctcttcctttaaaacaatcgaatcggtgattcgatatactcttctattaattggagggacattctctcgagggagctcataatcccaactgaccaatgaccataattacaaaatgtgatctcaactgcagtttacagactttcagatctatcatggatatttccaaagcagttttgaaatttcttgcctgccatgttgcttatgtgttatgctcacatactgtagcaaatgcttca

SEQ ID NO: 1882535 - DNA, 4001 bp, Homo sapiens; identical to SEQ ID NO: 585638

SEQ ID NO: 1882536 - DNA, 4001 bp, Homo sapiens; identical to SEQ ID NO: 585639

SEQ ID NO: 1882537 - DNA, 4001 bp, Homo sapiens; identical to SEQ ID NO: 585646

SEQ ID NO: 1882538 - DNA, 4001 bp, Homo sapiens
aatataaaaatgccaagtccatgggtagagaagaggactattcaatagtctttattcttctgtcacgtgtttcaccctagggttctcatttttatcctacttttgcacccttcatgtaaaacagtccttaatgaaacaaagggtttgcggagaagtactcagaatgggaaacgttggtgtccttggggttgttagcagagccagcagtgatcctgtgaggtcagtcccagccctggaaacacaggtgtctccctgggctgagggtagtccccggctctgacggtccgatgtctttcctcaggtggagcagctcctgtacgaaagccctgagcggtactcccgctcagtgcttctcatcacccagcacctcagcctggtggagcaggctgaccacatcctctttctggaaggaggcgctatccgggaggggggaacccaccagcagctcatggagaaaaaggggtgctactgggccatggtgcaggctcctgcagatgctccagaatgaaagccttctcagacctgcgcactccatctccctcccttttcttctctctgtggtggagaaccacagctgcagagtaggcagctgcctccaggatgagttacttgaaatttgccttgagtgtgttacctcctttccaagctcctcgtgataatgcagacttcctggagtacaaacacaggatttgtaattccttactgtaacggagtttagagccagggctgatgctttggtgtggccagcactctgaaactgagaaatgttcagaatgtacggaaagatgatcagctattttcaacataactgaaggcatatgctggcccataaacaccctgtaggttcttgatatttataataaaattggtgttttgtactgtggtttcttatgtttccggcacaccaaacggcccactgccttttgcagcgcacttttcagctgcggatgtctcctcttttatcatcctcaatgttttaccccctaactgcatcaccttttcccttaagctttttaattcctatgaggccccttccacttcccctatccccttaggcccacccccaagaatgtgcaagaccccagccacagggcccatcagggcactagcggccgcagctcagagccgtggcctctccgaagtggcagatggggcgggcgcggccagagcaagtgccaggcgggaacagagggactgggcgcgcctcacaactcaccacctcgcccgctggtccttcctggctcgcctggctctgaagctgcacctggaggggaaacctcagaacagtaggcgggattgcctagtaaatatctcccattcagggaggcccaggtcgtgtgacgtcgacagttgctgggtagatgaggccaacacaggttgcaagaagaggcggggtttagaggcgtgaaactccgcagtgctcagccaagcagggagcaacgctaggaagggcgggcagaaagggcacgctcttgtgggtgactacaggttaggagaccgttgaacctggaggggccctaggatggaccccgtggaaagattcagagactgcgccctctccctggcgccgccttcccctacacgcggcgggtatattctgttgcagttggcccaggacctgtttccaagactctgccccctcgcacttccgtccctcctggttttgtaaagtgatgctcataggaacccccaccccgcgtgacactactcccagctcctggctgacttctagtcttctggttgaagctgcgcctttagatgacacgaccctacccacccctgtttccagcggatgcccgggcctggaggtacctcttactgtaacccatcgccaagtgggcttttgaaggcgcctgttcctttctcgctttcttcggaagacccttgacccatcattcccccgacccccataacgggagagcagagaagccggtccccagtgtgatggtcctggtccaggcactaactgtccttttctcggaaaaggcagggggatgtggaaaagagtcttgttccctccccttcgatctgtggctttcgctttcacttcctcctccgagagcggacagatctctgggtgctgggcggtcatggcgctactagatgtatgcggagccccccgagggcagcggccggaatcggctctcccggttgcgggaagcgggcgtcgctcggacccaggacactacagtttctctatgcgatctccagagctcgctttaccccggggaatgcaggtcggggcagtagggaagcccctagggatgcagggaggcgggcgctgaggagtggagggtcgcctgagaggaggaggcgagagcgggagcgcggggtacagggtcgggggtagccttcagtcccggagagcgccagacccaaagaagaggccacatggggatggggcctgagaggaggaagtgcaagttaggacaaagagttacaggtgaggtgggggctcccaaaggaagacaagagaactttcctgcccttgtccacacacaaatggtggagcctttttcatggggttatcacatgatataggaggtgtgtggtgtcttgggaaacctatgaaatttgcctgctggcctcctctcagcaactcactgttgcgcgacttagaacaagtcacttagtctaggtcccaagcccctcttctgtaaagtgaggatactgttactaaacgtgttttgtgagggttgaatgctttatgcatggaagaaaccctttaagtcactctcaaaattttttagtaatggtaacatgtgcttgctttcatttctgttgtgctggaaaatggaaaaggttgatactggcatgcctcttcttttccttctcccaagccatttccttctagagattggttattaactgtttcatttattgatggttagatcatttctgcatatctcctcaccctcatactccctaaaaccttttcctggagcctcttactacagaatttttcattgcctttctcaacctcttttctcttatcagcccacagaattcttccagtccctgggtggggacggagaaaggaacgttcagattgagatggcccatggcaccaccacgctcgccttcaagttccagcatggagtgattgcagcagtggattctcgggcctcagctgggtcctacattagtgagtgtatacgctccagcaggcagaatctggggagctgggctctcctttccacaggaggccaactctgcaacaaagtggaagtggatattgatttaggacacactgggggatctatggggtcatcccttctctcccaaagctccatcttcttccaggtgccttacgggtgaacaaggtgattgagattaacccttacctgcttggcaccatgtctggctgtgcagcagactgtcagtactgggagcgcctgctggccaaggaatgcaggtaagcgaggcctctcatcttcctttcttagcctagtggttaatccctggatctctcagatcattgctccttactcttgtcctatgtggtccatcttagtgctaatagtatatttcacaaaacagctttttggtgataagacccttctcccaaatctcagcctgtgctccactcataagccagatagtacgtcaggtatttagcactgacacatccaccctggcgggacagtatcatttactaggctgcctttgtatgtttcagatactttaaattccaaatctttctctgatctttagatcctacaaaataattcctttccaatgcttatctctttaatcatttcctgccccatcaagttggaaagagctaacctctctttcctcactccaccttgtcctcacccaggctgtactatctgcgaaatggagaacgtatttcagtgtcggcagcctccaagctgctgtccaacatgatgtgccagtaccggggcatgggcctctctatgggcagtatgatctgtggctgggataagaaggtgggtgctctccattcttcatgttcccccaccatgttccctatggat

SEQ ID NO: 1882539 - DNA, 4001 bp, Homo sapiens
gctgctccggttccccagcaactcacagacaaccgtggtctggagggtgtgtgactctgaaaagccaaaaccccagaactccaaagttacaagaggtcaaaacagtggctctctccacctccgctcctacctcctcccaaaatgcatgaaattcccttcctctgactgataaaccctcactcattctccaagacatatcttctctgtcaaccacatccccaccaaagtcacactgcacccgctctccctcccctgcagcatgtggctccctcccatgtacccagcatgcactgttcagccacatatactcacccaccctcctgaaggcccagcacagacagcattgtgtttaaatccctgatctacacatcagctactggctatatgcccacggcaaatgtaatggaacctctccaagccttgctttcctcatttggcaactggacacaattatagtctctaccacacaagtaaagataacatgagataatccttgccagtgttaatgtaggacctaccaagaagaattcaagaactagtagctgctattgtaaggtgtattattggtaacagcaaaatgaacagcacttactaggcttaaatgtttgctagatgaaaaaaaatgatattggttagaaatatattttgctcaggtcaccaggtttcttattaactactggtggtggcgagagaggtgaatgtcagaaaaaggccagtttttcccatttcctggatttgagaaagttggataaatttttttcacctggccgggtgcggtggctcacgcctgtaatcctagcactttgggaggcccaggcaggtggatcacgaggtcaggagtttgagaccagcctggccaacatggtgaaaccccatctctactaaaaatataaaaattagccaggtgtggtggcaggcgcctgtaatcccagctactcaggaggctgaggcaggggaatcgcttgaacctgggaggcggagtttgcagtgggctgagatcgggccattgcactccagcttgggcaacaagagcaaaaaaaaaacagacttttttcacctgaagggaaggcttgggagcttaaggacaatggcttctttcttagagacctagtccttgactgagggaaagggtgagggtcttatacttcttttttttttttttttattgagacagagtcttgctctgtcacccaggctggagtgcagtggcacgatctcggctcactgcaagctccacctcccgggttcatgccattctcctgcctcagcctcccgagtagctgggactacaggtgcctgccagcgcacccggctaattttttttgtatttttagtagagacagggtttcactgtgttagctaggatggtctcgatctcctgaccttgtgatccacctgcctcggcctcccaaactgctgggattacaggcatgagccaccgcgcccagccagagggtcttatacttctgtcctactcttgctaatacctaagacccagtccttttggcaccactgggtacataaaacaaggtttgagtcagggatgaactcccccaggcaggaggagatagcatcaggatctcagtgaagtgggatggtatctgagtgcctagcacagtgccccacgcagagctcaatgcatcttagctgaacaataacgaatgcagctgcacatcttcaggcccatattgagctcttctctcttttctgcctcctcctgagcccccaagcccaatcaccttggctctggttgttgtgtgccatgatgctccccgggatggtgacaaggtgctgggctctggccttcagtctgagaaccagcttctcccaagctcttgggtccctggcctgagcccaggatgcacggggctctgcccacctgccctccttgcagcatcataagaaagggtggtcatccaggtagcctgagacttcgtaaggggcttgcccagggctgggctgggaaagagtaatgaagtcatagcacagagagtgggttgctgaggaaaagagaatgatgggaaagggttattttccaacaggagtcttacctgggagacactgcacaaggtgcctgtgtggtgaggctgtgtgactatttttgagggcaccaaaggagtgggtaaggggaatgcagactgaacaatgggaagggaatctcttgtttccctgcagggcctcatctaggctcattgttttaaatagtaatgactcccaaatctcttcatccctgttcttcacatcggtatatccaactacctacctgttggtcatctggacctaaggttccatatggccttaaatctgacacatccaaaactgagtatttcctcttggccctggccatggaacaacctgcctctcatcctatattcctggtgagtggcatcatcctctcacctgcctgcttactcaagccagaactgggttgaggtgtgggcaactaccggatgtcatgtagcctcctggcacaatagcatgaagtgagctgagaggtcatggaacaaaaaggctcacagaccaaatgtaaatgctcaaataacatcgtttattaaataaatgtaaaacacattctgagaagcaggaggcaggtgctggggtgggtcaacacacgggagagggggcaagttgggtggaatgatcacaccagctgaactgtgggtcatgcagtgtgcatccatcctgtcaaattgaaacctcctgcatcctgagtgcctcatgtctcacgtatttagggtaccgtgaatatttagtgcctccttggtctttctgtcccttttgatctctgtacacacgaatatgttgtactatctacagatgactaatttagttatctatgtgtaacacttcttttgagtttattgttttcctgtcttctacagcagaattggatattcccaaacaatcggcaagtctggtgtttatcctagagtgctgcctcccttcacaccccctagtttcaaacagtcagcaagccctgcccatttttaacttcctgtttctccaatctggacattcctctacctccaccaaaccagcccatagtatggcttgcttggattatagccagagtctttctaactggtctctctccctccagtcttaagcatataaaatctgtcctccttgatataatcagagtgatctatccagaaatacatatcagaccgcatacctctctgctcttcctctaaggattccccttttgtcctcgggatggtttccaagctccttagcaagctaaacaaggccccttgaaggctgccgtctccaccctcatctcccaccacaccctgccttcacctgacccacttggaacaggaaggttggagcacctccatactcctgcagttccacctcccagtgccttcctgagatggtcccctgaagggaagacccatcctccccttctccaaacaccacttaaaccacttaaaccctttcattaaacccttaccctggcctcaaaccatctaccacgctgctgtacccctttatttcagagacggctctgactttcactcagaggtgacactcaccctaccacttgtctatggctgtgcatccctcttggggccatctcttgtggacaagaatatgagccacattcttcatatatgagaaaattacaccaatctcagaggattagaggtcatgccaaaaaacacacctggtagttatgtttaaatatatttttaaggctgggttaaaaaccacgatgaggcgaaaccccatctctactaaaaaaatacaaaaattagctgggcctggtggtgcacgcctgtaatcccagctactcgggaggctgagacaggagaatccctagaacccaggaggcggaggttgtagtgagccgagattgcaccactgcactccagcctgggcgactgagtgattctccgtctccaaatatatatatacacacacacacatatacgtatatatatgtgtatatacgtatatatatatatatttttttaacaaacatagctgctatcatt

SEQ ID NO: 1882540 - DNA, 4001 bp, Homo sapiens; identical to SEQ ID NO: 585675

SEQ ID NO: 1882541 - DNA, 4001 bp, Homo sapiens; identical to SEQ ID NO: 585682

SEQ ID NO: 1882542 - DNA, 4001 bp, Homo sapiens
tgatctggatctgcaagcaatgggttcctaaatgtcaactctggagataataaacacatagcagagactgatattttcccaccaattatttattctttcaatcctaaaaaatacagacacttaacagtgttctatttacaatgtgcgcatccaggcaaaaatttccggacaggctaaaaagcaagaaaatgcgatccacaatcaggagaaaaatgaatcaacagaaactgattcagaaacaaacaagatgcagatgctgctcacagaagtctagaacgccaaggtgaagcccccactgggttggacattttcttattccttatgtcatttaaagcacaactcccgagattttacgtgatataaccgctagaggcctctctgtcacaggctgtattactcccaggtccccatgttggctgtgttcagattttttgttatatttgtggaaatctgagtgcatgtgacgactgctatttatgggttttgtttttatttttaaagacagggtcttgttctgtcccccaggctggagtacagtggtgtgatcacagctcattgcagtctcgaactcctgggtccaagccatcctcccaactcagcctcaggacttacaggcgagtaccacctcaccaggcttgatttttgtgtttttaaacagactgaacatctttcagtacttcccatccccacccctcccggccctgactccgccaccccaaccccgccccactttgtactacccaagcacatcttgggaacatgatgcggaaagtcagggacgctggaggtgaaggactgatgacgcgctacggtggtcctaggtgcgcgtgccccctctctggagtagtcccgggggtcacgaggatttgaagacaggccctcccttcccactgcccccattcccccgaatgccaagcccctgtgggcaggcgccctgggcaggtgtggttggttgctaaagcctgctgggcccagacatgaaccctgccctagctgggcagcggcgcgggagcaaagttgttctgaggctgccctccccggggcctgctctcccagccctggaggagccggcgcgagacgcgcgggggcggggccgcgcgggggggcggggctcaccaaggctccaccccgccgcggccactgttcgcacacacctggtgctgatcaacgccgaggccgactcgtcgccacccagcgcgccgcaggccggggcggagaggcgcagggcgctgggcagtctccggcgagggcaaggagcggtgcccggctgggccggctatgtctcccgctactgcggttcccgccggcgcccgcgacctcgggggagcagccgggttcgggggcgccgcgctgtgaggccggggcctagagccagccgcggccgcgcaggaggggcccagggcccgcgctcgcccgcgtccccgccttcctcccgcgctcagccccgcctcggctcgctgcccttggctctcgtcgccatggcctccgtcgcccaggagagcgcgggctcgcagcgccggctaccgccgcgtcacggggcgctgcgcgggctgctactgctctgcctgtggctgccaagcggccgtgcggccttgccgcccgcggcgccgctgtccgaactgcacgcgcagctgtcgggcgtggagcagctgctggaggagttccgccggcaactgcagcaggagcggcctcaggaggagctggagctggagctgcgcgcgggcggcggcccccaggaggactgcccgggcccgggcagcggcggctacagcgcaatgcctgacgccatcatccgcaccaaggactccctggcggcgggtgccagcttcctgcgggcgccggcggccgtgcggggctggcggcaatgcgtggcggcctgctgctccgagccgcgctgctccgtggccgtggtggagctgccccggcgccccgcgcccccggcagccgtgctcggctgctacctcttcaactgcacggcgcgcggccgcaacgtctgcaagttcgcgctgcacagcggctacagcagctacagcctcagccgcgcgccggacggcgccgccctggccaccgcgcgcgcctcgccccggcagggtaagcgcgcgactgaggggccggccttggccagagcgctcgagacccgcagcgccctcgccaagttggaagcgaaacacactcgtgccaagttattttagccgcgggcacccagaagagtttctggcatgggtttctctgtcttagggaagaggaagcccagtagtttggcagaagcgggcgggcgggcgcggtgacgtgctactggaatttttctaggcttgaagagaaaggctgatctgagaggattcgtggaaatatgacttaaaaggggagaaatgctgagagaaaaaagtttgttttagtctcatgggttgtataaggcatggtttgtgttaagtaattgcaagagcaaaatctaattagatgccgggcttctcgtaacacccactcctttttcttgacgtggctctcctgactttgcctgcggtggctttcatcatacaaaaatgggaggaaaacttctggtcccttttataaaaagtgaaaagaggggacttgattttcgttgaaaataagaaactttaaggccgggcgtggtggcttatgcctgtaatcccagcactttgggaggccgaggagggcggatcacctgaggtcaggagtttgagacctgcctgaccaatgtgatgaaaccccatctctactaaaaatacaaaaattagccagagctggtggcatgcgcctgtaatcccagctattcgggaggctgaggcaggagaatcgcttgaacctaggaggcggaggttgcagtgagccgagatcgcgccattgcactccagcctgggcaacaagagcgaaactccatcttaaaaaaaaaaaaaaaaaaaggaaaagaaaataggaaactttaaagcgtgtttcttaaggactaaaaatgatgctgattcgacggtttgactttttgtagatgctctgaatgagagaatcaggacacatacaggaggcacaaaaatggtagtggttggacatgaatgtcacggagggaataagagaccttgattgtgcccacgtgtggtcaggctccgtgtgtttaatcatgccctgttgctgtttgatttataatagcacgaatgatatcagcaagatgggggcggagctcagcccctttggaagtgtggattctccaaaacctgtggatccattgaaagagtctggaaatctgtgtccatcacatcctgcctccctccccacctctaccttagatgaggctcagaatccttgtcaggggagcagatatcaaagggtcaccctgcgactgcttggccttgaggcaaacactgggaaggactccatagctttccttctgaagtggaggcaggcagcactttcacttggaccccccatcagcatctctgaggcccaccacggctgttgcacacacatcctctctgcccaaacacagaccaaaatatcccagcagcaaagaaacaaagtcttttctctgtgttctcactacttacctggaagaaactgacattgccaaagtgagctttcctataaacccagaggaaacctttgaaaaggaaaataaacaaggaaagaatatgccatagaacaaaaattttaaagtttagattacttggagacgccaggcacggtggctcataactaaccccaggactttgggaggccaaggcgggtgaatcacttgaggccaagagttagagaccagcctggccaacatgacaaaacccgtctttgctaaaaagaaataaacacaaaaattatcctggcatggtggcgcctgtctatgatcccagctcctcgggcggctgaggcaggagaatcgcttgaactgtggtggtggaggtcgcagtgagtacagattgcgccactgcactccagcctgggcaacagagggagacactgcctcagaaacagaaacaaaaacttcaggttactatgag

SEQ ID NO: 1882543 - DNA, 4001 bp, Homo sapiens
ggcacgtatacaccatggaacactatgcagccataaaaagggatgagtttatgccctttgcagggacgtggataaagctggaaaccaacattctcagcaagctatcacaagatcagaaaaccaaataccacatgttctcactcataggtgagagttgaccaatgagaacacatggacacagggaggggaacatcacacaccagggcctgtcacggggtggggggctaggagaggggtaacattaggagaaatacctaatgtaggtgatgggttgatgggtgcagcaaactaccagggcacgtatatacctatgtaacaaaactacacgttctgcacatgtaacccaaaacttaaagtataataaaaaaaaatttttttttgtagagatggagtcttactatgttgcccaggctggtcttgaactcccggcctcaagtgatcctcctgcctcatcctcccaaagtgctgggattataggcatgagccactgtgagggcctggccatttcagtttcgttaattagcatctatgatagtgcctgatacatgtagtagacactctgtgtttattgagtgactcaatatgttttattacaattacacacacacacacacacacaaaacccatctgtcatggtagaccacttgctgcctgtttgcagctagtttaattaatactggggtgtgcttggtgagagaaaatctcaaccatttaagaggaaagagtttgaacgggttagggacagtgggagaggggagaatggcgatgggagaaaatacaggaatgggcagggggtaccaggaagaaagggaaaagcaaaagaggcagggaggagaagggaagaggaaactggaggaaaggagaaggagctcacataacctccaaccatcctgctcacaccagagggggttttttttgcaggggcagcagggacaggagaggagagagagtttattcaaagttaattttgtttttaaatgtcttcttttatttttcaataaatgattatattctgaatacttggaaaacactctcttcacaaaattgttctttaattgggtctctacaggcctgacctcagttgttccagggtaaagaatttgggcagtgcccacacccacgctgttggataacatttcttcaccataccagtgagggtgaatgtgtacacgcccagcttcctgcctgttactctccacagtatgcgaagaatatccctgacttctagccctgtgcgccttcttttgtttctgctgttgctactaatagccttggagatcatggttggtgagtgtcctgagcacaagaactggctgaggacaaggaggagggagaaaggtagggggtaggcgaatggggcttcatgcaggcttcagacaagtgggtgcctgctcttaaggatgacgtgaggaagaggatccctgggatgttacacccagttcatgggagaccacagcctgaggccctaggcaaggcactggctcacagagggcagttctacaatgctaccccccgccttctactccaggtcactttcctgaacatctgggaccccacaggaattcagcgtgtgtcctgtgataaatgcctctttttcctttctattgaatgtcatgtgtgttcagctagagtttaagtctcaggaggtcatacactggcttgtctgttttgtgcctcagaacttggtagatgttgctaaaagtacttgtgacatgaatcctcctgttaacaccattaacactaagtgcaccccaggggtccctggtaccatcaagtatctcatcccagacagtcagggagagatgggaacagggatccagaaggttgagggagtctgggatggagctgccccgcctctgctagcctggcccagtccagggagtcttgggtcacagaagcgcaggttctaatgggcctcttcccctgtcctggacctcacctgcatctttgtctcacaggtggtcactctctttgcttcaacttcactataaaatcattgtccagacctggacagccctggtgtgaagcgcaggtcttcttgaataaaaatcttttccttcagtacaacagtgacaacaacatggtcaaacctctgggcctcctggggaagaaggtatatgccaccagcacttggggagaattgacccaaacgctgggagaagtggggcgagacctcaggatgctcctttgtgacatcaaaccccagataaagaccagtggtaagtgtggaatggggtgggcaaacagaggcaggcagtaagagaggggagggaagaacacagatggggaggggctttaggtatatctgtgtattgatcattggcccaaccatagaggcacatgggacccaatgggcaggaaagggcaagtctgggcagaaagaatacagacccctaaatgtgcagagaaacacttgacctattggaggatgatggacttctcaaagagtggaggatgatggctttgtgtttggattgcagatccttccactctgcaagtcgagatgttttgtcaacgtgaagcagaacggtgcactggtgcatcctggcagttcgccaccaatggagagaaatccctcctctttgacgcaatgaacatgacctggacagtaattaatcatgaagccagtaagatcaaggagacatggaagaaagacagagggctggaaaagtatttcaggaagctctcaaagggagactgcgatcactggctcagggaattcttagggcactgggaggcaatgccagaaccgacaggtaactgagctgggtgggagaatgtggcagctccctttaaaggtcaaaagccttccctgtgtgggtgtcagtgtgtgtgtgcgatagaaaatttgattgacttctccgtgggcttcctgtctggagagtcagtgatggctataaggatttcccaccatcctccctttcccatcccacctcccactgtttcttcctcagtgtagaaaccccttcccattaaccaatgatccagtcacaatgacccactgctaaatggtcccaagtctatctgtgtcattgcaaacatccaggccttctcttcctctattataattacccttccaccagctctaatgccacttcttaggaagccttccccaccttccccacacagaattaagcaccacccattgtgtcatcctccaaacagttctaaccacagtaatcgtgaaactgtgtggtaatcagatggatatttgctacctctctcagtagaaatctgagctccataaggacaaggcacaacccctattcatcttcatggcccagggcctggtagagtggctgtcacatgagccagtgattatgtggggcaccatgtgttcctggggaaagcaggggctaaggaaagcatatttttatgctttttttttttatgtgacagggcttgtgcttttttttctttttttttttttttttagtgtcaccagtaaatgcttcagatatccactggtcttcttctagtctaccagatagatggatcatcctgggggcattcatcctgttagttttaatgggaattgttctcatctgtgtctggtggcaaaatggtgagtggcaggctggtctctggcccttgaggacgtcttagtctggtaaggactcaagagaggtgaatcatgggtctcatccaagcccccgctccctgatccatctctctccacagaaatggtgcactgccttagtcttgagcccccacactacacagcagggctggcagcacaatgtgcagtgagaggagggatgaagcaatcatctcctctcgaggaggggcaaggtcaaagatctggaacgcctgcctggggtgttgtctccttgccatccggcccaggtttcatccagctctttgacggaaagtttgtttgctgtctgcgtttaccgtgatttagctcagcaggtcccatccccttttcccgttcaccctgagaagacttgctggtggcgcttgtggctgcagcatttactcccagataacatacaagatgt

SEQ ID NO: 1882544 - DNA, 4001 bp, Homo sapiens; identical to SEQ ID NO: 585688

SEQ ID NO: 1882545 - DNA, 4001 bp, Homo sapiens
ttcctggatttctaccgggaatggatagtgtttgtagttaatgtagtatctattataggttgtgctggtcatatgacctcccctgtcactactcaactctgctcttgtagctgggatgcagccatacacactctgtgatgaggcgtgacgctggacctaccaatatggctatttgaccctggactccctaagatcccagaggcatgtgtggttggaaaaggtgctatgtggatttcatggcaattgccaaccgcagaatcacaacaggatcccctagtgctcagaagcaaggctgtgccactcacagcagtgaaatcccctcatttaaaagtggctcctgctgtggtcctgggcccctgtggagatgggcctccagctatgggagggcagtgaccacacagcctcagagctgcccatcacagggtgggctcctcaccctttaggtcattaggaagataggccccacagtgagaagacacaggtgggtctcctgggatgggcaggagcagggccacagggaaccaagaagctgcacaggcagttggccccgatccccaggacaccatgtggctgtaccgcctcaccctcagctcacacctgaggcttcagggagggtccctgattgccttgaggtaccgatgatgccacccagcagcaaaggatgggggcagtaggcctggacccatggaacctccattcacatccatcacatccacaccacccagaagccacaggcagggtaggacacacttgtgactcttcaacttacacaacttggagatgacaccctaggggatggggcagcaattgccaggacacagcatgtgccctcatctggggtcagcaacctaggacagggtccacatctgctctcccttttacttgcaggttaccattgcctgctgttgctctacaaagggacaggacttgacacacagacagagaactcacggccagcaaggaccaaagtgacttcagccttttctttctagaaagggtttgctgactcctgtctgcgtagtgactattctatatgaccctggctccccagtaggaagaacaggcgggtctgggacccaagggcagaagtgggcacctctactcacgggcgctcccagggtcatcctgagggaaatgggatttcccgtcccccctgcattaagttctgtagaaagcctggggtgtgtttgctggggtgtgccctcaggcaaaaggggacaaggtgctagttggtgtggggaggtgctaagggccccttcatggatggggaggtgagggaggcctgtggggtgacagggctgggctgagatggggagtgaaagaatgagacctgagtagcagaagtgaatggtgaggaagtggtgaatggtgggaagtgtctggtgagcccctgggtgcaggtgagtgtctgcagcaaattgcaggggaagttccagggcggagccctacaggtgctggagggtggagagcgggtgagagcagagcatttctgtggttggtgggggagtttgtgatcgcatccctgtggaaccccgcttcacccctgtcctgaccccagctagggtttcgggggctctggtttcttcttcccgagggcgagtagggctgcggagctgcatcagggatccccgctccaccctgccctctgcagcccgttggcccctccaccctcctgtggtgccttttccgcgctctttaaaaaccctcctggtctgcagtgcaagctgcagccgcaggaagcggacccagcgtaaaggagccgcagcggggaactccgggggcgggggggccgatgctcggggagatcgcgccggtccttctagaagctttccttcctctgaaacacgctgcagtccacagcccgccaagtttggccccagcccccgattaggctccagcccccgattaggctccatccccgaactcaccggcccgccctgacccggaccagccggacagcagtagcagaagcgggaagcacagaagaaacgcggggcaagcggccgctgccattggggacctggggcacaggggacgggagtcggggtcgaggcggatatgggcggaggaatcgcctggtgcctcacattcaggctagtgaattggaccgctccgccccgtccagccccgttccgccccgccgcaggctgggatccaaggggcgtgatccgacggctgccttgtttgggcatgctccaccccgccctgctccggggctcgtcacgtgacagcggccccggcgggcgaaccctccccctccacctcggccccgcggcttggtggcggcgtcaccgggctccgcgcggggcaggacacggtgccttccatgactgcctcgtttaatttttcaacacagcatttatcattaccccaatgtaaacactgatgcacaggaaggtgaagaaacttaacaggaatatacagtggcggcggtgaccccgtcaccgcctgcgccagcgacacaccccctccctccgcctgcgtcgcggagtccccgaccctctctgtccagcgcgcagccgcctccccagtccaaagcggaccttctttgcctctccactaaaagcatgaggaggtctttgagtatattctatatccctttatgacttttggaaaaaaaagaaaagaaagccctagaggcctactgtgatcaaccatcatgtgatcaattgtgtttccatggagagcagaacccgatagtaggggtctacgcatgggtggggctcactttgctgcactcccatctatgtccaaccacacccaaatccatggctgtatccgcacctcggctcagtccctggatggtccctgtaaccatcctcaaaggggacactcgagtgcgtcctcctctgagtcaccatggaaccatctagatctatggacagaagccagagggaggtggggagcccagtggcctctggtggcaagggagggcttagcctggggtgaggagtgggcagagctgagcccactctacccccggccactcagcccgttctccattgaatgagtcttcatgtggggagaacttcacctggtgaccagcaatccctagggtcctgaggctgtgggaaagaggaggaggcctggaccaagcccagggcctgtctctgcttcaggacagggtcatgggagggcagccacctctgtgactgagcagggacacaggagcctagaaggttctcgcctgatgcactaaagccactgtccaggaagggccacatggagagcggtctgcaggccaacagacacacgggggtgagcagttctcagacttcggaggggcatagcttggtgggtctggggatctgtgttgtgagaagagcctcccatgcatagggctggggacaaggaacccgggttagtcctggaagtaggccactgggaagaccctggcagcaccactcgtgaggctgggtgacctgggccagtgactgggggaacaggaggaaggcagaaggaggccagcaggagagcctccagcaggatagccaggtgagaggagaaggggcctctgtgcacacctgggccctcctgcctcacccctgctgccggcatttggccaccacactcaggccagcccaggatgggcatagaagtggcccaaaagtgactgtaatggctgtgatttagagatcatgcattcagacatggaagtcagctgatattgcagctgaatattcctgtgcaaggttcttcagctttctgggcatggatgtccgcatgtggaaaatgacaaatgctatgaacacagatgaaatgagcagattctacaaggaaccctgtccttgcacatgctaaggacccagggcaggtctcctatttcagttgtgagccctgccgccctccctgaagtcagcaactgccaggcccaccctgaggagagctggagctctgaacccaggccgcggcctcttcatggccctgagtgtgctgtgagggggtggaaatgaaagcgagacccgcaatcaggactcaggcatgtttttcagacccacaga

SEQ ID NO: 1882546 - DNA, 4001 bp, Homo sapiens
tttagtacagcattcacctgctcaccagccacaaacttaggagccattctggccttttacctcttcttcacctaacatatccaatacgttataaagcctaatctattttgtcattcaagtatttcctagattcacccagtctcaccctcacttccactgtcttacaatggttcatcattatttcttacctgaaaaattgcagaacttccagttttacttttgatgccctgactaagcctatttaacatataacccccaagactaccttcggaataaagcccatgggttcccaacactacatacaggatcaggacagaactctgtacaagagtgtgcaagatttggcctctgattaccctgctaaaatgaccacaacttcacacacctaaactccttggagttcccgcaaggagccacaccgtttcatgatcctgcttctcttttccaatgctatttcttttgctcccacttcccattcatctgactaacttttccaagactcagccaggtaaccacaacttataatatacacttccctgacccttccccctaccactgacagatttaggcacttcgtgccctgcccatacttgtaaaactaaccaaactaaattccattacaacacttgccatgtgctgtgactactttttcctgtgtccttcaccagtgctagcacacggtaggaaattagatgtaatgacttctatgtgttatttatgaccaggggcactttacaaacatcatccagctcttcatttaacagctctcggaggcaggaaaactgcagaattcttaacatttcacctgaataaaagtgacacagaatcttagataaaggctgacttcctgtgactaggaacagtaaactagctccgcaagttaaataaacttttgaccctttctataaccattctcaataatctttaggattttcattacatttctattttttcctactcggcaaacttgtaagactgtaactgttaatcccattcttccttccagattgcaagacaaaagcagcatacacactctgcctgatgcgaagtcaatttcattcgaaccctttaggatttaaaaataaaaactgttttgccagcacaagatgtcaccgctctcttaccatatcatcccctttccctcttcgtaatatattcatcaagttcactgagtatgtattcatcaacagtccctttacgtgggaccgtgagcccctacctttttcaatttgatgagtgagaagataagtaaccttgaagccagattttcagagagagagagagagactgcaggaccagctgcggagctgggctgcgcgatgcccctggctcctccctggggctggaggagcgggagaccttcggcgaggcctgtcactcacctgactgggtgcctgaattggtaaagctttcctgaggctgcggtcattccagggccatcgggcatctggagaggaaaggaagtgaatccagttatcacccacctccttctagaaagtggaaacgtgcacgacccagtgttcctcgtgcccgctgggaatgtaaccccagggctctcagcagcctcgctcccggctgggtgcctgtggcccatcgctccagaggacacatccgccgcgtcggcacctttatggccaccggcaggcgggatgttaagcgagaggcaggacccggtgtctcgcatgtctctctcaggccctgcgtcccgagagccctggtcgatcttctgcacccgtgggaggcgcggcctgagacgcgtggctcactcaccgcctccgcggcgtggttcggcgtctcctcttctttcttgcctccggcgtccacccagggtctccagaagcctgcgtatctgcgggataggggagcacaaggcgcgcagaggagacgtgagcccagacccgggagaatccaccgaagccgagcgctggcaccgggcagtgggggatggagagttggaggggaggagctggggaggcgcaggagggagagacgggggaagctgggaggcgcagagcagcgcggggaagcctacccggagtccgcgcccgcgcgccgcgtagggccgtcggtggccgcgcacgccgcagctccactctctgtaccctctgcgcctcccgcgttctccatgacgccgcagagctgggcggaaggccgctgccagctcgcgggcaatcttgaccagttccagtaggtccgagacccgagctttatatagccctcgcggcctgctgcacattgagaggttcgctgcctctccgcccctctccctgctagccgcataaacaaaaaggctgcgcgtgaaggcgcaccgggctgagccccgggtgtgaacgcgtgcaactcccaaatggcccgggacagggttttgtcgagcgaatgttaatcgcccttcgacacatggctgcggagaaaaacaacattcgcccgagcagccaatttccgtgtgaagaggccaggaggagatggaattaagcgagtctacacgttttgtggatttctgcaaaaaggccaagtgactggttaattgcttgattcgctggagactcaggacttggcctgtggcaaatcaactggttctgcatcccgtgttctaaaagctgggatgcagactagaattcaaaggaataaacttaattcctcttcatggaacaattttctaaaaaatggggagaatgcatggactccttaagagaggaatgtcggttttttaaaaaagtattgataaactaggttcatactccagcctattattatttgaagataatagaaaattattggcaacaagaggtaaattgtaaaagattcgctgttctggctaagagagccagagactggagtcatgtgatttgggcatagagctctaaattatcttctcgtgtcttttgtgattttccccaacattttatcagtgtcctcctacaataacttttgagttcgtctatacacctctgtcactacttggtattttgtcactcaatggtaattacaaaattcttttttgagggcagtgttgtggaatgataatgaaatcttgaaaagttatgatatgagacaagttaatcaaacgtctgcacccctgtttctctgatttgagttacccctcacttatctaccactaaactttgtaaaaagtgttatgcatcgaggaaaagatgatatataaatgttataatttttttcaaaatgttttaaataataaaactggactttctcttaaaagtttagacaaaaatcttgattgtaaactatagttgtctctgctattcattcagctactgcataggaaaataatttaattattaatagtagctaagagcctataatgatctacctgccaggaaggtgagatttgggttgcttctgataagaaaatcagtaaggatagatacctaatgcatgtctgcatcccctacagttattgttaggctaaataaaataaagcttataaaatgcgttttgcagtgcctggcatatagtaagccttcaacagattttaagctacgtaaaaaaatataaggccttaacagatgttaacctttctgataaaatggcttattatttcagttccataatgtaaactagttaaatcattgtggaagatggtgtggtgattcctcaaagacctagaaccagaagtaccatttgacctagcaatcccattactagggatatatgcaaaggaatatcaatcgttattttacaaagatggcatgcataatgtttgtatgcgtatgttcattgcagcactatttgcgatagcaaagatatggattcaactcaaatgcccatcagtaatagactggataaagaaaatgtggtacatacacaacacgaaatactatgcagccataaaaaggaacaagatcatgtcctttccaaggacgtggatggagctggaagccgttatcctcagcaaactaacgcaggaacataaaaccaaacactgcatgttctcacttataagtgggagctgaataatgagaacatctggacacagggag

SEQ ID NO: 1882547 - DNA, 4001 bp, Homo sapiens
atttttagtggaaacagggtttcaccatgttggccacgctggtcttgaactcctgacctcaggtgatccgcccgcctcagcctctcaaagtgctgggattacaggcgtgagccactgcgcccagccctcaatggctttttcaactgtctagtgggtatttccagctggatggttcatagcaacaaaagacaagtcaacccattttccccaaactttgtcttccttctccgctctttatggaactagaaaccaaagcattgctcattcattcattcaacaagtgttctctgaatacctactctatactaaccaggatgtacaaaaggaaaaccaaaagcgcaaaaatcctcgatctcgtggaatttacattctaggaatctacagacaaataaataaaaaagtcctgttagatgacaatacatgttattaaaaaaaagacaagaagtgtgtgtgtgtgtgtgtgtgtgtgtgtgtgtgtgtgtgtgtgtgtgtgtgtgtgttggacagggcatcattctagacttttcttcctcctcccttccctttgatctgattagcaattgctttaccacctacctccttagtatttcaccttttcttactcatattcttcaaactcatggtgctactttaatttacacagacacaagaggtttctttctctacccctactaccccaattcattcgcctcactttggccagagaaacctattgaaaataaaatctgatcatgttagcggctgcaattgttcagcacccaggcttgtcaagcaaggtactctcgagcgcccccgtgggtgaagaaaataacaacatctatagcctgagaaatagcagaagctgcctctaaaaacaaaatttattttcgaaggcatatatttcaaactttgaaatccatgtgaattttgcaattgttccataatatagccctgatagttttaatatatttttaatgttttaactaacttgccagccaaattattcttttagcaccacccccaactccaaagacccccttccaaacaggtgctgacttgagaccgtgactatagagcacttgtctctaaaatgtacaaaatgaagagaaatctcaagatgtcccactgagatgaagaaagaaagaagaaaatatgtatgtttgtatacatgtatacatgtatatatatgtatacacaaaattagaaaagttagggtctactgtataaattaaataagcgttgacagtgcttttgattttaatctgtatgtggtactttgcctgcttaacacccttatgtggatttcctgacggacttgacattcctgtcaggaaagcattgcgtacttgctgattaaaaagcatctaagggccgggagcggtggctcacgcctgcaatcccagcacgaggcaggaggatcacctgacgtcaggagttcaagaccaccctggtcaacatggcgaaaccccgtctttactaaaaatagaaaaattagccgggcatggtggcgcgcgcctgtaatcccagctactcgggaggctgagtcaggagaatcgcttgaacccgggaggtggaggttacagtgagccgagatccgtctcaaaaataaaaaataaataatgaaaaaaattaaaaatttaaaaattaaaaaacatttaaaaaagcatctaacttagatgggtaatgggtcaaaagaaaggcagactgccacatgcagcgcctcatttggatgtgtctggagtcttggaagcttgactaccctacgttctcctacaaatggaccttgagagcttgtttggaggttctagcaggggagcgcagctactcgtatacccttgaccgaagaccggtcctcctctatcggggatggtcgtcctcttcgaccgagcgcgcagcttcgggagggacgcacatggagcggtgagggaggaaggggacacccgcctagccagccagatcagccgaatcaaccctggcgatcaatggggtgacagatgtcgcagccagatcgccctcacatccgaggtacccaagcggcgcacaagctatataaacctgaaggaagtctcaactttacacttaggtcaagttgcttatcgtactagagcttcagcaggaaatttaactaaaatctaatttaaccagcatagcaaatatcatttattcccaaaatgctaaagtttgagataaacggacttgatttccggctgttttgacactatccagaatgccttgcagatgggtggggcatgctaaatactgcagtctccattggtgaggtcgtcccggagcctcgcccagctcccgcgcgctagagccgcctgctggtctcacccagccgggaccgctgacctggcgctttgtgcggctccaggcctccgagtggactccaggtctgtctccctcctgcggtcgcccccttcctcgccctttctctcttcttttttttccctcccctttactctctgagtctcactctcgcattcttccctcactcccccagttcagtccttctcttgtcttttcttcctcttgtcctttgtcctcctgctccatccagtctgggcagaggtgggccccttggctggagctggggtccttcttggctcagtgtgcgtatttttttttaaaccccttctgcggagtctgaatgcattggtggaaggtgggctcggatcgtccccgggcctggctgggctgccgctacgcccctgcatgggctgagcggggaagacgagcatgggagagtgcgatctcagatggccaagccctggcccccggctcgttttacaaggccgggggctcatctccctgtaggggtggtggacacgcgggacccggggggcgcagccaccgcatgcgtgacggtggacgcacattttgcagacagtagtagtactcggcctgttcaccttccagttgccgtgataataaaatatgatgatgtatgtaaaagcatgaatacttgaagagcttccagtggctgtgcgattttccttcgctaccctcttcaacgcctgccaccccctatcccccagctgaatttggaaaatctgagattctcgaggtcaaaatatataatattctgaatttgtgaaatcccgtactgctagcacatatgtttttacaacaaatggccccagcttcccaagatccaggataagaagtcataaatagaaatcatataaaagccaaggtttttttctccatgttttaaaatggtggtttttttttcttgagtgagggaaaatgcagcaacaaaaataaagaacagtttcccgtgccaaaatcctgaatattcatttcgcccctgagcactgggttgaagacgcgaaattgggactgttggtctgcgacgagctgctgcatttgtatttcagaaagcctgaaaagctatcatggcagcaaggcccaagctccactatcccaacggaagaggccggatggagtccgtgagatgggttttagctgccgccggagtcgaggtaccttatatgctgtttcttcacggatttgtcatacagcttttgagacctttgaaagaaaaatacgttttgaagcaccgttcagttctagttctcgtccaccaaaatcacaggcacgcttcactgagtcagataccatccctgaagggatttttctttataattagaacgtagttgatggaattctattttccttttgacttttacttaattattggcttctgatctagcaccagtgaatatttattaataagaagaaaggaaatttacctgaaaattgtcagttactctgagctcttattaattatgcattctcagggtaaatttcttgttttcttcagtggcttcaaactggcagccttggtatcttgcttacatatgtgtgtgtgtctgtttttgttttcgttctgttcttttagcttcttagtatggaaattttcaaataccaataaatgtagagagaacattgccatgaattctatgtactcatcacccgacttcagcaatcatcagctctatgctaatcttgtttcatct

SEQ ID NO: 1882548 - DNA, 4001 bp, Homo sapiens; identical to SEQ ID NO: 585718

SEQ ID NO: 1882549 - DNA, 4001 bp, Homo sapiens; identical to SEQ ID NO: 585719

SEQ ID NO: 1882550 - DNA, 4001 bp, Homo sapiens; identical to SEQ ID NO: 585725

SEQ ID NO: 1882551 - DNA, 4001 bp, Homo sapiens
atggaaatgttctttggcattacactgctttcttagtttgcatcgctagtcacctttgtatcatttgcatctgatttggaaaatattttagaacaacccaataacaacttcgagattaaaaaataaaattctacacactttacagttccttgctattacatgaatgtgtaaattgaattccctctcaggagaaaaaaaacaaaacaagggctggcttcccaaaaatgttttcactggctttagggaactaaaacaccagtgtctgggtgagtaatacttcctgtaaaataaagatagatcaacacataattaagtcctggctcacatataattgttgttttggaaacagttttgaggataaatatggttatgctaatgaaactgcccatgatttccactaatgatccagtttattaattaggtcaggacatttttccaccttgtgctatccattttggaatgctgaaaagggttaaaaaaaaaaacttctaagagaacactgtaggcgaagaaaaagagagaaattttaaattagttatcaactcttctaaggattccagttggaggagtagatcgaaagtgctttttcgattatttatgggtttcgaagattcttcctactccactaggcagaaaaacagagttgtaatatacagcatttagaattcataatccttagcattatttctctgaactcgacatcctaaatagccagcgtttactaattccagagctgagtgtagttttgtaggaagttctactgaatgcggagaccaaaggggagcctgcctgctctgagggttttgttgaggctgagtgtgaactccgggcgagaaagcgcatctcagctcttagatcacacccactcagggtgtgcgtgtgtgtgtgcgcgggtgcctgcgcgcgtgtgtacgtgtggggaggtgtgcgccaaaggggtggggtgaggggcggcgaggagggctgtaggtgaagcgcggggagagggaggtcgcccgctccggcctctcccccaggggccctgcggctggccagcgctccggctgcacctcctggtgcgcgccgcggcggcgccacaggcccctcgaccctttgaccaccgccctcgggccgcgcgtccggcagccgggaccggtgatggcgcgggactgacggccgtctcctcccagacccctctgtcccgcctggggctcgctggggctgcggcgccgccccgagctgcatgtggggcgggcgcgcccgagcccagagcgagcggccctcggcgcccccgaggcggtgccccgccgcgccagagtacgaggaggagcggcgggccgggccaggctccccacgcgccgcagcctcggagcacgggctccccggaggggacttggggcgtcccagcccaggaggaaggacccggaagcagaagcggagccgcgagtcgagccgagccactgcccccgctgcccgcgggcgccgggtgggggtcccggcggctggatgggcagcggcggcgcgggccgcgggcggcgatgggcgaggagcagagcacggtgagcggcggcggcgggccccaggagtcgcagaccctggccagtggcactgcgggccaccctgagcccccgaggcctcagggggacagcgcccgggcgcccccgctgcgcgccgcctccgcggagccgagcggcggtggctgcggaagcgactggggctgcgcggacaccagcgccccagagcccgcgaggagcctggggcccccgggctggagtaagagccgagcaccggcgcagcctgcgggactggcactcaccgggcctctcaatccccagaccttgccactgcagttggagctggaggaggaagaggaggaagctggggatcgaaaagagggaggggatgaacagcaggaggcgccccccggcgaagagctggagcccaggacccgcgtgggggccgccgacggactggtcctggacgtgctgggtcagcggcgcccgtccctcgccaagagacaagtcttctgctccgtgtactgcgtggagagcgacctgcccgaggcccccgcctcggagcagctctcgccgcccgcgtcgccacctggggctccgccagtgttgaaccctcccagcacccgctcttccttccccagcccccgactgtccctcccaacggattccctctcccccgacggcggcagcatcgagctggagttctacctggcgcccgagccgttctccatgcccagcctgttgggagctccaccctactctggcctgggcggtgtaggggatccctatgtgcccctcatggtgctgatgtgccgggtgtgcctggaagacaagcccatcaagcccctgccttgctgcaagaaggccgtgtgcgaggagtgcctcaaagtctacctgagcgcccaggtaacttcacccccttctcttccccatttatcattccaaatcactggcgaggaggtcctgctctcgatctgatctccctgctcgcgcgaagaggtgaccgacacacttactgaggatctctgttagtttctcacgtctcagttgttatttaagtgtattatgacctcactggtttacttaactggaatttaactttgctgtgaacttcaggctatggttggcatgtgtagaaggcacaagatacaagttgttgccctcctcttatttcttatacaggattgcaagcacaagcttgctcaaaggaggagaggaagagactgcctcatcggcctggtatcccagaaactaacaagcagtgggcatagaataaatatttatggagctggtggagaaaagaattggaataaatatttcagacccataatacatgaatttgtaattttgcttcatttgtatattccaggaaagagtgaatgtttaaaaaaatgtatcccttggcctttgcctacttttcagtttcctttttccacagtaaagttgaagtacttttctttcactgaggttttaagccagcactctttaagagggaagcaaaacagaaagagcaaaacaaagcaaagagaggctaagaggtttctcagaacaagcactggtgaaactttcctcctctgcttttatttgaaaacttggttttttttcttggaaagcttgagagtgcaccagaccagctttccttcactgacggtgaatgcgttcttccagcagttttcaatctgtgatgtttctgccagtgttttgcacaatcctggatgccctttgatcctgtgtccaattgtcctaggcctattcatctttcaaaaccctgtgtgttcaggtgccaactcttctgtgaagcgttgcctcaccctccaagtcactgcttatatactttcacagtatcttatattatcttacatgcactgaagttgtttctttcgtgtctgcttgtcttgttagactgtctggacaatgtcttagagtcccatatgtggtagcttcatgttgagtcccttgcccatcatagtgtttttaataacattggctgggacaaactgaacagggctccgtaccatgtgattcctctatgttttttggctaactcatgcttgggtctagactgaaagtgtgtacagtccctaactaaaaatgcaaacaaagacttaaaacggtatgttacataaacagtaagttggctaaaatagttgggattatttaaaagcctctgagagactgttgtttctttcatgctttatctacagagattcttaaaacaggaggaatgtctgctgctggttgtggtagtttctgtatcatcatcctcaaaacagatttcgctgccctgcgatgggattcagacatttccaaaatataagcccgcctccagggaagtcactgtgagagcagatgtgtacaaaagaacaatacaaggtagcatgggatgagatgtcaatagagtaacaattccagatagcacttcctgttaaatgctggatacacattccagaaattcaagggaggtagtcattgtggcttggggtactttacctagcagtttgatttcct

SEQ ID NO: 1882552 - DNA, 4001 bp, Homo sapiens; identical to SEQ ID NO: 585729

SEQ ID NO: 1882553 - DNA, 4001 bp, Homo sapiens
cagactctcagttccaagtgagtggggactgctggtctcgtctaccacccatggcacagacagccggttcttgcccaaactctataaacagtagcagtacttttagctgcacatggccacccagaataaagatgagattttccagccacctgcagccacggggtgatgttctagccaatgagatgtaagcaaagttatctggaggctgtttctgggaacttcccataaaagaaagcaccatccgcgcttctactttctgtttcttcttacatcctgctgctcggaagactgaggccacactaagcctgacagacgtatgatgagcaaggaatttacgcagggtcatactagccctgaaccatccaccctgcctttcataagagatacacacttctactttgttttgggataccattattcaaaccactattattttggcatgtccatcgctgcagctgaacctaactgcaacatacacagccatacccgtagtataataataaactacctgttgattcgagtatatacctcataattcctactgagtctttttactggtaactgtattgtcacgtgtagggtccacattccttagcagaggctaacacagacaaatgaccaacactgagtgggtttaagtgatcaacaaatactgaccaagtggctactgaggcagataagctctgtccgacatgtatggtgtactttagcctgggctcaatgttgctgccaaccaaaacaaggttaaataagagggccaggccaggcacaatggctcacacctgtaatctcaggattttgggaggctgaagcaggcagactgcttgagcctaggaattcaagaccagcctgggcaacacggtgaaaccttgtctctaccaaaaatataaaaaattagctgggcatggtggtgcttgcctgtagtcccagctatgcaggaggctgaagtaggagggacacctgggcctgggaaatttgaggctgcaatgagctgagatggtgccactgcactccatcctgggcaattggagtaagactgccagtttccatgatcattttattatggagtatttgagtgcctagacatcaaagttcaccctattccgtccttgggaacagtgccaccagactggtctatcattggtatattctacctgaaagccctaacaggtaatatgcaggtaagcaaggccctttaaaataacagcacatgtcatctctgcttctagggcagctgggatgtctagcaattttttttaaccttaaagaccttcaaccattgtttactataaaggtaaaccttgatctttttgatgggcttactgctatgatttctggtagtgagcacaggcaccagggcctgcaaatttcttggattcatagcaacaggggtgaaccaccagcaaggtctggtgagggtgtctttgatctcctcggaagcctcatctacatattttgggtaacagggtaccagggctttggagatgtactgaaggacagcataaatctgaaccacatgaccactacccttcacacgaacatggatgtccattccagcaagctgttccttgtccagaagcagacctaattccagtagcttgtattgcagtgtgagcagcttgatcatctccaggggcccctcgttcatcctgatgaagccactgccacatctgcagagcaccacagctatggccatctccttgtatgtgaagatctgcacagactgcagccaacgagtccttagatggcatgtctccaggcataggtaagagctcctcattgcaccatgccacaacaggaaaaggtgtctagcaatttgtatggtctgagagctgctggtgttctactccttcagctggaagcaaggcaactggccttctaaagtctcctgcccaggtaagctcttcatttgtgaaacattatgtattctcaggctatcaaggcatactcagcttcacacagccattagcacatattataggactggttatatttgaaaggtacatatgtatttagagaaacattcaggcacgtaattgctagatacctacactatgtgccagataaacatggcagacactatgcaaagcactatacaggtacaacctcatctaatttttaggaatcaagaaaacagaggcaaggagccaaggagaaattgtagttgtccaggaaggatctgacatgctatggaaggctggggcaatgtggggaaggggaataagcttagaaggacagagagtatgaatgagtaatacttggtgactgacagttgagcaaagtttggtaaaagcatggttgatgagagaggagaacacaagcattgcttccagcttaatggcttgggcaaactggcggaggatggtgctcctgactacgttggccaacaggggaggtatgtggggcacccaacgatgaaaagttatgagtctggagctcaaaagaaatagatgggctagaaataaatatctaagggtggatggtgggtgggtggatggatatttgaatccatggggcaagtagatcatgcaatgagatttggtcttctgacagtactttgcaactgtttgcctacattttaaatttaatacgccagtcccatttcttaaaaagatggtaagttcaagcctgaactctgtaccagggggtcaatgaaaagtacttaccttactgtcacttgtcacatccaacttcccttgggtcacactgagcctattctaagcccttgcaaaggaaacaaaaagaagctgcttttgttcctactccttgcaaaaggaagaaaaggcagctgctctgaaaatgaaaccatcacaatatttatcacattctcctagaaacatgaggtcctgggataatgtctttatgggtctctctggagaagctcaaagggcacctgtttcaaagggcaacttccttcttggatgaagcatcttgtagagaagacaatcaatggccaaggtaggtaacagacaccaagatactacacacgcctctaatggttcccttaaagcctgagcttaagcagtctgggctctacttcaatcatattctaaacatctaaaccaaaagactgcaattgcaaataacagggagacaaatattcaaaaggcttttaagcaacattttctgctacaggcaactgctgatggttcttatctgagtgcagtctcttaactgatgtgattacttgaatattcaaaataaattatcatttgaggaaattatcaattgagttctccaacctaatttgtgcaaagtatacaaaggcagtgataccttaagctgaaattaaaagacggtggagaaacataataaagattagttatgcaaccccccaaacgaaaatgtcttaaaagattttaattcaagcctgtgtaacataaataaggcatataacacaaaaacacatttcttttttaaaactcaatctacacgcccacattttataactgttgtttgggtgtgagggtgagtgaggagagggagaagcaaagttaaatgtgtaaaaaatgggggaaaatcctgctacaatacagcatttttcaaagggacacacagtctagcaactgtgtattcatctcctctatagcatgtctctgaaaccaacagttgttttatcacctgttcagattccatgtgaatatataagccaccccatgaattttgtgattctcttattttaggaatgctgatacttatagccattacaatgttgccaaacctagtgtcccacacccagaaagaaaactcagttctgaaagagtctaaggatcctaagagaactgaaggtggtggcagacttgtctatagcctgaacaccatggcccagcacagtggcccttaatggggccttgtatcaaaatgacttaatgtcattctctatcagaatgttttcaaaatatagtcacgcatcgcataatgacctttaaatcaacaatggaccacatatacaatgatactcctgtaacattataatggagctgaaaaactcctattgccta

SEQ ID NO: 1882554 - DNA, 4001 bp, Homo sapiens
ctctacatggagaaaatatttaattttcttgttaacagtttctcttctcttctgactctgtgatgcttattcttcattttattgaatagttataatgaaattcaaattgctagctttaaccccacttttactttttctgggattttatattcagtattaattatttaaattagcatcctttttcattacagaagatttaactgcttaaaaatcaatcacaacaggctttgtattccaataagtttctatacaatactacatatatatgtaatataattagagaatgctacaacagatcaattgaaaatttttctattaacaggttttcatttaaccaaagtaacattgtgtgtgttgttgttgtttttaacttaaaacctagggatgcgtccttgatggcaatgagaaggcgcattgaaggtttgactccagaggaaatccgaaatctttccaaagaagaaatgcacatgcctacaactatggaggatttcgagatggctttaaaaaaggtttctaagtcagtgtctgctgcagacattgaaagatacgagaaatggatatttgagtttggatcatgctaaattctcacatgtaaactgtgagaaatgtgccttaagtgtttgaatattaaatgcagtaattcattgtactgagtgctatattttttttaactttcataatggtaagatttttttaaaaaaacccttatgattctgaataaaggcaatatttttaagctgaaaatttgttttactttagcattactagatttctattattatttcactgaccacaaatgttacttagcttggaaagctgtcttttttttctttgctttttctatttttttcaagactgtttgtttcttctagctgaactggccattcatactgggattagccaacagaccataagaaagacatcaatcttggctcttgtttgaaaccaatagctacaatggcaaaccatcacgtttcttgattcagggcctaggaaagctgactttatatgcacttttttttttttttttttttggtatataaactatttattaacagacaaggcctacagacttacttcttcttagacacacccacgatgcggccacggcagcctgtggtcttggtgtgctggcctcggacacgaaggccccagaagtgacgcagccctctacgggcccgaatctttttcagtcgctccaggtcttcacagagcttgttgtccagaccattggctaggacctggctatattttccatcctttacatccttctgtctgttcaagaaccaggctggcatcttgtactagtgtggattctgcataatggtgatcacatgttccacctcatcctcagtgagttctcccgccctcttggtgaggtcagtgtctgctttcctcaacaccacatgagcatatcttcggcccacacccttaacggcagtgatggcaaaggccattttccgccacccatcaatgttggtgttgactactcggcaaaatatgctgggacttttcagggatcactagagacatggcggcagcacaagtggcggcatgtaggcctcctgtggaagagagctatatgcacttctaacttggcatcttctctcctactgtttgctgctgttactccttctaggaagaaaaaaatattggctctagctccagttaaccttacccattgcctctgggtgccagcggataactgaaaatccctgaacatttttacacagtagctaattaaagcatgagccaagcccagtatgtcttccttcccacctggtgttatggtagcttcccttcacctcctgggagagttttaaagacacattttactttgcattttaaaaaaataaaataaaattcttacttgacttttattttgcctatgtaagaggctgcactataggcaaataggcatttctaaacctgtgctgctcatagtactctaatcactcattaactcatgcataccaaacatagctaaagtaaagtattaatggtatgagttaataagtgaaataaaagttaatggtataaaattttagataagatttccatgtgtgactacttagaagaaaataacttaccatgttatcccaaccatagaaaacagagcctcaggagattgcggaccttgctgtggtcccaagtcttactgagaaagacagaagcctgggtagggatcttctgactgcagagcctacactctccaatagaccatgtagcctcctaaagttttttcttcactagaatctgtaagcttatggttaatagataaaataagaccatgtcatcatttggagttagaactggtgctttctaatgacttagggaatgagaaagggtgtaaagaacaagtgttactggttggtaactcaaggatcaaattgtaagttgcagattatttttttcagcagtatggagagagtattgcataatagagctccatgcaatgtaattaatttaaagtctggcaaagtgaaacatcactccttcattctacttgtcatcctctccacccccatcacacacatacctatttggcctaaatataaagtggtctcaaaaaaaccaaccatggccgggcatggtggctcacgcctgtaattccagcattttgggaggtctaggtgggtggattacctgaggtcaggagtttgagaccagcctgcccaacacagtgaaaccccatctctactaaaaatacaaaaattagccgggcatggtggtgggagtctgtaatcccagctactcaggaggctgaggcagaattgcttgaacttgggaggtggaggttgcagtgagctaagatcacaccattgtactccagcctaggcaacacgagtgaaactccatctcaaaaaaacaaacaaacaaaaaacaaccattactttcttggatagtgttttcaaaatgatgggttgcagtatatatatatatatatatttttttttttttttttgagacagagccttgctctgtcgcccaggctggagtgcagtggtgtgatctcggctcactgcaagctctgtctcccgggttcacaccaattctcctgcctcagcctcccgagtagctgggcctacaggtgccccccaccacgcccggctaattttttgtattttttttttttttagtagagacgaggtttcaccgtgttggccaggatggtctcgatctcctgacctcgtgatctgcccacctcggcctcccaaagtgctgggattacaggcatgagccactgtgcccggccagtaaaaatattttttaatgaaacaacagaaagtatcacatagagggccaggcgcggtggctcatgcctgtaatcccagcactttgggaggccaaggcaggcagatcacaaggtcaggagatcgagaccatcctggctaacatggtgaaaccccatctctactaaaaatacaaaaaattagccgggcatagtagcgggcgcctgtagtcccagctactcgggaggctgaggcaggagaatggcatgaactcgggagacggagcttgcagtgagccgagattgcgccactgcactccagcctaggcgacagagccagactccatctcaaaaaagtatcacatagagatgagttatatgtactcgttcacattgtaaaatattaatatgtcaatatgagtgatggttaaaaaaggtaataaaacacttttagggtaaacagcactatatctagaaccacaagaccaagggcacagtctaattcatgacatcaatggactcattcaatttgagccatggtttcagccagtgtaaatgaaagtatacctactcctgcatctcagccattcttacctgggcaaaggttttatatcagtgtaaccaaaacagctatacttttttcctcaaaaaaaaaaaaaaaaagtttattttagagtgagaacatgtcatactacttttaaatcttggagcattcaaggtaagtagtcttggtacaggatacaatcaaatcatgatacacttcagtgat

SEQ ID NO: 1882555 - DNA, 4001 bp, Homo sapiens
aggagaaatgtggtccctgccgcttcctgcctttcagagaagtcacacacctcccatggcactcgaaggggatacacacggtgctgtgagcacagggagacccggcaccacgcagccccccatccctcttcagggagacctggtaccacccagcccccctatccctcttcagggagacctggtaccacccagcttcctcattcctcttctctctgcttctccattctatttcatttcttgaccagagaatctccccctcccactgtctctgtggtttccagaatggaaaaaacgtaaatatcgctatacaacgcccgacccctgccgccccaaagaatctcaggaggtcaagacccctggatctccttgcacctctgctgtggattccatgcaaggcttcacaaacatgcttttatgtgcgtgtccagcagcagaagccatgtgagtgtgcaggagacagggagccctttcgagcctccatggaaagccagctcgcttgggctgtgctggaggcagtgcccctctctgctggctgcagtaaaggctgtgagcaaaaggagggaggctgaaggccagtaaaatagaatcatatttacagtgatacaaagccacgtgccacactttctactcggtggtgggaatgacagcataagggtttaatgcctacatacagttaggatcaggctggaatttgggtgtttggctccccatgttttaactcacattcctttaattgggtcatagtcctgccctcgctgtcatttttgccagctgcatggttccctctgagctgcagaatcaggtagaccagaagacccaggtgatgctggtgtttaccttcttagctgggaattagttggcagcggccgcatggctctgacattcatttcaaatataacctgcaaggagcaaggaagaaaccgcaagcaacacaactttttcgccctcaaattacatcccagctgagaccgctgcctgggattttctcagcatccttcctgcccctcagtaggacatgctgagctgttctgagccatttcacctgtgttgggagctgtggcgggaaatcagacggagcggcgtcttgtagctcatttgcctcacggtggctcctgctgcctttctcctcttcccatgtggccagtggccagccagcccctgctgtcagcacttctgagctaagatctctctgactccacaggaactggcagtgggaatccaaaagtcaccatggtgacgactcacttaggagtgtgctgtgtttcctgatcgcgcagcagccgtgggggcaggcggggcagctgcgcttccacccactctgaagttcacccaaagctgcccactggccggtgttcctccagcgtgggcctcagcccgcagcattggcgtcccctgggagctgtttagaaatgcaaatgtcgggtcctgcgcagtcttgctgctcagagtctgcatgttcccagggcccaggaggctgctgcatgccgtgaagtgtgaggagccgggttggggtggcccaccctgtgcacagagccgggaggtgccgtggcctgcactgccccaccccgaccttctggcagaaagtccaggctttccctgctctacgccgactcccaccatagtcttattgagatctcatatgaggaaccaactccattcacagctgaggggctgaatcaaagcactgggggcagcagtgcggggtgggtgagaccctgtctggaaaatgggacagcgttagggaggagtgtgtccatgcaaggaaggcttagaaatgctcccacacatgttggggtctcaaagtttcagcagtggtcactgcctgagaagctccggccaggtcagaggtgccagggcacaggtcaggaagcagctgaacccctgcctgctagccaagctccggttctcacccactgtgcctgggtcacaccgtcctatccggattccactggtattcacattcctgggatgtggcggagttccagctgggatccggctgcccatcgctgtggcgggaagagagctgctgaacagcatgcgagacccctttgcagaggggcactgctgcgctgccaaggcaaagcctgaacaggaggaggagacgagggtcacagtgataataccccttggagggcaagctggggtgggccgaggaaggggccggggcagagcttgaggaatctgctgaaggaacagcctgttcaggctgactcaggtcggcccacaactcccttcaccaccccaggtcctttgaggtacagaggaggcaaaggagagagcagctttgcagcctgcaaaaggtctcctggcccaggcttgtctaatttgcagctctaggctcccgttcacagccccgcatgtctccatgctggttaggatgatgctagccctgtgataaacacatcccatcatttcactagcttcacgctctggaagttttatttcttactcatgtccctgtccagtgctgttgctcctggtactaggcagcactccgcataatgaatcaggagccgaggctcgtcagtgctccacggggtgactcagggtgcaaggcttcttgtgtccagtggctccgtcatctctctttcaccttattgctgggctgcatctttttttgtgccatgaaccccttccagtggcctgatggtctcagaataagattttttaacacattaaagaaaacacaagacagcaaggaataggatatgaaaatgttttgtactgccagcaaaacaccagtcctgctgaagctactgtgcttttttgcctacactcataattgatggaaatactaaatatgaggtacaaataatgcagttgttttcccattggaggtcacaggcccctgaatctaaccctgggtttacagctgtagccaagagtcagggagaagagtgtggagaaggcacagccgcttccttgtgtctgtgctgggaaggacaccggtccctccacgccccactggccagcaccagtgacagagccacatctagtgggtgggccgtgagaaaagaaacacttcagctgaattaaatttaaaagcatgtaattgagcaataaacaatttgcgaatcaggcagccttctaagccagagtagactcagagactcaggcgcagccgcatgatggaagaacgcaccctgtgtgttcacccggcgttcttccctctatgcgattgcacagcgttttccccagtgtgtatttacccggcgttctccaccctgtgtgatcgcccagcgttctcccctgtgtgtgttcccctggcgttctcccctctgtgcatccaccaggcggtcgcccttctgtgtgttcccgcggcgttctccccatgtgttcacgtggcgttctctcccctgtgtgttcccacggcggtctctttactctgtgcgttcctcggcattctttctcctgtgtgcgttcaccaggggttctcctttctttgtgcgttcacatggcattctccaccctgtgcgttcgctcggcgttctcccctctgtgccttcaccaggtgttctcccttctgtgtgttcgcactgcattctcccttctgtgtgttcacgtggcgttctctcccctgtgcgttcaaactgcgttctctttactgtgtgcgtttccccggcgttctccccgcgtgtgcgagttcacgtggcgttctttctttgtgcgttcacatggcgtttccccactgtgcgtccctgtgacgttcttccccctgtgtgttcgcgcggcgttatttcccctgtgtgcgttcacgcggcgttctccccgctgtgtgttcacacggcgttatttcccgtgtgtgcattcacgcggcgttctcccccctgtgctttcacgcggcgttctccctgctgtgtgttcacgcgtcgttatttcccgcgtgtgttagggcggcgttctccccgctgtccgttcaacttacgttcttcttgctgagcgttcgcgtgccgttctccccactgcgtgctcgcgcggttgtgtttcccgtgtgtgttggc

SEQ ID NO: 1882556 - DNA, 4001 bp, Homo sapiens
ctctgggacaattcatgccgaaaccgacgagagaaaatgcagtctcatgatcaaattcgccaggcacatttaaaatcatctcatttgtcccaggatgtcagaatgacacagtgtggccgcagggctgaaacgaatttcacgggaaacaagcgcacgtgaggaagcccggagcaggcccatcaggattctatttatactaaagaccttcagctaagtgagaagaggaccgagacagcaacagaaaaacgggaactgggtgatgacataggaaacagatgctagtttggggtctcagaccctaacatctgccttctgtagacggttttggcttcaggcattttggaattaatacgctccaataaggcaaagggcacatttatagattattcctaaaataataatgcaaaaatatgcagaccagagagaagacaggatcgaaagcgccgcaggaagaatctaaacgattttcaaagcgtcacgatgggtgtgacaggtcagtggctcatggagcgggactgtgcctgcagtttacccggctgtaggtgggtccaacagaagaagcacctgaagggtgatgattcattgcacagagtccttgctgggttccctgaagggggagtgctcctagtgtatataatgtaggaataaaaggatagaaatctcgctgctggcaatgggagcaacagctgcatggagacgcctgtgctgtgaggccctgacccgcagcctacagctcccacacccccaaaccactctctgcgccatactgcaaatactccacttgtgggcaagaagaccaaagtggcctgaagacccggaacccaccctctgctcctgccaggacacacaacagccaagttcagggcacaccccacgcgctgccagatcaccgagcgacctcaagcttctcattgtcctgtgcctcagtctcctctacaagtttctcccatctcacagcatcacagctaatggtgtgcttggaagggtttcaaactgtacaaagaacataaacatgagctactagtattgatcatgaataacgaataacagtaataataagagtcagtgcaatactaagggtctaggccctggacagagttccagaaacaaagatgtccctccctggtgactgtgtgtctccagcatcatcattcactgcctgtaataatatttgcagttccctgggtccccctgcaagggacgccaggctgggctgggagccgtcctcagactggcttgtgctgtctgcagtgattaacttttacgaagctttttttgggttcgtgctaattctgtgttctcagcatgcttcagccacgggggaaaaaccaacacagcttctatctgctggactctgccgtatcctctgcagaggtttgtagtccgatcattaactcgtggcttctcactcagctcatcaagcagagctggccttcagaaggaatggctcccgtgcagacgttcactcgctcatctctgaagctaaattaaaaggcagcagcccacacctccaccgtccccacacttactgtcagcagatgggtcctgctccagcaggccactgaagaccccggggacagcagtgggatgacaggtgtttacttaaaaaaataaataaataaataaataaataaaaagatctgctggcagtatcggatcacagagagcagcagaaagcaaaataaatatcctaatattttcccagttggatcctgaggcaagccattgggtgaagtacccaggcagaaatctagtggttaggaaatgtcttctcattcgtcattaaggagtgtctgcattgcagagggaacggcttttggtgttaacagttcttgcaaatgaggctgaactgtggttttcagttttctgagctgccgaaaagcagaatgggcacatctggacaaatacatcacggagtaaaattaccccttaaataaatacctttaaacatcttgcattttagcccctgctttctgaagaatgggttgatggcttgcctggatgtgttattggggtttgaggttagccatgaagacacatgggctgctactggggccgcagacacaggagaacacacgggcaaacttgactcatgagagaggatcagctgagatggggggaccactggactcatcctagcaagatgttgacagcttctaagaccatcacggagcgggactgtgcctgcagtttacgcggtgtcctgaacacggtgttttcatgcctacacatctttgctggaagcatccttcttctcctccttctgcccctctgctggttaattccactcgccctctttcaggcatcatttctctctctttctgctggccactttcactgtgcacaaacctcttccatcggtggatgatggcgttatgggacagcagactcctcagtctgtgagcagctggaggacggggctctgcgttccagctgtgacgtcatggacatggacactttgctggtgcaccaccagggtgagcaccaagcgttatttatcaaatgcatgaattaatgcaaaagtggcatttctgagctcttctgccactcacgggctgtgtgggttcagggcgctgggcagaacaagagcctgccattcctctagcactgctgcctgccttcctctgggaagtacagacatgaaggaaacacgcctggttctgatcaatcacaaggacctctctcaaaacgaaaacaaggccaaaataaaatcaaattaagtgctaagagcaacaaaaggaacttctcagctctgattctagtctgattcctttgaaatcacgcagaaatgccaccttcttgggttgtgtttgctttccagccacagggagaccagagcaccctgagcagaggcgctgtgtagagaaggctcttattgccacaggaaaaaggcggcttctgctcagagctcgccggacctcagcattctggaatgcacattaatctaatgtgtcatagttttccaaatccatcgtattgttaaaattccaggcatctcacaaggttgtcttagcaagtgcgtaagcccttctgggccatgcatactttggagtggctccactcttggctgagtgctctgtgttgcactgtgtcacctgggggttcggtgtgaagagacttctctttcctaccagctgcagccctcagggtctcccatcccaggatgctgccctgcccacctgcagctccccctcccagcccagcaatcctggttctccattctcccaggcatggtctctggaggaaggactagagtgtgagagtgaggaaatggagggggcaagtctccctcgacagctgtgactcctgtcttgagagtctcactcattcattcactgattcattcactgacttactgactcattcactcacttattcactgattcactgactcattcacttattcatttgctcgttcactcactccctcattcactcactccctcactcactcattcactaactcactcactgactcccttactcattcactcactcactcattcactcactccctcattcactcattccttcactcactccctcacttgttgactcactcattaactcactcccttactcattcatgcactccctcactcattaactcactcactcctttactcattcattcactcattcattcacttcctcactcattcactcactcattgactcactgactcattcactcactccctcactcattcactctctaactcactccctcattcactcactccctcactcattaactcattcattcactcactcattaactcactcactcactcccttactcattcactcactcactcattcattcactccctcactcattcactccctccttccctcactcatccattcactcactcagtagggattcataaagtgcctcctttgagccaggccctgttttagagctgtgggatacacctctaagccacagattcctgatcttgcagcttacattctagtggcaggagacagaaaataat

SEQ ID NO: 1882557 - DNA, 4001 bp, Homo sapiens; identical to SEQ ID NO: 585753

SEQ ID NO: 1882558 - DNA, 4001 bp, Homo sapiens
aggaccagggagggaggaacagggaatgtgtagacacagcctgagaccactctggagaggggagagttaatggtcagggatcatgagttggaggcagcatcgtaatgacaggatgccaccaagtgttaagttggtgttcattgttggggctggaggaagctggtctgcattccattcagagggatttggatcactccatggagatgagggtgtggcctggattattccaatggggcagggatggacagggaggctccatgaagagtagtgaaagggggtattgtgctatttgagggagatggaggaactgatgtgctaaagagatggaggtggagagtactggattttcccacctgcctgggagggtactgggacgaggggatccagatgagagggatggcctgtggtgacaggaatagagtggcagacgacctcaggttttcaccatgttgtcagcctccaactcctcctctagaattttctaacagatttacactcagagcctggtcgccccccgttagcccagattcaaaaggtgaacatctgtttgcagaatctgattcatgagaaggtgagtttattgttttcagtttagacttttgggaagttggactagagaggggagttgttggggtcagtgctggcttaacagaaaacacagcgaatttcccctccagttctccccaagtccactgaacaaggctagttcctgcaccacccaggattcaaaggaaagacgaagggagcagaacttgtggcagcaacaggtaaacttcaagaaggagggcaggagccccaccctacagggctgggaggagcccagaggccccatctgtttctcctccaggagttgtcaaggcagcagaaaggagtcacccagccaaaggaggagatggctcagcggggctgcaccaaggggccaagaggccctacccgtgtctaaaccctcctctcactcccctaagcctggtgaaagagtcagaagccccaggctcctttttctgtttcttaactcaacagctaaaaaatggctccaggtagtgagtcaatgaagttcagacatgttggtgtaaagtttctcctctgctcctgaaaacttcatcttcttggtgtctcatgtcctcattctcccctatatgacatgcaaaaacgatctttctttgaaatccctctgggaagaagcatgtttattgaaactgtccttcagccttaaatacaaaaataaaactgaaactgctccagaaagcagctttctccaaaaatgtctttggtttgtttctcatagggttaggaaaagtgcattgtgggaatatccattgccctctatcccagtcttgcagggtgttttgttttgttttgtttctgagatagggtctcactgtcgctcaggctgtagtgcagtggttcgaccacaactcactgcagcctcaacctcctgggctcaagtgatcctcctgcctcagcctcccagagtgctgggattacaggcgtgagccactgcacccagccccagtctcgaagtttctaagaaaggaaagggatgtgatggagaaagaaaaccttcattggctgggcacggtggctcacgcctgtaatcccagcactttgggaggccgaggcaggcagatcacctgaggtcaggagtttgagaccagcctggccaacatagtgaaaccctgtctctactaaaaatacaaaaaattagccgggcgtggtggcgggcacctgtgatcccagctacttgggaggctgaggcaggagaatcgcttgaacctaggaggcagaggttgcagcgagccgagattgcgccgctgcactccagcctgggcaatgagcaaaactacatctcaaaaaaaaaacaacaacaacaaaaaagagaaaaccttcatcccagctaggagaggtaaggtcctaagacctatgtgacaaatgtgtcccaggtcttcttaccaatggggcaggttgaaaatagtgctggagacccatccctttagagcccgttgtgtcaccaggaggccaggcctagcagaagcagcacccctccaactgtgccccaccaggggctgcccgcagccagccctgccccagccctgccttgagtcaccaatgtgaagggggaaaaggcaggggtggccgtggtgaggatcgggtcagatgagccggtaggggtggtgtgccggtcctgtggggaaaaggaagagaatgacagggtgtgctagagctgtactcaaattaaacctacaccaccctccccggccttgcccaccctgtgatggaaagtagtggttcctcacctgcggggctggggccgataccaggagccggaggaaagcatgagtcgggggtactgggttggcttctcgtccccctgcagtcacagtcaccatcaccacggaatccggggccgctgaatctgggacctccagccacaggcggccccaggccgactcattcagttccaggtgagccctggagagaggatataggcgtcgctaaagctccaggctgcccagagcctagagtcgggacgcctgcaggggcacgggagcggagaggaggattctgagggccagtcggagggggacaggggcagggcttgggataagcattggccgggcaagatgccagagggagctggagggttcatgagcctcacctggagaggttggaggtgagggagaagctggggttgacgaaagtcctaaggtcaagatcctgagggcccgagaagctggcgatgcggagactgagcgggactttgctgcccggggccaagaaacccgaggggccactaagctgcagagaagggttcttcagggaaggggccgctctaactctctccagccccagccgcactttcccctggcgtctcacctccagaaggacagggactacagtgctaggctgaggggcagccctgtgcaggcgccgccccgctgcgtcctggccaatcagctccagggagaagggtctaggggtggacagcagcgtgggcgacagcgaggctgcgaggagacctcgctccggaggtcccacgggctccaagggcacctggcctagttcggcaccctctgggacccctcgaaggatgacgtgggagaaatgcggctgaggatccccaggattggctctggaacccaaccctgtcacttctaccagcagctgggtctgaagacctgggacaggggcgaggaggggagaacattgtgagattcggagacacagggagaaaagaattaatggccttcaaaataggggttccctctggggagtatggatgggaaaataggttaccttcgaggggtattgatggggagcatcaggagggagttctggggtgctggaaatgttctatatcctgaactgggtgtattatatgaaatccatcaaactgtacactttagtgcacattatgtaaattataactcaatataaaagttatgcatatgcacagatgtatgtatacatatatacattatatatataatatatatattatatattatatattttatatatatatataaaactgggggttaggtgggtgggggctcagggaataaatgtacctgcaactggctgagtcagggggtagaggccagggtggggtccatcctccatggggatcccaaagtggaagaggaagtccagggaggtctgggctgggaaagggcaaaggcagtcagagcccttcctgaaaggaatgtgactgatcgtgttctctgaggcctgcagtctctgcttccccttcccaggaacacctccctccttaccttgcactctcaccccaggggtgtcctcagctgtgacctggatctcccaggttcctgtctgtggagggtcatccatggtcaccatccagaactgcccaaagcggcgagtgtgacctagaggacccccgccttcctcctggccctgggagacccctggggtcagggaagagattgtcacatgaagcacttgctctccttgagtacatcccctcgattgtctattccccg

SEQ ID NO: 1882559 - DNA, 4001 bp, Homo sapiens
attagatgtagaaatactctccttcttaatgacagcccgatgctacagcaagcaagatcttgtgggtctgaacagacgttcactagcctgctggctgtcatcacaaaggacgactgatgatatttttcctaatataaagcttaaaaagttaaatgtcaaaccatatgtcacatttaaatatatatttcgtaaaaagccaacaagtttgttattgtggttttcagatagaaattgttcttggagccctgttgggtagccatgctcacagcagcacagtctcactaaaatgaagtacagactccctcaagttcaaagactgtgtttaggctgccaccaggagagagatgcttagataccttagcagcaaatcctctttaccttgcaggctttttttgttttgaaatgaggtaagttgtgcctcatgatcattttaaattcgaaaagctactaaaacatattgaacctagcatggaataaaagaaggtggtaatcaatgtacttcagctccaataaactttctccacatttaaataacattacttatattacactttcactacagagataaaaaatctgaaataggaactataaataggtaccagttgttaaatattgcttttatttatttttttaagacaggtctcactctgttgcccaggctggaatgcagtggtgcaatcatgactcactgtggccttgacctccctgggctcagaagatcctcctacctcattcccccaagtagctgggactacagtcacagagctaccacgcctggttaatggttttttttttttttaaatagagacgggttttgccctgttgcctaggctggtcttgaactcctgggctcaagctatctacctgcctcagcttcccaaagtgctgggattacaggcatgagccatcatgcccagccttaatattgctaatctcaataagcatttagctgcacaaggcactgttttaaaagccaagaggggatgaacagaaataagacaaatcctctttggtctcttattttgtgtaaattgaatcatattctttgtaagtatggggaatattcattctacttcactcctgttgtcccaatgtaattattaataggcctcctttcacagccaagtgttttggatgagaaatcatgtggtcgccctatttacaaagaatatttgtaatcaaacttatcataagctttccaaaacaatgaaaattcccttagacagccaaggccatccaaatcttcagatatttttctgacaattttctgattctgtattctacttatctgcctcatgcattaataacataatattctgaccagagattagcactggattccattttctctacttcattaattgctttcatgtaaaacagtctaatttcttcaataagattaatatgcccctgaaaatagttttatacttctgttgtctccctctcaagtatggcatagtgggcatacacagtgggctctcaataaatcatttaaaactcataatagttttacattaaattaaggatcattctaagccattacaataatgttacagaatttaacataatcactgagggatctttgaggaacaattcagaataaagtcaagtaaattcaaactgagggattatagcttgagtagggaactaataactgtatcctgcattattacggtacgtttgcggggtgaggggaaactaaaaggaatccacttctatgactgtcatgaagcccaggagttctggagggaactgcattccattctgaattttctggttacaatccctgtcttctctcttcaacctcaactgaaaacccatactcaagaggcctcaatctgtgccctcttattcttggcaaatggcaaaaccaactatgtaggaggctttttcagaggagaaaacgactttgtttttccaaaagacaaaccctccactttgctttatgaggcagatagcagccccaaaccatggataggttggggcctgcgcagacctcaattattacggtattttacagtttataagacaaagagcttccccacacattaagacacttcagtcagaagatctgaaagtttggcccttccaaaaactgagcgccgtgcctttaaaccactcaagtttcctaagcattagtttctttctctgtaaaagaaggccaataacactggtcctatttccttcttagtgatgaggtacagtgagaaagtatagaggaaactccttgaaaagcatagagaaatacgtttaaaaatttattcagtgtttatggaggggtgaccacctacacatgccaggaattacctcagacaatggtgttacaaatatgtgtcgctacaatcattgagtcaaacagcttataatttagagagattttcaaagaattacagtaagagtgaaatgagctagacccgaagtgtacatgaggtacaaacacacacagaggaaggagcacctcaatgtggtttaggcgcctgagagagatgcagccgaggaatgagtgggaaccgagagatacttgggaaatgcaaatgaagtggagaggaagggaagggctgggaccagggaacaaaagagaagagtaatgcaaggatgctgggtagaaacagcccagcatacagcaggctctggggcacatgttgtggctgagagaatgacgggaaggaggatagcaagggaggcaggagtcagatgaattaagacagggtttcactcttgtcgcccaagctggagtgccttggtgcgatctctgctcagggcaacctcttcctcctgggttcaagcaattctcctgcctcagcctctggagtagctgggatttcaggcatgcgccaccacgcctggctgatttttgtagttttactagagatggggtttcaccatgttggccaggctggtctcgaactcctgacctcaggtgatccacctgccttggcctcccaaagtgctgggattacaggcgtgagccaccgcgcccagctaagttttgtatttttagtagagatggggtttcgccatgttggccaggctggtctcaaactcctgacctcaagtgatctgcccgccttggcctcccaaagtgctgggattacaggggtgagctactgtgcctgtctgagttgattattttgagaaagaaaaagacacggtcatgagaaagactgctccaggggccaccaagctcatctcttacagtccatcctctttagatgaacaaaagattctaaatactggaacttgggcaatgtcattggatcacaggaaaagacacatgtgagaggcatttaggagctggaaatcaggatctgattgactggatgcatgaggtgcacaatgcacaaaaacacatgagttcttttttttccacagggggaagatgggtgttggggtgatggggagttgagccaagcttgtaggcagagagatggtcataacaaagcacatattctggggccaaagtgtctggtttctggacctcgttccaccacttacttgggcaatctcaaagaaaacacttgacctctctacgcctcagttatctcatctgtaaaatggggctattattagtgcctaccctatatggctgttattaggattaaatgagtcaacatttgtacagcatgaagaacagtgccaagaacatagtgagtatcatgtcatcgttcatgaacaaatttaaaataaagagactgatcatgtaggtagtggacaagattgaaggaaaaaaaaggaaatacaatctggagcaagatccagaaaaggggcaggaggcagagaggagattcaggtaagaggccagatgaatggtgatatggtttggctgtgtacccacccacatctcattttgaaatgtaacttccacaattcccacatgtcacaggaggaacctggtgggaggtaattgaatcatgggggtaggtcttccctgtgctgttcttgtgatagtgaataagtctcatgagatctgatggttttataagtgggagttcccctgcaca

SEQ ID NO: 1882560 - DNA, 4001 bp, Homo sapiens; identical to SEQ ID NO: 585773

SEQ ID NO: 1882561 - DNA, 4001 bp, Homo sapiens; identical to SEQ ID NO: 585775

SEQ ID NO: 1882562 - DNA, 4001 bp, Homo sapiens
gtaagcccagaatttctcctcatccttgtctgtccaggacctgtgttcctcccagccctggcctccatcctggtcctcctggatggctttgatgagctgatgcctggctgagggctccgcttccccaggctttggccagagagacacaggctctcccctggggacccaactctgggctgtcatcttcagcttgtgtcttgggatgctccaactcaggaaagggtgcctcctaggagatgggagggggtcacagaggggagccctagagtaaaagtatcctgggcactggccagttagaagaaacgttggtgataacacggccagtgaggccatactggtgcatatttgtgaaaggctggcccatcagtcagtcttcccccaaggtgacatatcttcagtatcaaagtcactgctcatgccaggacatcacatcgtggctctcatggcctccccatcccagccctcccagcttctactcgggggttctctctggcgactgggctcaataaacaggaatcgagccacgcccctaagacaatggacaccgatgagccgtccccgctggttcacctgtatttacacacccagtttcacatccagttagacactctgtatcgttattgtctaatcttaggcacacactgtattcctagacccattggtctttccctgccctcccccaaaggcaaaatgcatttagggtcccagagatccctggggagacacgcagcggaggtgacctaaacccaaagcaatggtctacggaggtgacctaaacccaaagcaatggtctggccccctctccctcctaagccttccagctaagggttctgctcttccggggtcagggcaggccccgggccggtgcgctaatccggctaggaggcttcgggcgaggcaggctggagacgccagggcagccccagggcagcggctcctgtccccaagtcctcgggccctcctccagcctcccttcggcgcaggaccctgggggagctcgtccccaccgccaagccgctcgcccttccccgttcgccgcccggaggttcgggaaggagacacacccgggccaggcgcggttgctcgcgcctgcaataccagcactttgggaggcggaggcgggcggatcacctgaggtcgggagtgcgaccagcctggccaacatggcgaaaccgtgtctctcccaaaaatacaaaaattagctgggcgtggtggcacgagtctgcaatcccagctactccggaggctgaggcaggagaatcgcttgaacccgggagaggctgcagtgagccgagatcccgccattgcactccggcctgggcgactagagcggctcaaataaataaataaataaatagaagtcacccctgtccgaacctggctgaactccaggcgttccccacccgcaatgctgcggggtgctgccccaggatgcacccctcctaggagacgtcccgcttcggagatcccagctacccgctccctcccccaggccgcctccccagaagcctccgagcagttggggcgcattcgtgtttgaaaaacacaagaggaagcgcctgcagcgctcggtttcccccgcggggcagcgcgggcgcggggtgcgcgtgggcgggcggccggggtgggcaggggaccgtgggcggcgggcgccgcagggggccccccacccccccatcccccccttacccccccaactcgctctgagcccggggggtgccggcctaggctacaggtggggaggactcccggtggcctggtggaaaagctgccctctctcacccaggcacgccacggacaccagcaccgcaagggctcttttgtgaaaaatgtctccgccagcacgctctcaaaagcttctctctgaatccgctcatctgaggagtccagaggatctgggccattcttttccagtctgcacaaggggagggaggtcagctgcaccctccctgtgaaggacgccgccccctttccttcccgcagccctcgccagaactctctcgggctgcctggcaagcgacagctgtacagtgagcctcgagtgaccttcagaggccaggcgcccacagcatccaacctgacacactgctgaccaatgaacttggttctgccccagtcagagcaccagagttcaatgttttattgacagaaccactagaagctgccttttcccagcctttacaaaactcaggactcggcctctcagcatatttctcaatgaacagctgactgtgccctggaatgtcaggtcaatcgccttggctttgttctttctgttatgacacatccattgtatgggtgtttgtggcgaaactgaaacagaaagattctcactttaacatcctgttgtgaggatttcaggatcatggcacacgggaggtaggactagattgccactctgaccagagcagcatgcagaggctcccactgtgaattttagctccagatccactgcaagaacaaacccgcaatcctgagagggcccacagaccctccgaaggaagcagactgctcctgcaggacccgggagacaccccaaatactgagtgccccaactgtggaagtgggaaagggagaccctcctctccccaacacacactcccactggagaagctgaaggtctgtttgcggagaagtttccgactttacctggagcagagtcaagttggagagcccagcgaaaaacagggggagaggaagcagcagtaaggccctgggagcttgctgggtcccctagcagcccattcctgtctggcaccacagggatcctttgggagggtggcctgaggagcagggggtaaaactccacagggagaaggaattctgtagctgaactttgtaacaatttgaaccccgcgagaagcctcctggccagaactcaggagggggctcgaatccagcgtgcagactccacaggcgtgggaagaactaaagctcttttctttctcagctaggaggtggaaagcctgcgacaagttttcaaaaccatcttgctcttcacctggaaacagatgcagggctattgtggagggcacagtgggagtgagaccagcccttcagtttgcatgggagctgggtgaggcctgtgagtgccagctttcccgcacttccctgacccctgcatgactcagcagagggaaccataatcctactatttacgcaattccagtgacctgggaatctcacccccattccccacagcagccacagcaagacctgccccaggagagtctgagctcagacacgactaaccccgcccccacctgctggtccttccctacccaccctgttagtggaagacacaggacatataatcttgggagttctagggccctgcccaccactggtccctttccacactactacagctgatgctttctagaaatcactacctcctggtaggaggccaaccagcacaaaaatagagcattaaaccccaaagttaaggaccctcatggagtccattgcaccctctgccacctccaccagaacatgtgctggtatccacagctgaaaaacccatagattaacatcacatagattaacccatagattaactcatagattaacccataggttaacatcacaggaatctgtacagacaaccccagtaccagcccggagccagttagactcgctgggtggctagacccagaagagagacaacaatcactgtagttcagctcacaagaagccacatccacaggaaaagctggagagtactacatcaaaggaacaccccatgggacaaaaaaatataaacaatagctgtcagccctagactttccttctgacagagcctacccaaatgagaaggaaccagaaaaccaaccctggcaatatgacaaaacaaagctcatcaagaccccgtgcccccccagaatcacactagttcaccaccaatgcatccaaaccaagaagaaatacctgatttacctgaaaaagaattgaggaggtcagttattaagttaaatcagggagggaccagagaaaggcaaagc

SEQ ID NO: 1882563 - DNA, 4001 bp, Homo sapiens; identical to SEQ ID NO: 585785

SEQ ID NO: 1882564 - DNA, 4001 bp, Homo sapiens; identical to SEQ ID NO: 585808

SEQ ID NO: 1882565 - DNA, 4001 bp, Homo sapiens
agcaatttatcatgaaacgcctacacctaataagctgtttttcttctttgttctgccccattgtcatatgcttgagcttaatgaagactatgctctgcagctgctcctgaaggcagagacgcaagcaatggagtaacaaaggaagcctgaggagcccctggcacccgaggaccttctctctggccgttcacagccacttatgtttcaatgcagaagatttcaagactggtttgagaaaaataatcctgttttggggattaggttccctgtcaaaggccatcagatggacagctatttatcaggcaattagcctaaggctcttaggtaatgataaaaaaaaaaaacaaaaaaatcaaaaaaaaaaaaaaacagaaaacaaaacaaaaaaatcccttatattttcctattggaatcttttattctgttttattgaggcttaagcaaaacagctttgcccataactcactgtggcctggagttatgacaccaacttgtatttggccaactaagaaagaggccaaactgcattcttcttagaaggtctattcagttgataaatggcactaaactgttggtttttttcatataacctttactcataagttgcattgattatgctctaagagataagggactgatggtaattcaaatgggcacctctgaaaagatttatcagttttctgtcccgttccagccagattttttggaaaaccttggggaaagactgaaattccccaccaatctgagactgtatgcgagtttttacattaattggaaaaaaacaagaatcccaacatggcacccagtggacctccacagataaaattattgaccaaatgagcactgtgagtcgtttctgtaggcagatgctccttaatgggacctcaaagcccgcaaaacaagacattactgagtccattctggaaaagaatgggcaccaagcctcgataatactctccaattccatgacatttcagtgccttgaaggcctgataagtgttggtaaatctgtcatgatgcttgtggtcttgaatcaacgtctgaactatttccggtggagtgaaaattgcttctgttgtccctgcgagcactgccgccatgcaacaggttgcaaactctggagcactgacatgcttgtggagaaggcaggataaatcctcatagagaccgaacgtaagtgcaagtgtagctgtcttctgcatcaatgggggaaggattccaggatacaagtttcgaaatccatcccttctcaactaaaatattgcatcccgggttttgatgccatacagctgttgtcgaaagaggaccgtctgaatgggatatgtgattgcgatgttgttgaaggctgcgcagcagccacacaagtaatgcttcatttcaccaacatttgtaatacgaggtgatatatcttgttctgaagatgttagtgttggtggcctcttttcatgagcttctgaatccatcgtgttgcttaaggtctttcattttcatgaaggactaactttttttaacctgtaagacaatctgagcctggagtttggcaggatgatagctttttgataatgttctcaatttcctccattgttattgttctgttagtttctctcttctggagtcaattttgataactggatttccattctccaggcgcccatctccccaacctgtgaaaagcggggagggggttggacaagatcactaagtcctcctccgtctgacactccacagtcaaggggtcccgaggtcaggaggccgaaatcagtctccccggaaacagggccccttgcgcggtgccagccccgctctgccccgggcgcaggcagagcccggctcctccccgcccctgcggtttctgcgcaccagggaggagcctccccagaccggggcgtgaccgaatgaaggcacagcctccttcccgggaaaggtcgcccagcagccggataaacacccgcaacaggcgggagagccgggaggcgaggaggctcagaactgattctgcgcgcgccgcctgggtggggtccacagcgactgggccagggcagccggcgcgcgcagaggactggggtggacccctagagcggtcggctgcccagaccggccctgttgtgttttttctaatcctcttgttgggaacaaacaagttcgttgtagggtgaggtaaggtaaattgcttttacctttctctcgttgtgaagtggatctcaaaatactggtgtttggtttttactttgtgttaaatgctaggagaaaccttaaactttgttggctcagtgcttcatttgctgcctaaattagacaagatctcattaggatggaaaatgtgtgcctccctcctcaaaaaaaaaaaaaaaaaaaaaggttttgaagctctaactcccagcttaaatatatttgaagatggagcctctaattaagtaattatggtgaaatgcggtcataatggtcggactctgtttcgacaagattagtgtctttataagaaaagacaccagagaggtcgctcactctcttagtgcgctgaggaaaggccatgtgaggttacataaaatggaagccagttacaagtcaggaggcgaggccttggcagaaatcgaataaacaagcaccttgatcgtggacttctagcctctacaattgtgagaaaattgatttcttgttgtttaggccatccaatctgtggtattttgttatgactgcccaagaagactaataggatcagatgggcttaaaatactatcacaggatccttggggtgtcactgtgccagccagaaagctgtgtgggctgcagcatctctgtgtgagtattgcttgcgccgctgggctccttttgcccggcccgctaggcttagcaggctgcgctcctctcttgctaccggcctggatcccacgcctgctaagggagagccaggcacagagcaccaggggaggggtgtgtgggtgagcaagcatggggtctggtcactgcgcacagccaggcatattttaggaaaatcataagttaattttagccaaatattatgctcttaccatggagtgaccatggaagccaagaataatactattgataaaagccttgtggatatcacagttaattggtatcagtacacattatagaaacttaatttatcaaagaggaaataagaatatatataagaaaataacaaataaaaaataaattaaagtgtaacagattattaatctctgaaatacggagacaaagaggttttctatgttacttctatagacagataataaaaaggatttcctcatggaagttttctcttttgtgttctaaattgaaaaatcatcttcagatcaaaatattcctgaacttggcagtgcatttccaaattgttcttggtgaaattgtgtcagttagagagatgtatacatgaattaaaacatgaagaaagctctgtttggcggagagactaataagactttaagagaactgcagtaggtaaaaatggtgtttctaaaatcaagtgtcttcagaatctggtcaaagaccaaccatcaccaactgtagtgcagagaaacctccagcactgaacagaggcaaccaagtaaattcatagccatacacataaaagaaaggtgtgacttacaggccataattcggcaattcctgatctagacaagtataaaacaaataaacaactacaagacataggaaactcttcattaagtttgaaacattaaggaagacaaaatttacctagtaaggattaacacatgatacgacttttttatcttacgagcactggggccatcttaagggacagacttcttggatctatgcccactctactctataaactccttcttaaaaagactcaaaacaaaagtgacaaggacaaacagagagaaaagttagagtgttgctactgacgtgtttttaccaaagataagagttttcaattcatgagcacataagcaaatgatttatagaggagtgattcctccattctcaggagataaactcagccatcagtttga

SEQ ID NO: 1882566 - DNA, 4001 bp, Homo sapiens; identical to SEQ ID NO: 585824

SEQ ID NO: 1882567 - DNA, 4001 bp, Homo sapiens
tatcagtaaccttccctcatgaccatacttaataaactgctattattattctattgtgctccttattttctgtatctcattcccccatttctcaacttaagcatccaggctttcaaaattatagttacatcaaaactaaatattccatgatttgcttagtaacaattacttctaattcctgtctctccactcttacactgatccaaaaacccttacattgtaccctgcacaaacccgaaacattcactcacagtaatttgattacaaggctggttagtggattttccatttaatgctccccatgttatttcaggacctatttaaaagtaataacaaaaaggaacataatccaaaattacatgttttattttcatgtttgtaaaacgaagagcttttttctggatggttttcttatcagcttttcacacaacagtcaagtaaacctcgtggcactagccctagaaaaggaaaaacacgagattcttacaagactacaaacattacaacatatgtaaaagcattaaaagtattaaaaaaaaatattgtccttataacggtccatctcagaagccagatccgtaaaagtttttttttttcaacagaagttcaggttcgggataagatcatcacagataagaccaaggacacaatattcactgatctctaagcaaacagaaaaactccacttacagaaatcgttgcaactttggaacttccaagacaatctggcctctatcaatgggcagacagcgaccctcactgttggcagaaaaaaaaaaaacccaggattttataacacaactgttataaaatcacggcaacaaaatttactccacctctgaattactggtcttaatctcagaagccgaatccgtacttatttttcttcaggttatcagcttcgggataggtttcatcattgattagaccaatcagaccttgtatatgtacacataatacattaaactgcacttctgtgacactgactacaaaccaaggtaatgctaaaaggcaagtattatagtacaaatactacagaacttttaagccatacaacctacttcaaaatgaagctgctagtcagtcacattcgacattcattatcttcactggctactcgtccacactcagaacgctgttcactgacaaaaaaaatttgatttagtctaggtgtggattaaatgctatgctcaatcataaagtactaaaacaacacatacctgttaaaagtgtcaggttttaaccaagcgattttccattaaatattctcccagatgttctggaagttttttcgtgtatctaacaaaaaaaagtaaatttcaaacgatgcaacagttcctattcctgtaaatcaacaggtttactcctttagtttggaaactaagcttaactaagctcttacctttgcatcttcagagctgctccactgtgccactgaagacagcgccattgttcctgcgggaaatcggtatttaagcattctcgcagaaatgtcacactccaaggcgtttttccacacaaaacccttccccttcattaatccgaattgcacacaacgccgccttcgaacagctcagtttcaatacagggtcgaggcttcccattttaaaacaacgccgacggaaggccttcgccattttagtaaaggccctttgctgttaaaactaaccctccgccccaattaaggtggtttttccgccgccgctcaggcacatgccggaggccagcaagttcggcgcccgtggccgatcagcggttcctcacgccaaaactcggagcctgtggccgtcacgactcaacctcagtacatgtggcagtccggccgcacgtttcccacgtgcaagctttcaactctcagcactctaaactcttcactaagatgtcttcacaggattaaagctcttaactcggcctgcgccaccatcttttgctcggatactagcccgcaatacccactcacctaccacccgcccagacgctcgcgaaggccgacgtaaaagaccgaagtgcgcagccagtagctccttatatagcctcccggagtcagaacgaggccgtcccgccctctcgcacctattggacatggaagtagacaggggtgtggtcgcgaattagcgggagcgcgcgcggtggctcttctgaggcccgttccgcgttgtggagcgcgccgcaggccggccgcgcgcccggccatttcccggcgcgcgcccgcaggcgcactgcgaagcgtctcttacgagtctggcggccgacttggccctacgtggcgcgggtgtggcgccagaattcaaacagctgcagttggaaacgacgctttcgcctgccacgagccaagtccgtccaggacagattgggtccgagagtggacacaagttttgcagcgcagggcggcctcagcttaggaccgattcgagaagctgggctggctggctggctggcgctgggctgtagtgggcccccagcggaggccgccggaggagcgggcgagccctggccgcagcactccgggaaagggcagttggctggcagaaacgcttgggtgaaaaagcggaaagcgccacgtgagaacagccccggcgtgcggccctgcagggcctcagggcgggcatcaaggccccatggggatccattcctcctcacgcttcctcgtgccaggcatccggttacactaaacgtgaccatacaagtctccctcaaacagcgaacgtgaggttcaatactccatttcgcagaggagaaaactgaggcttaaaacagccaggtaatttgcctaaggtcacacagctgaaatgctttgctaatttttaacttctttgtactcaattagttatattgaaaacgagagaaagattaatttgagaagtatccctgaatactttatccagacgacaaacacaaaattcaaaagcagtgctttgattaattagcatgttcgagtgaatatgtctgcgtgtgtgtgtgtgcacacgacatttgaacatttcagtatttgaaaattcaggtcgttcttcacttctatatttcaaagcactacttattaaagttgtttatgtgtgcatttgattacggtccgattctgctagagtgtgggagcaacacatctgatttcgtgctctgctgtttattttttcttagaacagtgcctagcattaagtaggttgtcggtaatggttaaatgaatgaatgaatgaacaaatacattcggtggctttttagaaaattagaatgaagatcaaacttcacattcaaagatagtagtgaaaagcacttttctctaacaggaacctatatgatgaagtattgactgggccgggcattttgtcggtttttgtattactttgtaatgtcttacataaatttgcatattgctcatagtaaatagtaaaacaaacaatacagtacaaaaggatataagaagcaaagtaggccgggtgtggtggcttatgtctgtaattagagcacttttggaggctgaggtgggaggattgagcccaagaccctgtctctattgtattaaaaaaatttttaaaaagagttaacaaaaaaagcaaagtgaaagtatctttccacatgcctgggaatcttctccctagttgtactcttcagcaataccactgttaacagtttttgagacttcctatgcaaatgcaaatatatgtacttcgtttttcacatacaaatgggatctatatgttctgcaacttgtttgtccgtcttgtaaatatcataaacatctttccatatcagtacatatagatgactttttttttccagacaaggtctcactttgtgacccaggctggagtgcagtggctctatctctgttcactgcaatctcgggatcaagtgatccttctgcctcagcccaccaaccatgtgggactacaagcacgcgccatcacgccctgtaatttttctgtatttttcgtagagatagagtttctgccattctgaagaccacaaacatcacctggtcaaaagccatataaaacagtgattcc

SEQ ID NO: 1882568 - DNA, 4001 bp, Homo sapiens
aaatactagttactaggactgagttcattacttcccaaggtttaaaaaaaaaaaaaaaaaaaaaaaaagacattggcttacttggcataaaaggaacgaggtaagataggcagggatgaattttcacaaaggtgtaaatttattcctaagcagttaaaatgaaaatttgagtttgaaagggtagcatgctgatacattaagaggaaaaagacaagtttaagattttaaactgtgtccacagaagaataaacaatctaaatcttttctcccccgttaggtcaatattgaaggaggggctatagccttgggccaccctcttggagcatctggctgtcgaattcttgtgaccctgttacacacactggagagaatgggcagaagtcgtggtgttgcagccctgtgcattgggggtgggatgggaatagcaatgtgtgttcagagagaatgaattgcttaaactttgaacaacctcaatttctttttaaactaataaagtactaggttgcaatatgtgaaatcagaggaccaaagtacagatggaaaccatttcctacatcacaaaaacccaagtttacagcttgtactttactttaatgtgtaatactcaactcaaggtacaagacaattgcatttaacattgttataaataaaaggaacatcagatcaatcattaagggctccagagtgaacagcatcttcataacttccatgtttatcatctttactttctggatgtaatttaataagatcatcaattcgaagaatggtgattgcagcttctgttgcaaatttcaaactcttaactttaactatggttggttcaaacacccctgcttgtttgttgtctcgaggtttaccattgctcaaatcaagaccaatcctgcaattaagaaagaattatttaacggccgcttacaatttcattaggtggcctattaactccagcatttcattcaagtattaaggttgatttttaaatcagactagagatcttgtaggtagtctttctaccaaaagaagcagggagagattagcaatcacagttaacgaagacacaccagtgctaataattagtcattatcccttgaattacagtgactgaacaacaaatgcttgctgtgaagtttttcatgttaagtatttgacaagtctgttacttatgtttgctgacatgtaattgactactatcctttttaatgcaacctgttctgcagaggttaacaaagagcgggaaaccatgcttaccattttagatttttacgttctgggttaacctgggcctcattatgaaaagctcttaattttgcaaccagatctgtggagtcctgggcagcattaactgctagtgtattgggaataacaagaagtgatcttgcaaactctgcaatcgcaagctgttcccgagacccctaggaaaagaagaaaattaggtgacttcacaaaagggaaaaaaaaaattgaagtccacagctactgctctcaggcctctaagacaagaaatgactgttcttaccatgctggttgcatagttttcaaggtatatggaaagggctgcttctacagcacccccaccgggaaccacagattttgactccaaaactctcttcactacacaaagtgcatcatgtaaagagcgctccatctcatcacacatgaaatcatttgccccacgtaagataatcgatgcagacgtacgagccttagtactgttcaaaacaaaagtacaattcttgtaatagcatttttaaaaatttttttttgccaagaccatcaatttctcaaaaaaaatggcattttaataaaataagtctacataaagttcccttaagtcctgcctacacaggatatttagatatactatacagaaacaatgtctagtccctgcagaagagatgaaaatggttacttcatctcaatttacagtggcccaatgttattttatcccatgcgtataactgctcgtatcactgtgagactacaagcagcaaataaatgggaagaaaacctacttttacttaacaaaatcggtataactttacaattttagaaagtggctcttactttttgattaagatcagctcatcatcacaaattctctcctgtaccacttcttctgcctgtcccaacattgcagcttcaaaagtttcttcaccttccaaattggccagggttgacagaatagttgctaataagagagttacaaaggatctgtgaatattgctctttcatgattttaatatccttggactcagtagcatttgtggtaaaagtgctatattacaagtttagaatttagttaggcagcacacggtaactccttttatcctaagatggaactgtcattttagaaatgaacaaattcagttcacaaatttccaacaaaatttctccagttacatgaaaaatggctctataaatgtgttggtagcacaaagcattaagagaatataaatgtttttgagctgttttctgtcaatattccaatgtaaaaagacctttgataggatcagggataataaaagtattttatgtgacagccagcacaagacatacctccagaagctttggcaatgcgtttaaggtccctttttaaaactcttctaactgccatagcaccagcctccacaaaatacttcagacacatatcatcaattccaccagtggttagaataacattggcaccagttgccaggatcttctgaattctctccttggtgatatctgattctctgcaaagtatttttgtaacctgagttaccttctgtgatttttaaaaataatttaacttccattaagtatttatcacaagataatcatagatcaaattgtattatcctttgttatctctgaccagaatttaaattagtccaattcatggaaaatttgaaggaattaaaaattaccacttagctctccccaacccaaatttgaattactaattgagaactatggttaaacagggaacacaggtcctgccttcaaggatctagtggggagagggattaccaatcacactccagggcaagtgtcactaaagtggtatgcagagattacaagcacataaaagacataaatttagcctaggaggtggacaatgaagatgagtccaggccaagtgcagtggctcacgcctgtaatcccagcactttgggaggctgaggcgggcagatcacctgaggtcaggagttcgagaccaacctggccaacacggtgaaaccgcctctactaaaaatacaaaaaattagttgggcctggtggtgggcgcctgtaatcccagatactcaggagactgaggcaggagtatcacttaaacccggaaggcggaggtcgcagtgagccgagaccgtgccactgcactccagcctgggcaacaagagcaaaactccgtctcaaaaacaaacaaacaaacaaaaacaggagtccagagttgaaagcacaaaagaaggcagaaccagaaaagtgaaaaaccttgcaggttacaccaaacaatctagatactaagcttaatatctctaagcaagactagtatatcatctgtgttttcaaaaggattccctgattatcaatgtggaaactgcactgaatggctgaagacaagaagataataacatgagatataagctgaaagacaacctaaacagaaaagtcaaattttatggcttgggtgactcctggagtaaaataaataacaagagttttgggggcaggatgggaaatgagagtttagttgaggacaagattaagtttgaagtctctgctgttactcaggtgaagctcccaggaggcagtcacttacatcatggaaaccataaactatgggagatccagatttgaagagtcaatatgagtgaagccatgtgaatagatcattcgaagaatttttaaagtaaaatgaattacagatcaacctcaaaagcagcttgtctactaaacaagtactgtgtgctacacactgttatataaactcatggtaaaaactgtaataagccccaggaagaaaa

SEQ ID NO: 1882569 - DNA, 4001 bp, Homo sapiens
gtcttttacatctttaatattaatagactcatacaatcaaaattccacaaaaaggccgattttcatataggttgtataaccccaaatccctctaaaaacaccaccaggctaatttttctggaagtaaaatagtttgacttggctaaaaatgttaaagtcctccaagacactcacacttaaaaggccaaaaataatctctcaacatacctctgtctaatttggtccagtttttcagggtctgtaatgaccacctgtacaccaagcttcatttttgttttttgcaggctgaagtcaaggcaagcaatttttgcatttacgattctcttgggcatgcctacaattgaacataagattaagttaatacgtctatccttaaaagcataataaagagtacctataatcgattgtatgtaaacacacaaatttagactaattcattgcattttatcttagaaaaattttatggcattaaatgcacgtaatttcttttaattcacattccttctaccatgttgtatgtgctttaaattacaaaaagatgtactgcacataatccacaaaaaaacattttttatttttttttttttttgagacggagtctcactctgtagcccaggctggagtgcagtggtgtgatcttggctcactgcaatctccgcctcccaggttccagtgattctccttcctcagcctcccaagtagctgggactacaggcaggtgccaccatgcccagctaatttttgtattttttagtagagatgaggtttcaccatattggacaggctgctctcaaactcctgccctcgtgatccacctgactcagcctcccaaagtgctgggattacaggcatgagccaccgcgcccagccaaaagaaaagctagttttaatctgtagcaatctcattctataaaccaaatcccaaaccttaccctgggatcccaccacacagttgagtgcatagccactgatgagcatactctccatttgacttctcccatgggctttcaaaatattaacagagttgactggatagcgtggctggcctcttatgtctgtgtatttaatagcaagtacagcatctactaccatgttagcaaagaaatcaccatttctacgccaaaagttaaggacagtaacaggtttggaatggacaaagggtacacacgtgaaaaatcaagggtaatttcaagggacttccttttagtaatctaatctattaaagcagcaagcattacttgtcaccaaaatgttacaacattatcactatctgcaattcatatcacttttagacatgctttttattaccttttcaccctaaaaaagcagggaaggcaacaggtaatttcaatacagcattactcctctctattgatatcaatttgcataaaattggttattcaaaattttattgcacaaaattgatactgctgctactacgcacgcgtgcgcgcaacacatgcgcacacacgcacccactcccgagacagggtcttgctatgttgcccacattggactggcactcctgggttcaattaatactcctacctcagcctccttagtagctgggactacaggcacataccaccatgcccatctcaaagtcttatgctttaaaaagtctaaattttatctgacaaccacaaggatacattccaatgattttggaagacatggatgtcttagcagcattaatcaggcaatctcttcccagttcatctgtgttaacaattaggttttcattgatataacgcactgcttccctgtttaaaagtgtgggggagaaaaacgcttataaagtcactactcaaactctttgcattcatcatgcttaacacagagccaaaatgtcgtaagtaataatatccgttcagccatttcatataggaggaggacatgaaaaaaccctccctcttcagatcatggcaagtttaatctatcccataagcatagccactaaaatctattattaggagaaaatgtggtagtcaaatgagaaaaaagatactggtccaagtttttaacttcaaatattactacttaaatgctaaaacatttaaattgaaggttttcaaattaaaatttagttattaatcaaaacgttaagacaacacagtttacaactattacatcaaaaaaaatttctctgaatgcaaacaatcttacttgcaagcaagtcgatagccactaataactgatgtgggatgaattttctgtttgactaattcatctgcattttttaggagttctgctgcaataataacctgttgagaaaacattcactggtctgagtgtgccggatattcaacatgtgcaatacatatggaatgacactaaaatggccatatattattaaccaaaatggtagtgatgaaatgaattaactggttattagaaacctgggcgtgaagggagaagaacgctacaaaacactccaagtcctccacgttactcataaattcttggaaactgccactttaagcaaaacaatggacagcaatttctcaaatacagttgtttattgtaacgctgatggggggaggaaaacttgtttttttatacatcatctttcctcttaaagtcagtttccatgaagccactgtggatgttcagtgaggtcttattgtattataaatgcaaatggccaaaactgggtaggagccagaaaaatgttctaagaaactagttcagcaataagaaactagttcatcaatacaaccgtaaaagacaacacatctattacctttagaaaaaatgctcaacagaagctaaaccgagtgtgactattcatatgacctatattaagctattattttatttaaaaaagatagttcttcaagttgataaaacactaagaaatatttttaaagcaaaaagactgtcagcttcttatggaaggaaaactacatttgttaaatcacattatcgtaagttagacaaagatcatattcatattttaggagtagattccattctttcatggctaaagtttaatctagaaatacattttccccacaaactatctagtttctccagaattaacatctttctcaccaaacaatagtgtttctactataccagcatgctggatgatctatgaagagtttatactgtgtatcacatttactgactcggtaagatcacactgtcatatcatgatgtatttattaatttctcacactcccattttgaattcctgagattacctgtcaggatttaaaaaatagaacaggctgagtgcagctcatgcgtgtaatcccagcactacagaggccgagaagggaggatcacttgaggccaggagttcaagaccagcctgggcaacatagcgagaccctgtctcttaaaaaaaaaaaaaagaggtttttaattagttgcttgtggtggcacatgcctgcaatcccaagcactctgggaggctaaggcaggaggattgcttgaacccaggagttccaggctgcagtgagatatgacagcactgcagcacttcagactgtgctacagatggtctcttaaaaataataatataaaaacattgtttctcccccagattggtaacattttatcctccaaataatcagaaaagttgagagctttccaagtctcaaggggtgatgggggaggaaacaagacttttgagagaccataaaaaaatctgtgtgatgtctgaatactgccataaaaggaaaaataagccctcaaaacttgtgaataccaacatttaaaacaatggggctatgtcaaatgaactcaaattctttcctacttaaactgtacaaactagctgtaactatcaacttacaaattttgtttctgaatctgtacctaagaagcttatttcccctcttaaatgtgtaacttcttttgttttttcttcttgctcaatcttctgggcattcagaatatgtaacttatttctgacacagcacaaatgacccacttatggcttcaactttctgaaagtcggtcgtttttagaaaaatgatcattctttagccagt

SEQ ID NO: 1882570 - DNA, 4001 bp, Homo sapiens
aaagtctgaggatggagacattttaatgacttggagcaaacacagagcaacagtaagggaagatgcagagttcaaggttagatttggggccaggtacagtggctcattcctgtaatcccagcactttgggaggccaatccaacacctgaggtcaggagctccagaccagcctggccaacatggtgaaaccccatctctgctaaaaatacaaaaattagctgggcatggtggcatgcgcctgtaatcccagctactctggaggcagaggttgcaatgagttgaaatcgtgccactgcactccagcctgggtgacagagtgaagactgtctcaaaaaacaaaacaaaaacaacaaaaaaacttgggagattaacattccttctgactttggtgttttgcagctgagatgacagtggacatggaaacaccaaaacaaaacaaaaaaatctgagcctggacaatgtggtgaaaccccatctccaccaaaaaatatgcaacaggcactcaaaaatgtctacatagattggtcatacaaggaaactagaattcaaagtgaactttcctcagaaaagccagagtacatgaggttgacaatttcaatgttaacacacagttccaggttatacacacttcagaaaaaatctctcagagctccttgctttccatgagggtactcaatgtcactaccatgctaaggtcaaccagctttagctataactaccaaaccaaccagtacgggagaccctactcggagattctcaatcaaggtttaagacgcaaagaaaaaccttggtatagtcttcaaaaccaggattggccaagtatatggcctcacaacattcttttaacggtacctttatccaagtttaaaatacaccaaacaccagccatggcttctctcactgcgatttctagggactggggtgcattcaagcccctctcgctcctgcacaaaaggccaggaatggtggctcacacttgtaatcccagcactttggaaggctgaagctggtggatcacctgctgtctaagttctagaccatcctggccaaatatggtgaaaccccatctctactaaaaacacaaaaaaattgccaggcatctgtaatcctagctgcttgggaggctgaggcacgagaatcgctcgaacccaggacaaagaggttgcagtgagccaagattgcgccattgcactccagcctgggcaacaagagtgaaactccgtctccaaccaaagaagtcaaacgaatgtccacaagcattcctgggtatcataacacttgtcccacatgcaagatatgatcctggcccaactgtgtactttctactaacctgcccagcaagtctactcactgtcctttcatagactgcaatctattaaaaacacaacctctctctccaaattctaggctagtctagtgagggataaatgcccatagctaagtaatcctggccatcaccaacactgcatggcagacctatctttgctaaggctgtccaggtttgaattgccccatgatgcagtcattggctggggagaagactttgagagcaagtttccagttaatctgtagcaatcactttgcgatgattacattttactttgctaacagggaccttattttactgccccaaataaaaagccagacatgaggaatgtgagccaaagatttatttcttcatttcttgcatttgaaatactcttcaatgacatccttggcctgagactccttgccatagtccttaaaaaaaacaaaacacgcatgcaatttcttgttaatatttaggaatttcaccaagctattagtatcaattatagtggagcttcaacaattagctatgtcttataaaaatgtttcccatcactaagatttgttatagccattctcagggaccttaacgacttcaatgtccttaaggctcgtaacatggctttactattgccagtttttaaagtatgtctgcacaaacacaatcaggtaagcagattcattggctggcttgtaaattacagcttttatttttttcctgaaatgcagaaaatgctttaaacctgttgaatcagttttttccttttataagatcctcaacttatttcaatacaaggttttatatgattacccagcataaccttcatccctagaataaacggtgacttaccttaactactacacaactgcaaccaaccactttacggggtttcccctctctgtcaattttacaaaggcctacccattctcctagtttcttgttgtcatcaacctattgggagaaaggttaaaaaaaaaaaaaatcacattaatagacattaacactaccaaaattaaatgaaacccaaaaggtggctgtaatcagaagggtgacatggcagtttcctcatggcagttcagtagagggagccagttgtcatcatgtacagcactaagatcacctacaagcctgctactaatctttgttgtataccaacgtcaaaattaggattcaattctgcaggtataaaatgcttctacctacaatcatctttaaaatggccgacagtatcaggtgcacgtaatgtttacacctgcacaaaatgaacagcttgagacttcacagaatttacccccatatacaagcatcactgaacattagtcccaacacaatccttagcagccttaccttaattaggttgatttggtgttcagcacaaagggcctccaccaacttgacatacataggctcatcacagttggatgcaagcacacaaagatgggcttggcgcctgaaattcaaattacaatgaaaatggagctaaaactcagatccaaatccatcattcttgcattttaggagggttatctttgcactaacacttgcgaaacataagcagccaatccactgaacacataaatgcgtacaaaattgcttgagtctgaagaacctgctagggagcatatacatcttcaattaacctacaactggtcttcagtaaaacctctgtccctgacacactgaattggtgtaagtcatttttaaaacttctggccaaaacccaaccataatagctttcttgtaagccagcttcatatacctaaagaaacatgtgaaaggccgggcacgatggctcactcctgtaatcccagcactttgggaagacgaggggggcagatgacccgaggtcaggagtaccagaccagccagagaccaacatggcgaaaccccgtttctactgaaagtacaaaaactagctgggcatggtggcgtgtgcctgtaattccatctactcgggaggcagaagaatcgcttgaacctggtaggtagaggttgcaatgagatcgcgccactgcactccagcctgggggacagagcaagactctttgtctcaaaaaaaaaaaagaaaaaagaaaaaaaaaagactgtggcattaatggaacagttatgaaatgccatgcaataatgccgaaatagaaatacagaagactcatactaggacctactaaatacattaaacaataatgccgtttccatcggattgaactggctagattacaccaaaacgaacttgtcctgtaaaaccttaaaactgcatttaaattcagctcaagagtaggttgatttgtcaatgccaccaccctaaaaaacacattaactcgatccattcaaatacattaacaaatatcccaaattcaaataaatcacagctattatactactaaattcatctaggaccaaatgcttctgaaacctgagtttgaaattccattaaattaatgcttgttttgcaaactaccagatgtaatgtggctctccatctcatctatctgccagataagtataagactgactagctccacaacctacaggtttgtcagactcttatgtttcactcataaaaggagtgaaggggtatccgacaattaaagtcatcattcaaacactgtagttttgagtgcttatccccattccaaacagcaacccacacattttaagtgggctttatagatctgagttctgataccttttc

SEQ ID NO: 1882571 - DNA, 4001 bp, Homo sapiens
acgcctgtaatcccagcactctgggaggctgaggcgggcggatcacgaggtcaagagatcgagaccatcctggccaacatgtgaaaccccatctctactaaaaacacacaaaaaattagctgggtgtgttggcgtgtgcctgtagtcccgctactctggaggctgaggcaggaaaatcgcttgaacccaggaggcagaggttgcagtgagccgagattgcgccactgcactccagcctgggtgacagaatgagactccgtctcaaaaaaaaaaaaagtggaaggctctgacaggtaccagaccatcaggtttcccgccttcaaactcacccccctacagaataactgcttattccccaaggaggtcagttctggcaccactacactccatcatataagactgagacttaaacttgctcatgtgcctccatgaaactgaatatgggtggtccttgatttagccaaagaggaccaaggtcacttggctgaaaatacagtgcagggttcatgcatcccatggtgcccagacacagctccccaattaagtgctgcactcaccatctccatgtgctccatgggtgacgctggcttgtgcccaggactttaccccgcttggaaccaaaggagtgttctggggaagtgttcagaaagatgataaatgatgtgggtggggcagctatgaaccattcttcctccccacccctccagttctccaggtacctcgggggctgctgggggtcgtttcggctggttggaggcaggcgtctgtgaagccggcagtggctgcgattccggcggctgagcggttgaggcatcggaactgaggggacagaatgggaaggttattcacacctgagatgcctccctgacttctccaactggtggagactcaggactgaaatcatgcccattgctaccatttacaaatataaggacaaattaattttgtcatcctttgtaggctgttgtctattttttcatgctctctctccaagacaaaaagctaaagtttagtaccattccttagtcatttaacaaggaacctgcaataggtaagaaagggacctcttcgtctctggctcagacgtggctggactaaaccaagccccaatgctccctgaagttcaagttaaaatacccatcactctaggtcccccaagcctctgtctacctcttggggtcggactgctcctgtttgcttgcccatcctgttccgtcttttggcactagtgagacattggggtcattgcctttgttctcggctttcaggcttggaaggttggctggaggtggcatacgccgggcaatggcaactttcccgagactctgcaggccatggcgaggggcaactggagaacaagacggagagagggtcgaaaatgcctcatgtgggagatctgatggcctcctatcctgggacacatttatacatgttgaatattttattacctacttcctccaaacttctcttagaagggattccttcccctgcccttaataatctctgaaatcgcgctgattgtggtggctcacactttgcaatcccagcactttggcaggccgaggcaggcggatcacctgaggtcaggagttcaagaccagcttgaccaaaatggagaaaccctgtctctactaaaaacacaaaattagccgggtgtggtggcgcatgcctgtaatcccagctactcaggaggctgaggcaggataatcgcttaaacccaggaggtggaggttgtggtaagtcaagatcacaccattgcactccagcctgggcaacaggagctaaacttggtctcaaaaaaaaaaaaaaaaaaaaaaaaatctatgaaatccctatcaagaaggctgagatatgtaacattcaatacttttatgtgagattggttgatcatgagcctgcaagaagcaagctggcctcaaagtttcccaaatccacatttattttcctccaattcttacgtgtccaaagacagggaaccacagacacgcctttgtaggaggataactggtgttcacccagagcccacaccccctttaaaggacccagtgtaaagttgggaaatctcctctagtcttttggtatttctactacagccacttccctttaaagagctctaaaacgtatgccccatgcatgcctagctttcaaccatcagaagcatctttgcaggactctcaccagcgggtttctggatctctaaggacttgcccttatacgtatcaaacaggttgagcgaggaatacttctttccatcctttcccttggcagtcggccccgagcgatcggacattgcgctggaagctcattgagtatgttgggtcctgcaggcacctcccccaaaacgtgccagagcctgtgggccagacagcaagtgtctcagtctctgtcccctgtacagaccataacagaaacttaaaaactccattgcattatcattagggactcagatatgaggccctctggtgtcttttcctccagtctatgtaaactgcccactcttctcaagcaaccatgatctacttagctccctcatagctcaaatgccatgttccctcctttcccccagacacctttgtcaaggaaatctaagtaaaaatccagcatcctcctagtataaacactctgccctttgtgcctgtctacaaagagtaattccctacaagtaataatctcttctctctccaccaaaatcgtttcagagacttacaacaggacaaattcaagcaagagaaaactaaaaaagaagcatacaattccatcagagaagaagaaacaacactttagattccctgtttattggacacaagctccctaatcatgcccccagggccctgtaccccaggctcccagcccagcagcctcgtgtccatctgggaaggtttgcaggaaggtatgctgggagtttaaggattttatgagcttgctcagccggaatgggggttggtaccagagaaatcctcatagaacaactagggctgtacatactcccaggctataggaacctcaagtatttgaaatatcccatcttttcctaaacttgctcctgtattggctcctggaaaaaatcgcctccagatgaaatactgttttaccatatgaagaactgagaaaaagcattatggagccaccttagcaccctgtaaccatgggccagaaaacagagggccaaggccagagccatcttcgttttcctatcctcattaaaaatgtccatcaccagtgtttctttactcgatacctccagctccctaagcaagccggacgacaggtctctcagtccattccagagtgaccaggcattcgtttatggacgggaacagtgtaaagagatgagaaatagtggggaagaaagcagggaaatccagacaggcccagaatgaaagctaaaattggggagaaagaactttatgacaagctagagataagatggatgttgcttcgtaggtgtttgaggaggccaatctgtgaagataaatatatgaagggaaaacgaatacaagagtcatgtagcgaatagaccaaaactaacagaaaataatgaatacgaaagcaggtggaaaatatatggaaacaggaatggcaaaaaaaaaaaggatgtagacaacgaagtaagggggcagaggcccaagaagaaaaacggggttgggggagaaaggagacgaggaacaggaaaaatgaaaaagcagacatagggcgactgagcaacatagaaagcaaagatgctgggataaaagcaggattctagagtgggagtggctcgacacgaagaggggcgtccagaggggggaacacagcgctggatgataggagggggtccaatatggaggaaaagcgcccttccgagagaaccgtcgggcgcggcccaccaccacggggcggcagccggggagggggcccacaaatgggggtgaaaagccaggagcgcagcggagggtagggagttacggacccaggcgcaggggtcaccccctgaagccaagacggtgggtggttaggggcag

SEQ ID NO: 1882572 - DNA, 4001 bp, Homo sapiens
tggaaacaccaaaacaaaacaaaaaaatctgagcctggacaatgtggtgaaaccccatctccaccaaaaaatatgcaacaggcactcaaaaatgtctacatagattggtcatacaaggaaactagaattcaaagtgaactttcctcagaaaagccagagtacatgaggttgacaatttcaatgttaacacacagttccaggttatacacacttcagaaaaaatctctcagagctccttgctttccatgagggtactcaatgtcactaccatgctaaggtcaaccagctttagctataactaccaaaccaaccagtacgggagaccctactcggagattctcaatcaaggtttaagacgcaaagaaaaaccttggtatagtcttcaaaaccaggattggccaagtatatggcctcacaacattcttttaacggtacctttatccaagtttaaaatacaccaaacaccagccatggcttctctcactgcgatttctagggactggggtgcattcaagcccctctcgctcctgcacaaaaggccaggaatggtggctcacacttgtaatcccagcactttggaaggctgaagctggtggatcacctgctgtctaagttctagaccatcctggccaaatatggtgaaaccccatctctactaaaaacacaaaaaaattgccaggcatctgtaatcctagctgcttgggaggctgaggcacgagaatcgctcgaacccaggacaaagaggttgcagtgagccaagattgcgccattgcactccagcctgggcaacaagagtgaaactccgtctccaaccaaagaagtcaaacgaatgtccacaagcattcctgggtatcataacacttgtcccacatgcaagatatgatcctggcccaactgtgtactttctactaacctgcccagcaagtctactcactgtcctttcatagactgcaatctattaaaaacacaacctctctctccaaattctaggctagtctagtgagggataaatgcccatagctaagtaatcctggccatcaccaacactgcatggcagacctatctttgctaaggctgtccaggtttgaattgccccatgatgcagtcattggctggggagaagactttgagagcaagtttccagttaatctgtagcaatcactttgcgatgattacattttactttgctaacagggaccttattttactgccccaaataaaaagccagacatgaggaatgtgagccaaagatttatttcttcatttcttgcatttgaaatactcttcaatgacatccttggcctgagactccttgccatagtccttaaaaaaaacaaaacacgcatgcaatttcttgttaatatttaggaatttcaccaagctattagtatcaattatagtggagcttcaacaattagctatgtcttataaaaatgtttcccatcactaagatttgttatagccattctcagggaccttaacgacttcaatgtccttaaggctcgtaacatggctttactattgccagtttttaaagtatgtctgcacaaacacaatcaggtaagcagattcattggctggcttgtaaattacagcttttatttttttcctgaaatgcagaaaatgctttaaacctgttgaatcagttttttccttttataagatcctcaacttatttcaatacaaggttttatatgattacccagcataaccttcatccctagaataaacggtgacttaccttaactactacacaactgcaaccaaccactttacggggtttcccctctctgtcaattttacaaaggcctacccattctcctagtttcttgttgtcatcaacctattgggagaaaggttaaaaaaaaaaaaaatcacattaatagacattaacactaccaaaattaaatgaaacccaaaaggtggctgtaatcagaagggtgacatggcagtttcctcatggcagttcagtagagggagccagttgtcatcatgtacagcactaagatcacctacaagcctgctactaatctttgttgtataccaacgtcaaaattaggattcaattctgcaggtataaaatgcttctacctacaatcatctttaaaatggccgacagtatcaggtgcacgtaatgtttacacctgcacaaaatgaacagcttgagacttcacagaatttacccccatatacaagcatcactgaacattagtcccaacacaatccttagcagccttaccttaattaggttgatttggtgttcagcacaaagggcctccaccaacttgacatacataggctcatcacagttggatgcaagcacacaaagatgggcttggcgcctgaaattcaaattacaatgaaaatggagctaaaactcagatccaaatccatcattcttgcattttaggagggttatctttgcactaacacttgcgaaacataagcagccaatccactgaacacataaatgcgtacaaaattgcttgagtctgaagaacctgctagggagcatatacatcttcaattaacctacaactggtcttcagtaaaacctctgtccctgacacactgaattggtgtaagtcatttttaaaacttctggccaaaacccaaccataatagctttcttgtaagccagcttcatatacctaaagaaacatgtgaaaggccgggcacgatggctcactcctgtaatcccagcactttgggaagacgaggggggcagatgacccgaggtcaggagtaccagaccagccagagaccaacatggcgaaaccccgtttctactgaaagtacaaaaactagctgggcatggtggcgtgtgcctgtaattccatctactcgggaggcagaagaatcgcttgaacctggtaggtagaggttgcaatgagatcgcgccactgcactccagcctgggggacagagcaagactctttgtctcaaaaaaaaaaaagaaaaaagaaaaaaaaaagactgtggcattaatggaacagttatgaaatgccatgcaataatgccgaaatagaaatacagaagactcatactaggacctactaaatacattaaacaataatgccgtttccatcggattgaactggctagattacaccaaaacgaacttgtcctgtaaaaccttaaaactgcatttaaattcagctcaagagtaggttgatttgtcaatgccaccaccctaaaaaacacattaactcgatccattcaaatacattaacaaatatcccaaattcaaataaatcacagctattatactactaaattcatctaggaccaaatgcttctgaaacctgagtttgaaattccattaaattaatgcttgttttgcaaactaccagatgtaatgtggctctccatctcatctatctgccagataagtataagactgactagctccacaacctacaggtttgtcagactcttatgtttcactcataaaaggagtgaaggggtatccgacaattaaagtcatcattcaaacactgtagttttgagtgcttatccccattccaaacagcaacccacacattttaagtgggctttatagatctgagttctgataccttttcctaggtttccggtaggacggatgccattcagaacttttgcgctaacaccatgaactccatgccttcttcccttgggtggcagttttgttccggttgcaagaacccacagtattgagactgatacacgtacttgtctaaggctttggcagcttcgcgaattccacgtgctaggccatcgtggatgagggcagtcttcagaacctcttgtaaagcagtattaacgtccattacacctccagcagcaatgcttaaacgcgacacatcagaaccatcagttaaaatcctcacaccacataaggccttgcactcagcaaaagctaagtgtacaacagacgcgcttacggcgacccgtttgacccagtcctgttccgccagctctagccccacgcctcagccgcaccccgaccccaactccaa

SEQ ID NO: 1882573 - DNA, 4001 bp, Homo sapiens
ttaaggctcgtaacatggctttactattgccagtttttaaagtatgtctgcacaaacacaatcaggtaagcagattcattggctggcttgtaaattacagcttttatttttttcctgaaatgcagaaaatgctttaaacctgttgaatcagttttttccttttataagatcctcaacttatttcaatacaaggttttatatgattacccagcataaccttcatccctagaataaacggtgacttaccttaactactacacaactgcaaccaaccactttacggggtttcccctctctgtcaattttacaaaggcctacccattctcctagtttcttgttgtcatcaacctattgggagaaaggttaaaaaaaaaaaaaatcacattaatagacattaacactaccaaaattaaatgaaacccaaaaggtggctgtaatcagaagggtgacatggcagtttcctcatggcagttcagtagagggagccagttgtcatcatgtacagcactaagatcacctacaagcctgctactaatctttgttgtataccaacgtcaaaattaggattcaattctgcaggtataaaatgcttctacctacaatcatctttaaaatggccgacagtatcaggtgcacgtaatgtttacacctgcacaaaatgaacagcttgagacttcacagaatttacccccatatacaagcatcactgaacattagtcccaacacaatccttagcagccttaccttaattaggttgatttggtgttcagcacaaagggcctccaccaacttgacatacataggctcatcacagttggatgcaagcacacaaagatgggcttggcgcctgaaattcaaattacaatgaaaatggagctaaaactcagatccaaatccatcattcttgcattttaggagggttatctttgcactaacacttgcgaaacataagcagccaatccactgaacacataaatgcgtacaaaattgcttgagtctgaagaacctgctagggagcatatacatcttcaattaacctacaactggtcttcagtaaaacctctgtccctgacacactgaattggtgtaagtcatttttaaaacttctggccaaaacccaaccataatagctttcttgtaagccagcttcatatacctaaagaaacatgtgaaaggccgggcacgatggctcactcctgtaatcccagcactttgggaagacgaggggggcagatgacccgaggtcaggagtaccagaccagccagagaccaacatggcgaaaccccgtttctactgaaagtacaaaaactagctgggcatggtggcgtgtgcctgtaattccatctactcgggaggcagaagaatcgcttgaacctggtaggtagaggttgcaatgagatcgcgccactgcactccagcctgggggacagagcaagactctttgtctcaaaaaaaaaaaagaaaaaagaaaaaaaaaagactgtggcattaatggaacagttatgaaatgccatgcaataatgccgaaatagaaatacagaagactcatactaggacctactaaatacattaaacaataatgccgtttccatcggattgaactggctagattacaccaaaacgaacttgtcctgtaaaaccttaaaactgcatttaaattcagctcaagagtaggttgatttgtcaatgccaccaccctaaaaaacacattaactcgatccattcaaatacattaacaaatatcccaaattcaaataaatcacagctattatactactaaattcatctaggaccaaatgcttctgaaacctgagtttgaaattccattaaattaatgcttgttttgcaaactaccagatgtaatgtggctctccatctcatctatctgccagataagtataagactgactagctccacaacctacaggtttgtcagactcttatgtttcactcataaaaggagtgaaggggtatccgacaattaaagtcatcattcaaacactgtagttttgagtgcttatccccattccaaacagcaacccacacattttaagtgggctttatagatctgagttctgataccttttcctaggtttccggtaggacggatgccattcagaacttttgcgctaacaccatgaactccatgccttcttcccttgggtggcagttttgttccggttgcaagaacccacagtattgagactgatacacgtacttgtctaaggctttggcagcttcgcgaattccacgtgctaggccatcgtggatgagggcagtcttcagaacctcttgtaaagcagtattaacgtccattacacctccagcagcaatgcttaaacgcgacacatcagaaccatcagttaaaatcctcacaccacataaggccttgcactcagcaaaagctaagtgtacaacagacgcgcttacggcgacccgtttgacccagtcctgttccgccagctctagccccacgcctcagccgcaccccgaccccaactccaaccccggcccctgggctcacccttcctcggccatggcggtgggttacgggtgaagttgaatcttgaacgcactaaaaaacaaaagcattgacttgttaaagaaccagatactcgtcacgaatcccagcaagaacgcaacgagccacaaattataaccaatacacccccctgccgcctcgctcaacttaccccaagcctccgcctccgcgcgactcggcggcggcagggaaagaggcctcatccgcacgcatgccggtatttaagggtttttcaggtcccctgtgcgcatgtgcactcccaccctcgaaagaggtggctcccgcagtgccgggcctggggagtttctgtttccggattgaggcggttctgaggcaaacgtactgcgagttttctatctctgccaggccggtccttggcgagtgcaacaggcactacgcgggcagcttcgcgttgtccttctttgcggaggcgtggcccaccgaggcccagggaactcattctacggagcgcgacagaagccaaacaagtgtgtccgcgtgttctttaaggcacctagagccctgtatcccgccgagcgccagttttaaccctttccacaccacgttctactttcctgttgcttctacaagacccagcctccccaggcagcgcactttgttccttcgcttctaagtcaccctgagagaccatgtttgtgtcgttgtgggtgtgatcctcatctttgtcttcatgaaacgagagcctacatgctttcactcttccaggctggagtgcaatggcgcgatctcagcttactgcgacctccggctcccggtttcaagcgattctcctgcctcagcctcccgagtagccgggattgcaggcgcctgccaccaccctggctaattttttgtatttttagtaaagacgggatttcaccatgttggccaggctggtctcgaactcctgacctcaggggatccacccgcctcggcctcccaaaatgctgggattagaggcgtgacccgccgcccccggccgctttcactatttctaagccctttccctgcggtgtgttggtaaagcggaaccctgcagccaggggtcaattctagtttctaagtatagcgggagtcgcttctgaacgaagtttgttctgctttgtttggtttttaacgacgcgttgtgctcggaatacacagttccgcgcaactcagaattcctcaggtgcattttcaacacctacaatgtgcctgacgcagggccaggtcctgggactacagacatgaaatatccagtctttgaggagtccattttcttccaggaagcaatattttaaatttggaagtgattggccattccccaatccccacttccaaaccaaacgcacgaaacactactgaatatgatcaatactgcctttgtgtttaatttcctctcctgggtagtcagccgccaaaccagtgagcaattattaggcgcttggcacgtgccagcgctgtgaatccagtgggcag

SEQ ID NO: 1882574 - DNA, 4001 bp, Homo sapiens
caaaccctaacaaccacccgattacatccactttacctttcctatgtccctctcctctgagtattaaaaaaaacaaaaaaatttttttaagaaaaaaaatctaccaccccattcaggacacccctccccaacacatattgggggaaacggggcacggcacgcgttgggttcaggaaaaaaaccgggaacggaaaaagaggctggtttggtcctcagcttcctggtcaggtttccccgcggcctccgctgccgccatccaccgctgggtgccgtctgcattccctcgccgcgccacggtgcttctctgttgccggctcacatcaaccgaggttccagatgggtgcaaggagatgtgggtgggaaggagtagggtatcggggattgaggtgccaaaggcccccacccctggaggtggggaaggggaggattcatttgtgctgatgctcttcttttggacatgccctgccatctgtctgtccctctcttgctctcctgccaccgggaagtaggagttttggtgagcagaaggctccagctgtacgctcgatgccaccttgagggtgcgtggctgtagggtgcatgtaagagacgatggatgggtgggtggtagggcagaaaaatcctgccctcccccaaagggagaagaggttcaaaaatgttgtgatttatgaaaaagtcgaacactacccgctctcacattaacccgaccaagtcttccggagtttccctggcacccgcgcaggccctaacactagctgtctctgcttctgtatgtctcttcaaggagtcattactcccagttgggcacaagccgccttcttggcacttgaatgacaagggagtctgaggaagagggcgaggaaggggaggaggcagcgggcggggagtggagggagagaaggtagaagggtatttacatcttgcatgaacttgcggcagactggacggatctctttgctcaaggtagcactgaacatcatgacctgcttctcgtggggggtcatgcgaaaaatttcctggacatcccgacgcatgtctacaagaacaaggaaaaaaattgtaggagaaaataagcaggtatgataaacaaagattagaggtagacttcccagtgaggtgaagattgctggaaatagtaacaacacaatggaaagagcaatggacttggaatcaagaagtgggatcagattccagctgtttgttttaaccaagcaagaaataaggtaaaaccccaaagttcccaactatgaaatggggataaagcccagtgcagaggctctcaaggccttcaaaacatgctttatgggaccttctcccaaccctttcctgcccaagccccagccagccttcagcagactacaaatatcaagcacatattatattccagatatcagagtccatctatgactctctggattacttttctatcaagtcaggcaaatatgacatccctacctggagcccacctttatagctcaccatatagaattgccaaagatcatttgtaatgacttatggggcctatgtccaaccccactctcattcaccaagattcaattcttacagaaaaatcttccattaaccccacctggcacactagaataccacatcacacaaactgctacaaacactctctacattaatcccagacctgagtctagacacttattcagctataaattctgactgtaaatgctgtgctggagatgccagaagggtactgtcttctctttcagtttagaatctccgctatgactcccagtatatgaatctataatgaaaacggtggtggtggtgatgacttatgcctaaaattatcaaagtcccctattctcaaaggttaaaaacaaaaatcatagaaagatgatagatgacaccctttactgtgcttaaaagcataataaagaccaaccagggaacccagagccatcagtcatgggtgatagataagagtcgtccttgcactgaggtgctcctgtttcaaataaacatcatttggctccaaagaacaactccccagcattagccaagccccagcactgccactcaccgagctgttcaagcatcttatcacattcatccaaaataaagtgtttaatgtgtttgaggttgaggctcttatttcgagccagggctaggatacggcctggagtccccacgacgatatgcgggcagttcttcttcagcacctcttcatccttcttgatagacagaccaccaaaaaaaacagcaacctgccgagccagaagcaaagagtctcaaaacagaggaaggaaagagtccaatccccccagggttcccactctgtttgagctaaaccaatttttagcatgtttccaaactaaaactaactttagagggcacctaatttaaaaattttatgtcccccccaccaaacactgagggtgattgcctaaagttacatggctagtcggagcagtcaggacaataattcagttctactgacttaatctaaccaacttccttcatttatgaggccaggcttcatttaaaaaataaaggagccaggtgtggtggcacacgcctataattccagctactcaggaggctgaggcacgagaacctgggaggcagaggttgtggtgagccaagatcccaccgttgtactccagcctgggcaacaagagtgatactccatctcaaaaagaaataaaataaataaaaataaaataaagccaggcccagtggctcacgcctgtaatcccagcagtttgggaggtcaaggaaagtggatcacttgaagccaggagttcaagaccagcctggccaacacggtgaaaccccatctctactaaaatacaaaatttacaaatttactactaaaaaacaaaaaatacaaaatttagccgggaggctgaggcaggagaatcgcttgaacccgggaggtggagattgcagtgaggcgagattgagccactgtactccagcctggatgacagagcgagactccatctcaaaaaataaaaaataaataaataaaggacagcaagaaatcaccagattagtgtaaagtaccacaaaaaacacatggaacattaaggtttcctaaataaacccagaatctcaaactcttttcacacaaaccccatgaaattactgcttcgggctaaatattatcatttcatgttaaaaccattaggtgaatagttgtttggggatctgggccttggtacagtatcaaataacaccagaaactactttctggtttcaagggggaaaagaacaactgtggaatcagactgtcacgacgctaatcctatggtaaatctaaaatcattaatgaggccaggtgcagtggctcactcctgtaatcccagcactttgggaggccgaggtgggtggatcacttgaggtcaggagttcgagaccagcctggccaacatggcgaaaccctgtcactactaaaaaaaaacaaaaattagccaggcatgatggcacactgtagtcccagctactcggggggttgaggcgggagaatcgcttgaacgtgggaggcgcaggttgcagtgagctgagatcgcgccactacactcacagcctgagggacacagcgagactccatctcaaaacaaataaataaaaataaaataaaataactaacataagtcgaccagatttgtggcataacaggagatacagtatcacctatgaaggattcttgccaaaaatgcttaacttcaatcagattttttctttttttttgagatgggagtctcactctgccacccaggctggagtgtaatggcacaatcccagctcactacaacctctgcttcctgggttcaagcgattcccctgcctcagcctcccaagcaggtgggactataggtgtgtgccaccatgcacggctaatttttgcatttttagtagagagagggtttcatcctgttggccacattggtcttaaactcctgacctcaaataatccacacgccttggcctcccaaactgctgagattacaggtgtaagccattgtgca

SEQ ID NO: 1882575 - DNA, 4001 bp, Homo sapiens
tagtaacagagaattataaagctctgggtttggagagtacttagaacatttagccaatcttcatataactgaatcgttatgcttctcttccattagaaagggagcctatgagatcagctaataaatggcatgtactaggtccatggatctacccagtagtcatttctgcagtctctaaatctgtaactggaatgcacatgcttggccattggcagaatccccacatagttctttagtctgtggagtacgagctacagattgaagtggaagccctgaatctacacctcttaccgcaaagacagtgaatcaagaacaatatcacaattcaagggaaatggctgattgaggccacctttaaagggtgcgggggtttgtttctatcatatttcacatttaattcaccagtctggtcactacaaatatcagatgcaacttgaaagatgaccagactagcacaaactcaaccaagaaatagctgtaattacagctgttgtgcctgattagcacggtttcaggtccatgttatatggctattaatctggtgaataatgtgttcttttcttttctttttgagatggaatctcactgttgcccaggctggagtgcaatggcatgatcttggctcactgcaacctccccctcccgggttcgagcgattctcctgcctcagcctcctgagtagctgggactacaggcaaatgccaccacgcctggctaatttttgtatttttagtagagacagggtttcaccatattgatcagactggtctttaactcctgacctcgtgatctgcctgcctcagcctcccaaaatgctgggattacagacgtgagccaccgtgcctggctgaatgtgttcttttcaaatactatcaggaagaaagaccaaaggcagtttgaatttacaggtatggatataagtgtacatttacatttacatttttgcttcagtaccatgttaaaactctcccgtcataatagggtccaatgggacatggatgtgctgcaagtccaggcaaaaaagccttgatttacatcatttgctgatttctgcagtgtaaatattctcaccatggccaattttaaactgtcaatgtgagattactgaaaatgcagagttgtagagaaatgtatggtaacacaccattacacagaataatttataatacagagggtttttttttgtttgtttgtttttgaggaataaacaaacagtctttattaggctcagaccagaagtccatggatcttgaggagacctgtgtgtatttgtcagttttctttttcatgttcttttccacctatttctgtagcctcataagctgtttcttcttctggtagtggatcttggccttctccttcctcttcttcagggtggctgtcactgcctggtacttccagctaacttcataagctcggtgtccaggcggacaaattttcttgtaggcttcagacacacaagcttgagggcagcaggaaccaccaaagctttttcttgtcatggggcggtggaatgccgtcagacaccttgaggtggttgagggcggcctggccttggtgagtcttgtggggcagtgggccttgcaccatccaccagaagatgcggctagggccgagaaatggcagggcctccagaaggtgttcatccgcttgcggagaaagcccaggtacttcaacttgtttctgtagaacttgccagaaatgttgatgctctcgcattgtacgaccaccaccttctggcctagagggaaggaaagggttgggaagtgctgagggtgccatctgaaggctctccctctacctgtgactgcacacagacagtgatgggcacagcagagttcatgtttaaattaaaagatagcctaatggaaaatcacttctgaaccaggaggaccgcaccccaggaatgggagtggctggcaggtctcagagcagtgcatggggttggtctcatggccatgagactcaaacgaaagatggtgattgttgctcatcaccaatccagaatatttttattatacagacaacattatttagtatctttattatatagacataacagatataaataaccagaagagtatggaaaatatgataagatagttaaatacctagaaaatgaagagcttagggatttgttacctatgccttaaaataacttattttaaaataatagtcatgtttaacaactggtttgcacaatttctgaaaatttaacagttggctccatgaggcagtatgagctagctgcatgcagcacaccactggacgtggaccttctggacattccacaaaacatgacatcgttccactgtatcaacaatatcttattaaccaaacagaatgagccatgagggcaagcatattggcggcactggtaagacaaatgcactccagagagtgggaaatacaccctgtgaagattcagcatcctccacatctttgaagtttttagactttgtgccaggacatccctctaaagtaagaacacattattgcatttcacacttaacaccagtaatgcagaattggaaagagatgcacagtaacacactattacacagaagaatttataatacagaggtgttttttggaataaacagtctttattaggctcagaccaggagtccataggtcttgaggagaactgtgtgtatttgtcagttttcttctccacgttcttttctgcctgtttctgtagcctcataggctgttttcttcttccagcagtgaatcttggtcttctccttcctcttctccagggtagagaatgcttggttgtcctatttaggatctagaggaaacatattccacactcatgggaataccacatggaacagtttactagcgactgactgaagcccagagcagacctggggtccgcagctgttctaagctgtcatatcagccgtgtggtagtgctttggtcatgtgactcaatagactctggggcactaaaggtatcagtggtgggaaaagatacagtgtggcattttgggcaagccttgaaaggaaaatcacaacatagatccctggggttcttcatcaaatctatgctgtctgctgcaggaaagtaaaccccattaggaaacaagtcctagcttgctcttgggccttactagagacagagctcctgatcatgagacatcaaatggctattaggctacaactgtccatcatgagctgggtcctgtcaaatcaatcaagtgatgaggtctagtggttgcaacatcatcagttgtaagagagaagtcgtatatcctgcatcagtcatgggcagaactggagggtaaatgcaaggtgctgaagtggggggcccagattcccatgtcctccacgctgtggccttggtacttcccaacttgctcataccagtggctcatgggagtgttctagttatttattgctgcataacaaagtctccccaaatttaatggcttaaatgaacacaaaccttattgtatctcacatgttgtgggccaagaatttggaacgaaattggctgggtttccttatattccatgttgcatcagctgggatcccttggaagtattcagctggcagatggactgctctagagggtccgagacagcttcactcacatgcctggcaccttggtgggttcactgtaagtttgggctcattttctctgtcttcatgctatctcagggcctttctacatggtctgcccagcatgatagactttttacttggaaattcaggactccaggatagcaaggaggaacagccagttctcttacaggctggccccagagctggcatggtgtcacttctgccacgctgtttttgtcaaaacagtcatagactagcacagattcaaggggaggggaaatagatagccctcctgatgggatgattgtccgatagtttgcagccatctttaatctgtcatggggggggaggggtactttatgattggctaatggaggaaaaataagatgaccttggttcatggatgtatctgctcaacacattggtgt

SEQ ID NO: 1882576 - DNA, 4001 bp, Homo sapiens
gtccctggctgggcttccagagttcattctaacaaggtgaaaacaagacaatttgaaaataaacagaattatggccctcccattggcccttctggagacccaagtatccagttccctaaatgagtcagaacttagttttgacatcatgaccagcatcggagactctagtctgtgaaatcatcattcccaattagggagatctggatcaagggaagctcttctggaaagagatctagtacactcaaagaaaacacaacagtcccagtatatattgatctaacaaatgagtccaggagtggacgttagaaagggaggagtagaaagtaatttaaaacagcagagaacagctccactgggaggccccagtgtactcctattttgcagtagaaatgaggggaggagtcaggttacccagcctttaacaaaaatacggggatttattaaaacgtaaaaatacaggccgggcaaagtggctcacgcctgtaatcccggcactttgggaggccgaagggcgtggatcaactgaggtcaggagtttgagaccagcctgaccaacatgagtgagactcatgtccccccgccccctaaaaaagtaaaaatagaatagtcacaaggaaaatgatgtaaactaaaaagagtaagactgtccccccgccccccaaaaaagtaaaaatagtcacaaggaaaatgatgtaaaccaaaaagtaatctctagaaagtcaccaacaccagacgcagcaactcacccctgtaattccagcactttgggagactgaggcaggaggactgcttgagcccaggagtagagaccagcctggacaacatggcaaaagcccgcttctgtaaaaaaactaaaaattagccaggcgtggtggtagcacgtgcctgcagtcccaggaagctgaggtggaaagaccacttgagccctgacggtggatgttgcagggagatcctggcattgcgccctgtctcaaaaacaaaatagcaaaaacaaacaaatggaagtcaccacctgtggtacatggattatagctcaaaaaagaaaaagtggccgggcacagcggctcacgaggtcaggagatggagaccatcctggccaacatggtgaaaccccttctactaaaaacagaaaaattagccgagtgtggtggcgcgggcctgtagtcccagctaatcggcaggctgaggcaggacaatcgattgaacccgggaggcagaggttgcagggagatcgtaccattgccagcccgggcaacaagatcaagactccatctcaaaaaaaaaaaaaaaaaaaggaaaaaattggctaaggtgggagaatcggttaaacccgggagttgaaggccgcactgaattgtgttcttgccactgcattccagccagggtgacagggaggctgtcttaaaaaaaaaaaaaaaaaaaggccgggcgcggtggctcacgcctgtaatcccagcactttgggaggccgagaggggcggatcacgaggtcagcagatcgagaccatcctggctaacacagtgaaaccccttatctattaaaaaatacaaaaaattagccaggcttggtggcatgcgcctgtaatcccagctaatcgggaggctgaggcaggagaatcgcttgatcccagaaggcgcaggttgcagtgagatcgtgccaccgcacttcagcctgggtgacaaggcgagactgtctcaaaaaaaaaaaaaaaaaaaagggcagggaggcgcataatgcccatgaacgaaagcttgcttgggaacaaagctttccgaagaggcattcaaaaggctctcgcacctaatactcacctttactcaaggataacacggcgatgaacgtcttacaactcctaacggggaaatgaaacagaacaaaagattaggaatcttggccatgaactcgttgagcctgagaaatgctggaccgagggggcggtcagagcgctgcggtgatggcatcagcgacacactcaagagttacctggggtcatcatcactcccttcctatccccgggcgaccgccacccccattttgcaatcactcgcccaaccccactcacagttgttttgagtcagcaggggctgtggggccgctagccgagttccccctgccacgagctaggtcagttccaagcaaagacaccagaaactccagtgtgcaacggtagttcacccaactgcactggggaccgccctctcctaccccagccaggccgcgacgtggccgcccgccggctgctgcgcaaaggcagcgcaagccgttgggatcccctgctccccctcactcaacagtcgggccattacaactctcatactgccaacccacgagcccacttcgcaaaaagaactaaaatggcgaggccggggccatttatggcggcgccgggttgggggcctgacgggtatagttgttttcttatctgcctggctagacgcgcggcattttccccattgtttgtccacacagaaataaaacaaagtgaaagaaagaccaggaaagtatgtttcacactcctctgggcaaatattcggagatgctttctgaattttgaaaaacaaaaaacagggatctgtctggccaggcggaagaaagtccccggcgccggccggccagcgccagccgggtgctgctcctaagccgtttcccagcagcccatggtccgttaatgaccctgggactcttcccgcgcgcgcgcgggcgcgcgcagctgcgccagtttagcgtccagctaccctgacacttcgcactccgttcccccagcgaaatctgaatttgcctcccagttcgatcccgcagactgtcaggcaccctaaccttcaattaaacaaaacaaaacaaaaaccaaaaacccaaaaggcaggtcggacgtaataggtcacgcctgtaatctcaacactttggacaggcccaggcagaggatcatttgaggcccggagttcgggaccagcctgggcaaatagtgacacccaacccccgtctctatttatttaaaaattaggccgggcgcggtggctcacgcctgtaatcccagcactttgagaggccgaggcaggtggatcacgaggtcaggagatcgagaccatcctggctaacacggtgaaaccccgtctctactaaaaaaaaattagcagagtgtggtggcggcgcctgtagtcccagctactcgggaggctgaggcaggaaaatggcgtgaacccaggacgccgagcttgcagtgagccgagattgcgccactgcactccagcctgggcgacagggcgagactctgtctcaaaaaaaaaaaaattattgaaactcataagtcatttcaaatcctttctggaccctttcctatcgcccccatttataaacgcgtatgatgtttggtgatgtgtgttgtgtgtgttggtatctttttcttttttgagacggagtctgactctgttgcccaggctggagagcagtggcgggatctcggctcactgcaacctccgcttcctcggttcaagcgattttcctgcctcagcctccgaagtagcaaggattacaggtgcacacaaccatgcctggctaatttttatatttttagtagagtcagggtttcaccatgtaagccaggctggtctcgaactcctgacttcaggtgatttgcctgcctaggcctccacaaagtgccaggattataggtgtgagccaccgagcctggcctcttcctttttttttttttctttttctttttttttttttttgagatagggtcttgctctgttacccagattggagtgcagtggcatgatctcggcttactacaacctctgcctcccgggttcaagtgattctcttgcctcagcctcctgagtagctgagattacaggcatctgccaccacacccagttaattttatatatttttagtagagacaggggttttcaccatgttggcccaggctggttttgaactggtgaacctcagtgatcctcccacctcggcctcccaaagtgctgggattacaggcgtg

SEQ ID NO: 1882577 - DNA, 4001 bp, Homo sapiens
tcccagtctattatagtcaagctccttaaggattttttttttttttagcctggtctgttgcccaggatagaagacagaggtgcaatcatggctgattgtagcttcaacctcctaggttcaagtgatcctcctatctcagcctcccgagtagctggaacaagcgcatgttaccacacccagttttacttatttatagagatgacaacttgctgtttccaggctggtctcttcctgggctcaagcagagtgctgggattacaggcatgagtcactgcacctggtcccaagcagcagctatgctctggagggtaaacttaggaaactgatcttaaccaatatcgcctgagattttaggaggctatgacagactaacagcctcctgtgtgattagaaattgccatcaaggagtcagtaattgaaactgaactttcaagttcaattccattcaaattaaacctttttggatctgactctcattacaggaatagtcttacatttgtaacttccttgctcaagaatcttaagggtatttataacatcagttttctgtcctacacctatccaccctgttggtacccaaatcctcaatatttgtctcagactctgaaccatactgtctttgctcagttatttcttaggcctattgtcccaacatctgtgctggtttagactcaaatccacttgttctattttcaagaatccttcatagcttgacttttccttggcatcttgtgccactgttgacaaaacggttttatttcaggagtcttggcagagcctagcacaagccagtgcatataaatgtggagtactaatttcgatagataatgtgacatattaaaaaatctattgggaggcaagggaggtagaaggagctacaggaaaagcggtcagagggctccaaagcaaccagtctatttcacaactttgtcttgtttgccagctttaacaaaacggtaatggcactcttccttgaaaactggaatctcaatagtcttttaccacatactgtataacagtgcctggccctattctaggcactcttgaactaatgaaacacagatcttaaaattttatgcagaagttgtgggagggggagaaagacaatgattaacagagttttaagtacggtaggtaagggcatcagagatcaagggtataaacataaacacaagcaatgctttcaactgccatcttacacacactaccttcatagtgaaggtacattttctatctccaaacgttacatgcctaaggcttctctctcattttatttggtagtatcagatagcattatgtaacccatcctgccaaatgacctcttcctagattttagcaagcctgaatgtctttaccagattgttttatcagtaaccttccctcatgaccatacttaataaactgctattattattctattgtgctccttattttctgtatctcattcccccatttctcaacttaagcatccaggctttcaaaattatagttacatcaaaactaaatattccatgatttgcttagtaacaattacttctaattcctgtctctccactcttacactgatccaaaaacccttacattgtaccctgcacaaacccgaaacattcactcacagtaatttgattacaaggctggttagtggattttccatttaatgctccccatgttatttcaggacctatttaaaagtaataacaaaaaggaacataatccaaaattacatgttttattttcatgtttgtaaaacgaagagcttttttctggatggttttcttatcagcttttcacacaacagtcaagtaaacctcgtggcactagccctagaaaaggaaaaacacgagattcttacaagactacaaacattacaacatatgtaaaagcattaaaagtattaaaaaaaaatattgtccttataacggtccatctcagaagccagatccgtaaaagtttttttttttcaacagaagttcaggttcgggataagatcatcacagataagaccaaggacacaatattcactgatctctaagcaaacagaaaaactccacttacagaaatcgttgcaactttggaacttccaagacaatctggcctctatcaatgggcagacagcgaccctcactgttggcagaaaaaaaaaaaacccaggattttataacacaactgttataaaatcacggcaacaaaatttactccacctctgaattactggtcttaatctcagaagccgaatccgtacttatttttcttcaggttatcagcttcgggataggtttcatcattgattagaccaatcagaccttgtatatgtacacataatacattaaactgcacttctgtgacactgactacaaaccaaggtaatgctaaaaggcaagtattatagtacaaatactacagaacttttaagccatacaacctacttcaaaatgaagctgctagtcagtcacattcgacattcattatcttcactggctactcgtccacactcagaacgctgttcactgacaaaaaaaatttgatttagtctaggtgtggattaaatgctatgctcaatcataaagtactaaaacaacacatacctgttaaaagtgtcaggttttaaccaagcgattttccattaaatattctcccagatgttctggaagttttttcgtgtatctaacaaaaaaaagtaaatttcaaacgatgcaacagttcctattcctgtaaatcaacaggtttactcctttagtttggaaactaagcttaactaagctcttacctttgcatcttcagagctgctccactgtgccactgaagacagcgccattgttcctgcgggaaatcggtatttaagcattctcgcagaaatgtcacactccaaggcgtttttccacacaaaacccttccccttcattaatccgaattgcacacaacgccgccttcgaacagctcagtttcaatacagggtcgaggcttcccattttaaaacaacgccgacggaaggccttcgccattttagtaaaggccctttgctgttaaaactaaccctccgccccaattaaggtggtttttccgccgccgctcaggcacatgccggaggccagcaagttcggcgcccgtggccgatcagcggttcctcacgccaaaactcggagcctgtggccgtcacgactcaacctcagtacatgtggcagtccggccgcacgtttcccacgtgcaagctttcaactctcagcactctaaactcttcactaagatgtcttcacaggattaaagctcttaactcggcctgcgccaccatcttttgctcggatactagcccgcaatacccactcacctaccacccgcccagacgctcgcgaaggccgacgtaaaagaccgaagtgcgcagccagtagctccttatatagcctcccggagtcagaacgaggccgtcccgccctctcgcacctattggacatggaagtagacaggggtgtggtcgcgaattagcgggagcgcgcgcggtggctcttctgaggcccgttccgcgttgtggagcgcgccgcaggccggccgcgcgcccggccatttcccggcgcgcgcccgcaggcgcactgcgaagcgtctcttacgagtctggcggccgacttggccctacgtggcgcgggtgtggcgccagaattcaaacagctgcagttggaaacgacgctttcgcctgccacgagccaagtccgtccaggacagattgggtccgagagtggacacaagttttgcagcgcagggcggcctcagcttaggaccgattcgagaagctgggctggctggctggctggcgctgggctgtagtgggcccccagcggaggccgccggaggagcgggcgagccctggccgcagcactccgggaaagggcagttggctggcagaaacgcttgggtgaaaaagcggaaagcgccacgtgagaacagccccggcgtgcggccctgcagggcctcagggcgggcatcaaggccccatggggatccattcctcc

SEQ ID NO: 1882578 - DNA, 4001 bp, Homo sapiens
cagctatgctctggagggtaaacttaggaaactgatcttaaccaatatcgcctgagattttaggaggctatgacagactaacagcctcctgtgtgattagaaattgccatcaaggagtcagtaattgaaactgaactttcaagttcaattccattcaaattaaacctttttggatctgactctcattacaggaatagtcttacatttgtaacttccttgctcaagaatcttaagggtatttataacatcagttttctgtcctacacctatccaccctgttggtacccaaatcctcaatatttgtctcagactctgaaccatactgtctttgctcagttatttcttaggcctattgtcccaacatctgtgctggtttagactcaaatccacttgttctattttcaagaatccttcatagcttgacttttccttggcatcttgtgccactgttgacaaaacggttttatttcaggagtcttggcagagcctagcacaagccagtgcatataaatgtggagtactaatttcgatagataatgtgacatattaaaaaatctattgggaggcaagggaggtagaaggagctacaggaaaagcggtcagagggctccaaagcaaccagtctatttcacaactttgtcttgtttgccagctttaacaaaacggtaatggcactcttccttgaaaactggaatctcaatagtcttttaccacatactgtataacagtgcctggccctattctaggcactcttgaactaatgaaacacagatcttaaaattttatgcagaagttgtgggagggggagaaagacaatgattaacagagttttaagtacggtaggtaagggcatcagagatcaagggtataaacataaacacaagcaatgctttcaactgccatcttacacacactaccttcatagtgaaggtacattttctatctccaaacgttacatgcctaaggcttctctctcattttatttggtagtatcagatagcattatgtaacccatcctgccaaatgacctcttcctagattttagcaagcctgaatgtctttaccagattgttttatcagtaaccttccctcatgaccatacttaataaactgctattattattctattgtgctccttattttctgtatctcattcccccatttctcaacttaagcatccaggctttcaaaattatagttacatcaaaactaaatattccatgatttgcttagtaacaattacttctaattcctgtctctccactcttacactgatccaaaaacccttacattgtaccctgcacaaacccgaaacattcactcacagtaatttgattacaaggctggttagtggattttccatttaatgctccccatgttatttcaggacctatttaaaagtaataacaaaaaggaacataatccaaaattacatgttttattttcatgtttgtaaaacgaagagcttttttctggatggttttcttatcagcttttcacacaacagtcaagtaaacctcgtggcactagccctagaaaaggaaaaacacgagattcttacaagactacaaacattacaacatatgtaaaagcattaaaagtattaaaaaaaaatattgtccttataacggtccatctcagaagccagatccgtaaaagtttttttttttcaacagaagttcaggttcgggataagatcatcacagataagaccaaggacacaatattcactgatctctaagcaaacagaaaaactccacttacagaaatcgttgcaactttggaacttccaagacaatctggcctctatcaatgggcagacagcgaccctcactgttggcagaaaaaaaaaaaacccaggattttataacacaactgttataaaatcacggcaacaaaatttactccacctctgaattactggtcttaatctcagaagccgaatccgtacttatttttcttcaggttatcagcttcgggataggtttcatcattgattagaccaatcagaccttgtatatgtacacataatacattaaactgcacttctgtgacactgactacaaaccaaggtaatgctaaaaggcaagtattatagtacaaatactacagaacttttaagccatacaacctacttcaaaatgaagctgctagtcagtcacattcgacattcattatcttcactggctactcgtccacactcagaacgctgttcactgacaaaaaaaatttgatttagtctaggtgtggattaaatgctatgctcaatcataaagtactaaaacaacacatacctgttaaaagtgtcaggttttaaccaagcgattttccattaaatattctcccagatgttctggaagttttttcgtgtatctaacaaaaaaaagtaaatttcaaacgatgcaacagttcctattcctgtaaatcaacaggtttactcctttagtttggaaactaagcttaactaagctcttacctttgcatcttcagagctgctccactgtgccactgaagacagcgccattgttcctgcgggaaatcggtatttaagcattctcgcagaaatgtcacactccaaggcgtttttccacacaaaacccttccccttcattaatccgaattgcacacaacgccgccttcgaacagctcagtttcaatacagggtcgaggcttcccattttaaaacaacgccgacggaaggccttcgccattttagtaaaggccctttgctgttaaaactaaccctccgccccaattaaggtggtttttccgccgccgctcaggcacatgccggaggccagcaagttcggcgcccgtggccgatcagcggttcctcacgccaaaactcggagcctgtggccgtcacgactcaacctcagtacatgtggcagtccggccgcacgtttcccacgtgcaagctttcaactctcagcactctaaactcttcactaagatgtcttcacaggattaaagctcttaactcggcctgcgccaccatcttttgctcggatactagcccgcaatacccactcacctaccacccgcccagacgctcgcgaaggccgacgtaaaagaccgaagtgcgcagccagtagctccttatatagcctcccggagtcagaacgaggccgtcccgccctctcgcacctattggacatggaagtagacaggggtgtggtcgcgaattagcgggagcgcgcgcggtggctcttctgaggcccgttccgcgttgtggagcgcgccgcaggccggccgcgcgcccggccatttcccggcgcgcgcccgcaggcgcactgcgaagcgtctcttacgagtctggcggccgacttggccctacgtggcgcgggtgtggcgccagaattcaaacagctgcagttggaaacgacgctttcgcctgccacgagccaagtccgtccaggacagattgggtccgagagtggacacaagttttgcagcgcagggcggcctcagcttaggaccgattcgagaagctgggctggctggctggctggcgctgggctgtagtgggcccccagcggaggccgccggaggagcgggcgagccctggccgcagcactccgggaaagggcagttggctggcagaaacgcttgggtgaaaaagcggaaagcgccacgtgagaacagccccggcgtgcggccctgcagggcctcagggcgggcatcaaggccccatggggatccattcctcctcacgcttcctcgtgccaggcatccggttacactaaacgtgaccatacaagtctccctcaaacagcgaacgtgaggttcaatactccatttcgcagaggagaaaactgaggcttaaaacagccaggtaatttgcctaaggtcacacagctgaaatgctttgctaatttttaacttctttgtactcaattagttatattgaaaacgagagaaagattaatttgagaagtatccctgaatactttatccagacgacaaacacaaaattcaaaagcagtgctttgattaattag

SEQ ID NO: 1882579 - DNA, 4001 bp, Homo sapiens
agaccagcttgagcaccatagtgggaccccattatctacagcttttttttttttgagatggagtcttgctctgttgcccagggtgaagtgcaatggcgcagtgcaatggcgccatatcagctcactgcaacctccacctcccaggttcaagcgattcttctgcctcagcctcccaagtagctggaattacaggcgcccgccacccatgcccagctaatttttgtatttttagtagacagggtttcacggtgttggccaggctggtcttcaactcctgacctcaggtgatccacccaccttggcctcccaaagagctgagattacaggcatgagccaccacacccatcctcaaatttaaaaaaaaaaaaattagccggggatagtggtgcatgcctgtaagtcattagctactccaagggtgaggtgagaggtgagcttccacccaggaggttgaggctgcagtgagctgtgactgcaccactgcactccagcctgggtgacagagcaagactgtctcaaaaaatagaataaaattgtcagatgctatggctcacacctgtaatcccagcactttgggaggctagggcgggcaaatcacctgagatcaggagttcaagaccaacatggtgaaaactcccatctctactaaaaatacaaaattagctgggcatggtggcgcatgcctgtaatcccaagtactcgggaggctgaggttacaatgagctgagaatgtgccactgcactccagcctgggcgacaaagtgaaactccatctcaaacaaaaaataaataaaaatacatgttgcgggctgggctcggtggctaatacctgtaatctgagcactttgggaggtcaaggtgggcagatctcttggtcaggagttcaagaccagcccggccaacatggtgaaaccctctactaaaaatacaaaaattagccgggactggtggcgcatgcctgtaatcccagctacttgggaggctgaggcagaattgcttgaacctgggaggcagaggctgcagtaagccaagagtgtaccactgcactccagcctggatgacagagcaagacagtctcaaaaaacacacaaaacatgttggggtggggcacagtggctcactgaggcaggagttgaagaccagcctgtgcacaaagtgagaccctgtaatacagtttagatctgtctccccaccaaatctcatattgaattgtaatggatcactggggtggattcctcatgaatggcttaagcaccatcctccttgatgctgtgctcatgacagtcagttctctagagatcaatttattaaaaatgtgtggcacctccctgcctttgctgctgctctggccatgctacatccctgcttccctctgtaccttatgcaatatagtttcctgaggcccccaccagaggctgagcagatgccaacaccatgcttcctgtacatcctgcagaaccatagccaattaaacctcatcatgtaagtaactggccataaaaacatgaattacaggagattgccggcaggatgaaggtggatcaggtgggttcaaagatcctcagagaaaagctcagagactcttgtccaaccagatcatcattaccactcccactgagagccaaaacaaaagatactcaccatagcaaggaaggagaacaggcatggctctccacctctcccagcctgaaggtcaagttgcaggaatcactgtctaagcatgacagccatacaaagcttctctccatgagggggagattccaaaccttagaccttcactcagattagtgcagaatctctgtgaaggtgcattgtccctggctgggcttccagagttcattctaacaaggtgaaaacaagacaatttgaaaataaacagaattatggccctcccattggcccttctggagacccaagtatccagttccctaaatgagtcagaacttagttttgacatcatgaccagcatcggagactctagtctgtgaaatcatcattcccaattagggagatctggatcaagggaagctcttctggaaagagatctagtacactcaaagaaaacacaacagtcccagtatatattgatctaacaaatgagtccaggagtggacgttagaaagggaggagtagaaagtaatttaaaacagcagagaacagctccactgggaggccccagtgtactcctattttgcagtagaaatgaggggaggagtcaggttacccagcctttaacaaaaatacggggatttattaaaacgtaaaaatacaggccgggcaaagtggctcacgcctgtaatcccggcactttgggaggccgaagggcgtggatcaactgaggtcaggagtttgagaccagcctgaccaacatgagtgagactcatgtccccccgccccctaaaaaagtaaaaatagaatagtcacaaggaaaatgatgtaaactaaaaagagtaagactgtccccccgccccccaaaaaagtaaaaatagtcacaaggaaaatgatgtaaaccaaaaagtaatctctagaaagtcaccaacaccagacgcagcaactcacccctgtaattccagcactttgggagactgaggcaggaggactgcttgagcccaggagtagagaccagcctggacaacatggcaaaagcccgcttctgtaaaaaaactaaaaattagccaggcgtggtggtagcacgtgcctgcagtcccaggaagctgaggtggaaagaccacttgagccctgacggtggatgttgcagggagatcctggcattgcgccctgtctcaaaaacaaaatagcaaaaacaaacaaatggaagtcaccacctgtggtacatggattatagctcaaaaaagaaaaagtggccgggcacagcggctcacgaggtcaggagatggagaccatcctggccaacatggtgaaaccccttctactaaaaacagaaaaattagccgagtgtggtggcgcgggcctgtagtcccagctaatcggcaggctgaggcaggacaatcgattgaacccgggaggcagaggttgcagggagatcgtaccattgccagcccgggcaacaagatcaagactccatctcaaaaaaaaaaaaaaaaaaaggaaaaaattggctaaggtgggagaatcggttaaacccgggagttgaaggccgcactgaattgtgttcttgccactgcattccagccagggtgacagggaggctgtcttaaaaaaaaaaaaaaaaaaaggccgggcgcggtggctcacgcctgtaatcccagcactttgggaggccgagaggggcggatcacgaggtcagcagatcgagaccatcctggctaacacagtgaaaccccttatctattaaaaaatacaaaaaattagccaggcttggtggcatgcgcctgtaatcccagctaatcgggaggctgaggcaggagaatcgcttgatcccagaaggcgcaggttgcagtgagatcgtgccaccgcacttcagcctgggtgacaaggcgagactgtctcaaaaaaaaaaaaaaaaaaaagggcagggaggcgcataatgcccatgaacgaaagcttgcttgggaacaaagctttccgaagaggcattcaaaaggctctcgcacctaatactcacctttactcaaggataacacggcgatgaacgtcttacaactcctaacggggaaatgaaacagaacaaaagattaggaatcttggccatgaactcgttgagcctgagaaatgctggaccgagggggcggtcagagcgctgcggtgatggcatcagcgacacactcaagagttacctggggtcatcatcactcccttcctatccccgggcgaccgccacccccattttgcaatcactcgcccaaccccactcacagttgttttgagtcagcaggggctgtggggccgctagccgagttccccctgccacgagctaggtcagttccaagcaaagacaccagaaactccagtgtgcaacggtagttcacccaactgcactg

SEQ ID NO: 1882580 - DNA, 4001 bp, Homo sapiens
tggccaagacaaacactgctgtctttcccatgcccgacttggcctggcacaggacatccattcccagaatggcctgagggatgcactcatgctggactaaaagttggggggggaggaagataaattagacttcagtctccagataactctacctttttcaccatgccaagcccatttcttaccactcaattctcaaagtctagtatttacctggttcttgccaacttccagacccattttacctctctctgctcaattacattcacctcaaaatcagactctcctaattcctcctagctttagcctcctccagatctaggccttcccagtcctagtaacaaaccccttgcatctaccaaccgctcaccttcaatgatcctagctctgtccttatttttcttaatctgtaacaattcatgacatttgaatacctgccacagaccacttctcctgcttaggttgctatacttcgggtcacgtaactactacaaccctggacaaaatgaaggacttggtacctgacccagaagccagtcatctctaaaccagtcatagaggtttccagagaccacagttggcctggcccaacagagggagactacaggtccaagcaggacctttctggaaatttaaaattagaagtcaagtgacaaaattaaaaataagcagacaagaaaagccagtcacaagaatgaatggcagacctggaagtcacttttggatcattagcactttggtgctatcacgaaagaaagaataagcctgtataagcctcctctatccaaaattgtttttgatacttatcccctgattttttcttcctcactgtcgccccggctggtgcacagtggtgcaatcacggctcactgaagcctcaaccttcacctgcttaatttctgaacgttttgtagagacaggagtctcgctgtgttgcccaggcttctcttgcacttttgagctcaagtggccaccctcctgcctcggcctcccaaagtgctgggattacaggcgtgagccactgcacctggccctgatctagccttaagtataaacccttaccaccacctgagcaacgacaaacacatctttgtattgtacccttaaagagcccaatgagcactacatgcccaagagaaaatttaccttctgacggatgctcaaagccacagtcgacaatggcccggagcaactctggcttgagcaggaagtcacgaaagccagagctgtggatggagacataggagcccttgacatccttcttggcaggggcctcagccccatctcccccagctgctgtctccacctcatcatcttcatagtccaagagctcattgtccacatcgttctctgccataactgggccggcaggggaagaagggaagggggatctggatgggttctcgcaaaataggtgaaaacaaggggtgaagagtaggggattgaggaacagcaaaggaaaacaaagatactatttctaacagaagagctggaggggggaaaaaaaaaagcaagacttaatcacgagcacagccttcaccacctcttttccatccccagttcccactttccctaaaccaggaaacttttacctggaaagaaaaacagatacaaaacataaaaacgaaaagcaaatataacagaacagaaaaagcagtaccagggaaagtggttaggacagaggttcccaacaagattagcaatcacagtagcggaaaccagaaaagttggaaggggaagaccaacttataaattcttgatctgaaagtaacagtgaggaaatagaatagataataaaaggtaaaatacgactaataacttagtaaagtggaaaatggagatgacaagtagagtcctgaaaagtcctcaaaggaagactccgctttccctattataatcccaccgttatggatgcctaactcagcagccatcagtcaagggtgatagatgagggtcatcactgcgcaaagcgctcacctttcgaaaagaaaacatcatatggccgccgtccacctcccatagctctcagcctcccacttctcagtatcctcccttccgctgtttaagcaagccttgtgtaattagcatgggggggaggggcggtgcaagacaaatggctcggccacaaaaaaacaaaattcatgtctccaccctacaataagaaagctaataggtgacagagaaaggcaatccccgcccaggctttaacaggatctttaccaagtggtctcacatcactgttacgctacgaaggtgagactccttttggagaaacatacaatgacaccaatcgtatcgtaaacacttggaaggcactccaaattaagttgggcaagtcaaggtgagaaaaatccaactgggcccagaaaccagctcctcctcccagtcccaccgagggccgagaaagagctcaagaaaggacaaggaaggtgagaagagccccgccctccgcaaataccaagaccaagggacgccgagcgccgcctctcattgatgctgaggcctccaatatgagaagaacccattggaagaagggagcaaaacgaacacaatggcgccgaggacaccatcttggattgggtccccccttagcttcccttccttcccccaggagctctttgctctcgaaagggatgcaagctaaggaaatagcgaaccaactaggccccagcgaccagaccatcgcctgtgaaaagggtatcaggaacccatgtgacgggatgggtgcggagaagcgcagatggaaacggattgtagcgaaggccaaagcttacctaaacagggagagcgcgtatggcggcagcaacagcgacgaaggagggaaatctgccttcacttccggttgcaggcttccctctactccagcctcccgccttcttggctgcaagagcgcaggcgcaagggaccggaaacagggccttccgcggttatacagatccgtgcgctccaggcttgcctttggaaaatgcctgtctgaaatttgttttaaaaccgtttctaacttcactgctaccgccagtaacaaaagatataaaggaaactaacgtctcccccccactgttatctttattctcttatcctactcctctccatgcccctcatctcttcgtttaggtttttgccacgcaggtcttctctgtaggcacccctccatggatgcgcgaggaacgagtgtggcgaaggctgcgagttcccacggggtccttggcccggtagtgaaggtgacctgaggactgctgggcacgcactaggaaccggcaggccctagctgaggggagggaggagggaagtctcagggaactggattgctcgggggtgtttcccgactctttcccagtcgtggggctggtgggcggtattttcccaaaaggatgctgtccgaggtagctgatgccctagggccagtgagtcaggaaggtgttctgaatccgagcgggaagacggggtctggattcggccccaagtgttaatagtagggcttgagggttatactacattccattaatactgtttttgtttttgttttgagacagagtctcgccctgtcgcccaggcgggagtgcaatgtcctgatctcggctcactgcaaccgctgcttcccgggttcaagcgattctcctgcctcagcctcccgagtagctaggattacaggcgcccgccaccacgcccagcaaatttttgtttttttagtagagacggggcttcacccatgtatgacctcaggtgatccacccacttcggcctcccagagtgctgggattacaggcgtgagccaccgcgcccggcccattaatactgttaattcgagcagaatgttcttggccccgccccaacagccccattgttcaacctggatttttttcctgaatgaaacatttgctatccccgtctttgagatggggagctacaaaagtaagacctgatgtcctgctgtgtaataaaacaacaaacgtttggccctctccctgttaacatacttaatcatttaatactaaggagtaggt

SEQ ID NO: 1882581 - DNA, 4001 bp, Homo sapiens; identical to SEQ ID NO: 585842

SEQ ID NO: 1882582 - DNA, 4001 bp, Homo sapiens; identical to SEQ ID NO: 585843

SEQ ID NO: 1882583 - DNA, 4001 bp, Homo sapiens; identical to SEQ ID NO: 585855

SEQ ID NO: 1882584 - DNA, 4001 bp, Homo sapiens; identical to SEQ ID NO: 585857

SEQ ID NO: 1882585 - DNA, 4001 bp, Homo sapiens; identical to SEQ ID NO: 585858

SEQ ID NO: 1882586 - DNA, 4001 bp, Homo sapiens
ttctcagatgcagtatcttcttagctgacctccctgcctcatccactatctccaatacaccattccctctctctatgatattctctaccagcccatcgcctcagtgtaagatggaaacaacactgatgtacaaggcctgtcatgatctgacgtctgactgcactcccagcgctgtatgttcgaaccatgccccatgactcggtttccccaaaagcctcgttcttctacctccatgatttgaaatgccctgtactacctgcgggacttttaacagggtctctgtggcaccccagtgcctggcacagtgccctcgcctgaaaggcctaatgcttgctgaacggctggcggagtgactgagtgacagggaattccaggagttaggaaaggggcttccggcggtcgcaccgacgcccctcaccagctgccggtcggccacggtcctgtcaggcacaaggctgtacacctggctcctcagcacgatgggcggcagcgcgtcctcaaacaggcctcgcgggaacagctgcatgagttctgagacagccgcgcgcgccgaccctgggcagataaatcggctcacggacagggaactggggcggggacgcggttctaacaaaactctcggctaccggaagcgaggccccacccccggggttgccatggttacctggctcaccccgaagaggatccgactccacaggccctcgcttccgccgcctcttaactccaaaggtctccgggatcaggtgatgcctcttccagctcatatcccgggattttatggtaccggggaaggggtaggaatggagggaagagaacctgaaaatagggtcttccggcgcagagcagtgacgtacggtctccccgggcgtccctcctagaccaggtgatgacgaaaggagcgtcaacttgtcgtccctcaggcccgtcagtgctgggaggggcggtggcgacgcacataccagcatcacctccgccaggccgggccccacgccggccgcggattggctccctccaagggcacgcacgcccggggactcgttggcggcgtggaggggcgccggtggccacgttggtgtcaacctccttcgtgaagctcacacctcccccgccccgggaggggtttgcccgccactgtcgctgaatgattgcatcatcgaaagcagaaaaccacttttgcatccttcggcctctggcgtgcctgccatgacgtcatagctctgcggaggtggaagttggggagctttgaggtaactggattcttgatctgagcgcagacgtccttcctaacctcactgcatttggaggacctggagggagggtgggtgaagggcaaggaaagaggcaggatgagagcttggccgcggtggcgtctgaggggcctgaatgtttcaaggccagagcctggcgatcaggtggctcgcttagtcctaaaccagtcatccttctccaggcctcctctgtagaatggaaactctgtacccctgcttgtcttaggacctcatggatcccagggggaccaagagaggagctgagaagacagaggtagctgagcctcggaacaaactacctcgtccagcaccttctctgcccacagaccctgccctctactctgggccctttcctttctaccggcgcccttcggaactgggctgcttctccctggatgctcaacgccagtaccatggagatgcccgagccctgcgctactatagcccaccccccactaacggtccaggccccaactttgacctcagagacggatacccggatcgataccagccccgggacgaggaggtccaggaaaggctggaccacctgctgtgctggctcctggaacaccgaggccggttggaggggtgagcaaagcgtggtaggcagtatatctggagacccgtacctaccctctaaaattaggagagccaaagccggggtgagaatcagtccttagaagaaacaagactattcttcgaggggagcatctcactaatgcttgtgtcagaccttcagcctgtaactcctgcctctcaggggtccaggctggctggcagaggccatagtgacgtggcgggggcacctgacaaaactgctgacgacaccgtatgagcggcaggagggctggcagctggcagcctcccggttccagggaacactatacctgagtgaagtggagacaccgaacgctcgggcccagaggcttgctcggccaccgctcctccgggagcttatgtacatgggatacaaatttgagcagtacatgtgtgcaggtgagttgcccctgcttcatagcccccttccccttcccagaggttgagagccccccacgcctgctgctgcttctctccttgtgcagacaaacctggaagctccccagacccctctggggaggttaacaccaacgtggccttctgctctgtgctacgcagccgcctgggaagccaccctctgctcttctcaggggaggtagactgcacagacccccaagccccatccacacagcccccaacctgctatgtggagctcaagacctccaaggagatgcacagccctggccaatggaggagtttctacaggttcaggatcggggtgggcagggcgagagcttaggcttgaaggctgggaaagggacttggggaggagggtgaaggcagaatggagggtgcacgaggggtcccactgatcccttgcttttcctgtcagacacaagctcctgaaatggtgggctcagtcattcctcccaggggtcccgaatgttgttgctggcttccgtaacccagacggttttgtctcttccctcaagacctttcctaccatgaagatgtttgaatatgtcagggtaagggaacgatgttgcagctcccacccgtatccccaaacaccaagaccacaggtctagcatccagggcaacagcctgccttctctcctcccaccacccccactgcccatcttctgcctcctcctctgcctgctccagaatgaccgtgacggctggaatccctctgtgtgcatgaacttctgtgccgccttccttagctttgcccagagcacggttgtccaggatgaccccaggtgaggcattcagctctgtccctcccctctggatcccaggatccagcctctggccctcaactgatgcctccatctgccccccaggctcgttcatctcttctcttgggagcctggcggcccagtcaccgtgtctgtacaccaagatgcaccttacgccttcctgcccatatggtatgtggaagctatgactcaggacctcccatcaccccccaagactccctctcccaaatagtaatgctttagagggaggcagtcatatctctgtgtgcagataataaaagcatatttctaagaggttctctcgctgtcttcttagctgagtcatccctgtccagcaactcaagcacacaacagtgctttgctgttttatcatcatgtttttacatggggcattcactgggtgtagaggctggccgcaaatacgatgtcccgccgtagcaaggtagccgctgtctccatcttggcacccagcacaggctctcctaccaggcgggctgccccccgcagtgagcgacacatctcagccaggcgctgaatgcagcggaccaccaggccctcaggggtccctgagagccctgccaactcggagaagggctgtggggaaagtagggtgaggactggatgcactcagcctgggcaggttctccccagccagccgtctgcaaaatcccaaacctcaggtactcaccatgccccgggcccactcatatacaacctcaaccagcccaaaattcagctcccccacaaattcctccaccgtctggttcaggccacaagccacctggacctcaccaatccgcttggccacagcccggacacgttctattccctgcaggaaagaaggagaggttaaggcctgccttcctgctccaggacagggaaggaccagatcaagaaggcagccattttccatccttggggcacttacagggct

SEQ ID NO: 1882587 - DNA, 4001 bp, Homo sapiens; identical to SEQ ID NO: 585860

SEQ ID NO: 1882588 - DNA, 4001 bp, Homo sapiens
aagaagagggcgggtgcttctgacaggtttggaacttaaaaaaaccctttgtggcggttccgtggcttttccgcagaccagagcgcgcgaggagtcattcgctaggaacctgtccccctctccccgaattaggattagtcttcctgcacttccttccttccttacgtctttcctatttccacatccttcctaatcaagtacctgtgcttccgtccacctgtcctgttgaacgcactctccggggggtttccccggcacaatctcttgtctgtcttttccaacttgagccaggcatttgtctccaagcattcacgcgagatgggcagtgcggcctcggaaagatctgagcaaaaacttcatcctatccccctttccccgttctagagtgaagctcccagggcattactgagtggctcatcagcgtcagggcagattgaaggttctgaaaaatagtggcagcgcggcgtttcctgccacccgcgctcctccccggcgaggggctgggtgcggggtagtgtcatcggcccgggctgacaccggccctggaaccgttccccgctggcagcctcttccatcccagcagctaactgctaagaccagacacgttccaccaacagtaacagctgtaggaaagaacccgttttttcccgtctaggtttctctccttttcctagtacctaagtccatcatcctcctgccactgacatatcgttgtctagacgctctttttcaaaactcaaatccaatcaaacaaaaacaacgcccgtcaataaagcaagaaaaataatactgcagccagcggccaggagcgtgcaccccattaacggcgagaaagcatcaacccctgctgtaatgactgaattggaaagaaaggtttcctgctgcttgttagtcgtcaacatttttactatgccagctgcaagagaagcagctgcatactctggcaactcgactggggtgggagaaatttagccagcgtctgggattttcgcagaagataatttaagccccagcttcgctcgggctggggggctgggggcctgctgggccagggtgggggaaccgggctgcggcgcgcatgcgcaggtaccgcagcccggctcctgggaggccctgctgccgccaccgccgcggcccgcgctgtaaccgcggctgccgctgctgctccgggcgggcgttggtgccgtgtgccgaggcgccctgtcaggcgatggggagcggctgggcggggagagccgacggccgcggcggcgcctgaggaacgcagccgggctcgggagcggcgagggcgggccggtccagcggcggaggagcgaggcggggcgaggcaggcggcgcggggacccacaccaggcgccttgtgtgcgaggccgagcggcggccgcggacagagagccggcgacccccggcaggaggagaaggagccggaggacgcgccgagggactgcggggccggggcgggcgagcagcggcgcggccgcgggccatggacgcagcggcgacggtggcggcgccgggggcgagccggggcggcggcgcggcgcagagtccgcccgcggccaggtgaggctgggctgagcgggctcgggcgccgccgccactgctgctgctgctgctgccgggccgcggagcgaggcggcggcggcggcggctgaatcggcaccacagcagccgcgccaagcagcggcggcctcggaggaagaggggtcgccgcccaggtttcttgcggccgccgctcttgtcgtcgcagtatttcctgttcggattatcttttgcttccccccagctgcctccttaccctcacactcccactcctccgtttccgcggtcgaagctgccttcggccccgggtggtctcccccgcccggggaccccctgtgcctcccctcccgggctgcgggggagcccctccgagaccatgaggaaattcaacatcaggaaggtgctggacggcctgaccgccggctcgtcctcggcgtcgcagcagcaacagcagcagcatccgcctgggaaccgggagccggagatccaggaaacgctccagtccgagcactttcagctctgcaaggtgaacggagcgcgcagccccgcgacaccgtcattgaaaaattggggttgttttaagggggctactcgggctttacatgggaatgcaagggaagagaacgccaataataataataataactctaataaaaggctcgctcctcccttggcaaacgtttcttcggtgggttgttttggagattgataccttactccttttcattgatttttctctctcccctttgcacatgcagcaatcagttcaaggttgcttcaaactattatccgacctttaatcgtattctgacactgccagtaataacctggaagcttttatattcaagcgttttaatatgattcaccaacttcgaagtttcctttggaaacggtgtctaatgaatgttgtttatcaaaaagccaaacctgttctaccacacctttgctcatcacttttcccttaaaatgtggtgtaagtggcttacgatatgaaatcacagggttctttttatcattatgtttgttaaaaagtactgagatttttgcctgttaatggcacgataattgccatagcgttctgtaattcagaaagaatgatgcagcgaattaagtcaccagctgcttaatgagaaacacaaacttgcctcggttttaatacctgcctttctcataaatagccatgtatttgtatgtcagagttaattaaaagtgtgcatatatatatatatatatatatatataggtctaatgccctaaaatgattatggccttaatagtaaattgcaaaaatgtatgttgtactcatcttcattctgttacaagtgtaaaatgttgggatagaggtttgattattgctctactgaatgcttgactaaagtaattatatgacagcttttccttagaagtacttgcgttagcatccaaataaagtaatgatgaaatgaatactgccaaaataaagtatgaattgcatttaatgggtttacagaattttggaccattgcaaactttagtcatctggtgtcggatgtagtagtatagaatattaataaaagattttcttctatggaataccagtattatggaaaagcgaaattaaagtatatcactggactagatttttgtttgtttcaggttctatgtgaataactttgttaatgtaggtttcacttattttttcaaaagcagtaagtgcatgtgtatgtgttttgcatcagtggtagtggttctaaattctaacgcctctattgactttctattttaaaatttcgcttgctgccttggttgctgtgatgtcacttgcccatccctagactgttcgccatggatttccctatcaaccctcagccctggcctttgatcctgtacagaagatcctggcagtgggaactcagactggtgctttaaggctgtatcctttctttaattttattttttaacttctactttgttctccccagtccttctgtgttgctgattagttccaaagaaagtttttattttcctgttggtgtgattagatatatactatgagaaatcatgtgttggcttttcccttgattataattcagcttatatactgctgtgatgtttctcagctcctagtttatagtagctaaacatatatccaaatagaggtctaaagtttttttatgataactattttatttgtaaggagatagaagtttctaaggaaaaatatatctgcttctatactattggtgtgatgaatgaggtatgttaaggatgaggtttaaagacaattacttttaaaaatattatgcatggtagatattgaacttatgacctattctaataaattagagattggatttcaatctgaatttggttgtttttggcatgtccgtgtagaaaaacaattagcagaagtgtagcaaattaattttctatgaatagttataaatggttaatatttctaccagtttttagagcgtttt

SEQ ID NO: 1882589 - DNA, 4001 bp, Homo sapiens
caactgaatactaaatactttcaaatgatctatattaaaatatggctctattgtatataattatgaacagatatatttatttcaagttaatttaatgagatgcaaactatattatatagactagttaagacatactttatgcttaacataatttattaagcatgcttcatacttaacattccaatgtttctttacttgctaattggtcattgattttcttcttgaacatttttgtgcctgattatcttttatttctatttaatccggtagtaaagtcataattttgtaataatattaacaaaatcctgcctttagcaatagatatgtaaatatataaacatcggatgattatttcaccaagaaaaattttagtaagagaatctattctcagaaatgctgcaattatatcaatttaacaatgtgatttaattttatcttgttttcctttacagtatttgtgtgctttaagatcgagctaaattgttaacttggctatagctaaactgttaaatttctagtgacttttttaaggtaaaaaaatactaataaatgtactcagtctagaggttactttaaacttttgagtaagtcagtctatgaatgaattattcattttatatgctacaaaaatgtttacttagtattgaggtatttggaatcgagtagggctcattcttttgctgtgatgagtctgcttgattcctagtagaatggaagtgtgatttaagccaccaccctgttgaagaagatgaattgagtatagagaccgtgagcagaacacagttctgccacgatctttatttacttgagcatccactttgagggaaatatgggtttaatcattcacaggagcaatccaccacaggcaaacacttgagtcactaaacattttcacgtgtgcgaataatgcctgatttcagggtctctgtttagtctgtttcaggatattgaggattctcgggatttttttgccataagccttaggcactcgtgatgacaactcccgctattataatttaagagtggacagatgaattgattctgggtccttgtggcacacttgttaaaacttcctggcaggacagggtccccctgtgtacacagttgaaaacttgcagtccaagtgactcacaggctcttcagttaccatggtgatattccattacaggagctgatagattccagagagattggtgcaagccgtctcagcagagtggagtcgctggctcccgaagtgaaacagaacacaactgccagtgggtgtgagctcatgcacacggagatgcaggccctgcgtgccgactggaagcagtgggaagacagtgtattccaaacgcagagctgtttggagaacctggtcagccagatggccctttcggagcaggaattctcaggccaagtggctcaactggagcaggccctggaacagttcagtgcccttctgaaaacctgggctcagcagttaaccctcctggaaggcaagaacacggatgaggagatagtggaatgctggcacaaaggacaagtaagttggcttcctgttttctattggtggttatgctttaaaaaatgttttgactttcatcattccttaaaaaaaaaatcttgctaactaaaaacacgcaacatgcacacttggaagaagtatttatctcattaaataagcaaagtctgatttgtttccttttcttatatatcaaacttttgtaaaaataaagatttgggttattatttgcggtaggaaacatttgttgttagtggagacattttactttcattcctatggtgtaagagtctgtaatactgtattcagccattcagtctgaaaaatggcctgtgggcaggggcataaatagacagagagtcatagctgttttcttgccagttaactatttcatacaactaaatgattgaatttatagccttaaaagactcacttggtaatctcctacagcacagcaaatagttatctccccgattagctctcctctgtgtggttttgacagctgttcttgaattagcctgttaacagaactctacgtcaccctccctggtcaccttcccgagactttttttttttttttgaagctaatggcagcttctttagaatgtgagaaagggaagcctacaagggagaccgaagaatgagcaagagtgtaacctcttcttcgtttctttcactgttaaacagtatctttgaaagccttttcaatatttccagttttataatgccctgattcatggatgtccttaaaaggaaatttagtaaacttctctgctcctatttatattacaatcatttcaaaatagctcctgccagtaagaaagtcatgtagtatttccagcagtgtctggttttaaatcaagtatttgaaacaaatgcagcatgccataaaataaagctttctacctctttatgctactctatttataatgattctaggtttgggggtttgtttttgttattctgttccatttcctgtcctttagatttatgtaccagaataaagcatagaaatcagttctgtcacagagggacaaagaagttgataattgctctacatggtataatatgaaaaaatcagttacactttcttggttcctttttctttccctttctttctattccagtcacagagtgaaatttttaaaaaggaaagatttggctgtgcctagattacattactattctgttcattatttttacgttgatattattagtaaaaataatggttgaggcctataaaaatatacatgagaatgcagtagtaaatatgggttttcagttgtgttaaatagttcaaatgtgacagccctctgtgtatgtctgcttccagatttgactccagggtcaatgcttttgatgacaatgctacattgcttctcaatattcatgttttcttttatttctaataatggcattttatctaaaagtggagatatttctatcacaatgaatatgtaagaaaatgttaacaaaatagtaaatatgctagggttcttagggcattgttttgcttttagggaggacttgtcattgttgatgatcacaataagaattaaagtatttattttatgcaattagatgacaatactcaagaaattctttaaaacataaaaacagatgatctataaagtatataatataatattgtaaaaataattctatttactatgtttgcgaaactcatttatcttaatatcctttgggatattagctttggaaataattttcttaagctgtataaggtggaaagatgcattctagaacttaacagaatcagaaatacataagctgatatttatatattgactctactgacatactttaggatgaagttatagaaatgttttaaatgtaacgttttggtcaaaaacttttcacttttaatgtcatcccattcataagtaactgacttgaatctccagtatttttatgtttttgttgaatgctaagtttctttagttcttacaatgttctgtcttaagtaaaaggttccatatggtgtaaaatagttggtcctagtttagtgtttggaatttcagagagaaattgtttagttgttgatgaatttttgtaaataaaaatgtcttagactcctccagcccagacaccgagttaaataaagaattgacaaaccaagagaatgtcattcctgctctcataatcacagcctaggtggggagatacgcaagcataaagccaatgtggatactccttgtgatgaatgtctgcaaggtcctgtgtatcctcagatgagaaacccgaagaggtgggaaggagggcagggggtacttaaaggagttgttatttgagttgagtcttgaggtataattaaaatgtgacctgacaggtgaggtagaggaacagcatcaagatgcaggatcattgaggaatcagaaaacacaagagaggaacctagagaggaggaatcagattaggaggatgtagtgccacccccaaaagaaataatgaatatgtaagtgggtctgtgaaagtc

SEQ ID NO: 1882590 - DNA, 4001 bp, Homo sapiens
caagaaagtttggtttcccgcagtcagagccagaaacccatctgtggggagggtgggtcctccccctttcccagcactttccacacccctccctgcactgagctgtggccaaagagggaggccagctcccctaacaagagggcttgagcacaggactggccactgagtctttgtagttgagttttttcccttaaaaataagaaatccaggaaaacagtttgcaccttaaaaagccaggcccagtgccacatatgcctcgggcagagccagtgacagggcccagcacaatgggcagttccttacacttcaggatgaggcagaacaggcagggctgggctgtgttttcactgggcctggtagccccaaccctcctacccaacagggaacaagaaagaagcacaaaaatacccatttctctccaagtgtgtgcaccttctcttttgacaagagggaggggtggagcaatgtttcctagccaccagggaagtcctggagtggggcttccatgctgcactgccttgcacaatcacccctaatttaggtcctaacaaattaggtcctgcggctgcaggttctgatcctggctacttttccagtttcttcactcacttcttcctgaacctgccaaaccagttcctcagttcctccccagctcttcttcctctctcaggtgattcctcttgggaaggctcctcccacctcagggccgcctccctatttccacatgaacatgaacacattcacacatactcctctagaagccatgtggtgcgacccacgtatgcctccttgtgctacatgagatccaggaaggagcacagctttgggaactgagggagcctgagcagggaagccacgcaccctgtcacacttcaatttcaccactcagcaaagggtctagatgcccactgtgtgccaggcatggttctaggctctggagaaaaacaggcagtgaggaagcaatatgatgagaacagagcgtaagacaagccaagcgaagaaaatgcttcatctgtgggatgctgttggatggaagactgagcagccagaaggtcctggaggccttgaggaaaggtttcagaagagtgggaggacacagcctggctggagtcacttcaagggagactgggaagagggaaggtgtgtagacaacctcgtcacatgggaaaaccaagagatgaggtggaggccagggtcaagagagggtttcttaatgtgagctaagacagcctgttggtataatggtgcaaatgaccgagttaggaaggaaagggggaaactgcgggagcgaggtcttaaaagatgagaggggtcaaggtcactgggaggggggacaagcctgggaggctgtccactgtaccagagccagggagtaggtgtgggggctgttgaaagttcttagctacctttggctgggcgcggtggctcatgcctgtaatcccagcactttgggaggccgaggtgggcggctcacgaggtcagaagatcgagaccagcctggccaacatgatgaaaccccgtccctactaaaaatacaagacaattagccgggcgtggtggcgggcgcctgtagtcccagctacttgggaggctgaggcaggagaaatcgcttgaacccgggaggtggaggttgcagtgagccgagatcgtgccattgcactccagcctggggaacaagagccaggctccatctcaaaaaaaaaaaaaaaaaaaaaagaaagttctcagttaccttcattttcccagtgaaataggaagcaaaatcatcaggtgtgagggggatgagatgtgaaaggcttgaggagatgtgaaatagtcatcctggaggccagatggctggggaaatgcaggaagattttttgattccacacagccctggaaatctatgaagtctcacagaacagtcaagatggctgtgtttttctccggccacattcagcaacacaagtgcatgcagggtgcagaggagggcgggagagggctagagtcactaagagctggggataccgcggacaggtgtgcaggagagggaacggggcagagaggacggcaagtgagaggccaacagagcaggcgggtgaggctctctgtgacctcacccagacagggacagaggaggggtagagagacccagtgagcagggaactctgctccttaatgaatggagaggtgtggtcaaggaggaagatggattccagatggttcctcctacggagggaagaggagctgtggcccaaaggagcaccacgagacagggacagggtgtctaccccgcctccaccatcactcccaaggacagcagagtggtctcaagagaaggcccagcttggggggagtgcgtgctgtaagggaagtgttcaaagaagaggccgaccacagtgcggtgcgggtaggtcaggggtggcgggggttgtgtttactgaagacagttccagaaggctagggggtcggcggggagagttgatcaacttactaaaagtcagctcctactccatatttcaatccagaatccagaaaacaggccagaattcatttttcaggactttctgatttatttgttgttgtttggtgagaaaatgagcatgggttagggacccactgggacctgttttctcacctgggttagaggggctatgagacggcctactgagccccaggctctcaggagcctctgaacaccaggacatgtggtccaagaaagatgaaggaacaaacagccaaatccagctctgagtaaacacactgattctgcttccttattcacagccccacaggtggcacatctcaggcacatatggtttgtgactctccggccttctccatacatgtctgctcttacgtacagaggccctgtctgtctctaggagaaaacatcatgctattttttacaaaagggcagaagaaaccttctcaagtgacgctagttaccgtcattccgtggatctggaaacagcttcctccactttaccaatggttttctgtacctagaattagctcctgcctcaaaaaaaaaaaaaaaaaaaaaaaaaaaaaaaaaaaaaaagccttttggcttggtgagaacctggccccagaatcttaatcacatcatcgccaggattcccaaactgcatgccgaggtgcactcctggaccataagctgttgtgctgtgtgctgtcaaccaaaggtcaaacatgtgtgaaaaacactggcctgagcagggcttgaaatctgtcatccactaaccggagctgcacggctcgaaagagaacaggtctcccagtcacctgcacatcacagctttctgctctagggcccctccttggggaagcctgcttcacagaacaaacactacctgcccgggatgcctgccctgactcctgccaggggcttccttgccctcccaaaccctggcctttagaagcaggatgccttacccaccacctgccccaatttctgaacaccatggcccccttactacctcttgccactctgggtcctgcaccaggctgttgtccgcctctagcacctgagccccacctggatgttcgcagccctgagcttggctccctgggcctgtgtctcaaggtctcagctggaagctacacaggggtgctccctagagggcaggctcaatctgggcttgtctggaagcccatagggctggctcagagcctgtacagagacaaccaaacatcccatgggaaaaaggtcagcaggctaaggggagggagacaggtgccagggcatggccatgaagccaggagctggggtaactgagcagagtgcgctgcctgccacctggggcctgagctccatgcctgaatcacagggggagatggcaagagagtggggctggagacggggcaagcagccctcacccacccaacagtgaccatgtgcaaatggccgtgctgggcagagccggccacactggctccattgttttggccatttgtatttttcctttggagaattgctcattatatcctttgccaatttctctgttgaactatttgtc

SEQ ID NO: 1882591 - DNA, 4001 bp, Homo sapiens
ccaggtatgaggggttgtggacatgactgacatgtgtgctcatgtatttcccaattcatgaaggttctattgacctcttaatacttcacagaaaaatcactgaaaaaatgttcaccaaagttaatgatctgatttagatcataggtattatggtgtcatgaaatttgtttggggggtaccctaaggaagacttttggagaaagtggttgaaacaagcacaaggagaggccttgtgattgctggccaatcatggagacataccaagcagattaagattctagagaagcaggaaccagaaagtcacttcaaatgtaaaccacaaagttaataatcgcaaaggcaaaagctcaaattgcatatggtgattcataatcaacctgcttcacctatggcagtagtgagcctaaaggtatcagaaaataactgaatagtttgtaaaaatgatggttaatgattctcccaaaacatatgataaggcaggccgctagttgttaatagaggtcaaccttaaggtacacttccttcatggacccacaggtcgcatgatcttccttttcctgaattcctagaatggtatcagataggaaccaaagccaacactttttaaaaaattcttatattgctttttaattatctcatgtatgtaaatctaggccaacctagtctgaactatgttttatatttctttcgtacattttccctaccagtcagaggtgagtgtggattggaagtgggttaacaattaacaaataattgagtaattgatttactagtcaaagatagtgaatgtacctcttgtgtaggtgatagaacacttaacgttgattactgaaatttaatagtatcatgtttgcagtgatctggggatgtaaggtatgtgctgcaagtcaaaataataacaatctcatttgcaatattctattcacttttgcaacagctttttattaatgtgcttcaggaaacaaatttgcagtttctgaatgggagctaaatatttttcctgacactatgtacttgaatgctttctgaaaccatggattaaaaaagccatgaataagagggttgcaagtagagttgaagtaccggagccacactaaaagatccaatattagtatgggagtggagtagtctaggtatgggtcaatcagaacagcaagaaaacaaggcaaccagcaagccagaaacacccccattactatacccagtgtcttcgctgctttcctgtcctttttcttggataggtgttttttcactgccccctttgtgttttcaggcacatggctgatgactcgagcatgctgtttggaaacgataaagattttgccataaataccaaccatgatggagccaggggtaaagaaacatgtagtgaacaatattgtcccccagaatttgttgaaagtaagggcacagaaattgaagcaagcaacaagtatcttatagctctgcataccggaaacatcggcctcagatagaactaaaccaaaagaaaaaagagcaggaactgaccagcaaaatgccagcagttgctttatggtggagttcgtcattttggttgtgtaatgtaaagggtaacacacggcataaaatcggtcaatagcaatggaacagaggtggaaaatggaggtcagtctgagcatcatgtcaaagcttgtgtggaatttacaaaagccatccccaaagtaccagcaactctccactgatcgcattatgctgtatggcataatgacaaaacccagcagaaagtccgtggttgccatggagaggatcagaaagtttgtgggagagtgaagctgtttgaaatgcgatatggaaaccattataaccaagtttccgaatagtgataatcatggctccagtcataaccgaatacattatcacctggacatgaaaagagcggttggtgggaggacaggatttatttacaaattttggacaactggataggtcttcgggaatataagttagatccatggtgctttatcccttgaaatttctttccaggaggatgagtcactgtttcttctcttcttaaaatgattccagtaaatttcagctcctaatagtacaagattgttcaaagttatctattattaattcacttcaattgtaatttatttaaatattttaaattatatcaactgtgtttgctttctgagttacttggtacgttagaaaaatgacaattttcagctgtgtattcttttctgtgttattctatttaactccatttcatccatctatccatccatctatccaacataggtttatctattgactgctttattcctggtaaggaaatgggagattttcaagaatgtttgggcaactttcactttgaacagatacattcctataaactgttttgaatgtggctgctaatatctcttgcatcataaaaattactcaatacacaaaaaccaagtgaaataccaaagtttttctttaggcattcttttgacaatttgaaatcttcatttgtaaacagtgtgcaaatgttttaagagttataaatggcatattgctgccgaaacatgcagtaccatgaaacatggctgttgaaagccatgtacctatgggttaaaacatgcacctgggtcaatgcttcttagcttctctgtttgctactctcttcctgtccttccctctgcctctcctgtcctctactcttcatgctccttcccttatttcttaagtcttatagcttctctgagattctaactagtgaagccatgtcatatgttccatccctgagagaccaataaaaattacaaattccacactcacagacccagttactcaaatctcacatgactccttttggtcacagtgggctgaataaaggagggtggacaaatggcataaataaaaacttccaataaatggtcacgcttgctttgctatttgcttcggaatacacatcaatctgaaaagccactccctagcagcctcaagagaagcttgacattgtgcctataacaaagcacagagtctgcttagtgggccacagaaaagcaggcccaatcttgagtgaatcagacagaggagacaccctaggcctatgttgaattctcccaagctatataaagactcaactgcagggtacatttaacaagttcatctatttaggcagattcagtttagtttgtgctttagaatcctaagaaagagcacagaaataacccccaagaaagagcaaaaactggccccttcctcatctcaaggtgctagaagttcccttcctttttcttgattctgtcattcttcctgaccgacggggaagaaaagtcacctcgttgtgataaaagaacctgaattttgctggttagagacacttcttattaccaagtcacaggaaggtgtctccttgcaaagtcttaggaggaccttttatagagctgactgttccatgtgactcccttgtttctctaggttaaaagtttacatcactgacttccaaagaggaggtagcaaaagagccttgcgttgagagttctcctagtccagcttctgccatcagccagctgtgagcccttggtgatgggaggtgtgcagggctagatgagccttgcaggctttccagctctgaaagtctgtgaatcattcgtaacagaaagttggttcatattagatcatcttcttgtaaacaaataggaaacagaagagcagagaaacaagatgaaagaaaaataggaaataaagtttgggactcaatgcggagattctatgaatggtacttgcagtcctgggacatgcctgatcaatattagttatcatttagccataaaaaagaatgaaatcttgtcatctgcaacagcatgagtggaactggaggacaatatgttagttgtaatagccaggcatagaaagacaaatatctcatgttctcacttatttagggagctaaaaaaaagaaaaaaaaaaaagcattgaactcatggagatagggagcagcatgatggttatcagaggctggaaaggatagtggggagagggggata

SEQ ID NO: 1882592 - DNA, 4001 bp, Homo sapiens; identical to SEQ ID NO: 585888

SEQ ID NO: 1882593 - DNA, 4001 bp, Homo sapiens
tacttttaagtttccaacattgaaaaatatacagacaacagaaatcttttcagtggtacatattactatgatttttactatctccccagacagcctgagcagtccattaactaaggtgtaacagagacccagagccaaaaagaaaaaaaaatggctccaacaagaaaaatcacagcttaatgtatgcagtaaggccatagtttggatttataataattatcacattccagagcccaaattaattatttgtagttattttgcagatatcttagtagctacacacacacacacacacacacacacacatttcacaaagtattggccaatgcccattttcacatagctctttagtctaaaaataactttaactttcatgttttaccaagactgagaaaagggagagcaaatcaaaggaaactagttgaggaattagtgaagaaatttttaacaggcctgctgggtgttctctcactgctgtcttgaacctcagattaaattattatactttctgtgttgtagtactgggtcattcgtatgtgaagacaaaggcaacttcaacttgatatttctgtcatccctgctgtgggaagagtccttttcctggtttataacatcaatcattctcacaataaatcttagggtggatgtggtcatttaaatctccacctgcacaaacaacagaaaataagagagctcataaatctctacactggtgattaacaaattttggatcctcagcgaagatattatggaagaggggtcgctaattcattaataaagactgatttgctgacaacctgtttagtttacagcatagggggaaagcaaacaagaccctgctagcaaaacaaaacgttagaggttagtgaattcccagctgagcctaggattagagatatgatatcttaatgtaggagaagccttcagaccctaagccaaccactcagaaaccactcttacattttgctccagcccctcaacttcaatgcctacctgcaagggaagaaaacctggcaaagaaattgtaagagagatttatgccttcagtctccctggtttcattgcaccaatttcatccaatccctaggttctgtttccctgtgctttttctacctacttcccaggagactttcttattctctaggaaaggtggttcgagctggggttaaagatggaaaagaacctttctcaaaaggatagtcttgctttgtgttgtgtaatgtcagcttcatgtgaggaacactggcacctaacaggctggaagaagacaaagacagcagcattgaaagggacggtgcatcacaaaaagtgccaggcaaggtgatgtctgagagcaacaaagactctcaaggcaatattaaatgcatttctagaaaagaaaaaaaaaccgaggggaaagtttccatttattaggaaaagatgatcaactaacataatgttttccacacactcatactgccctctcattccctacccactcccactaagctgtgtgtggttgggtttgagtgtgcaaatcaagtatgtttgtgtacacgtaggcagtcctttgatgtcttgaaaatgaccaggtgtaggtgaaatgttttatacttacttttccatcaccataaagattctaggaagcacttgtcttcatttatcccggggaaggtggaagatctcggtaaagccttggagtcttatgaggtgttggcaggatgcggttgatactccctgtattttaattcgtgttttcttgggaggagagagggcatggagtgtaggtggaaggcccagaaagagccaaacgatctagtcgtttttctaaagttctcagtaacaaccagttgtgacgtcttaagagagaaagaaggccttttacagatggacagaacatgctgcttctcggccccggccacagttgggagaaggtggctggtaagtacatgatgcagttgagttgatttacattacaagttgcaaatcagggtctgtgcattgagtttccctccggttgtgaaaggggtctaagcgctttgctggggcctggcaggcccctccctgggctgcaaggatccgcccctctattccccagataaattcctagtgtccaccaaattcctcagcgctcgctcaccctcctctacggccacgactctgggagtggggaaacagagagccggttcctctgctgcagaagtcctcggggttccttctcacaactctgcgaaggggaaagggttgtgagacccaaccagaccccaactccagctcccagcaggaggtggctgcgccacactcgggaggcctcttggtttcagggtctctctgtctctctctcaccctcttcctcgctttctctgtctctctgtctctctctctctctctccctcgtccactcccccaaacatgtccaccggctccctcagcgatgtggaggaccttcaagaggtggagatgttggaatgtgacgggttgaaaatggattcgaacaaggaatttgtgacttccaacgagagcaccgaggagagctccaactgcgagaatgggtctccccagaagggccgcggcggcctgggcaagaggaggaaggcgcccaccaagaagagccccctgagcggggtcagccaggaggggaagcaggtccagcgcaacgccgccaacgcgcgagagcgggcccgcatgcgagtgctgagcaaggccttctccagactcaagaccaccctgccctgggtgccccccgacaccaagctctccaagctggacacgctcaggctggcgtccagctacatcgcccacttgaggcagatcctggctaacgacaaatacgagaacgggtacattcacccggtcaacctggtgagtgctcccggggctgcagctgcagtccaggcgcgcccgcactcccgcctgcggtgggcgcgagtgcgcgcggggctgggagtgggggtgtgggcgcggcggtgacttacacatctcgaccaccgcgggcctagagcctccagggaccggaggcgggcggtctagacacggccctcgctctctgccctaccagcccccggagcgggagtgatttatgcgagggtttgacgtggcagcccaattaaaagtttgcaagtgtgttgagctggcacagaggagggatcccccgctcccgctccatcgccatcctccctggggtgcagtggctgctgcggaactgagaacactgacaagacgctgcgagcggacaggcattttgttaatccttttttcttcttttagcagagagtggaacttgattttcctttccttgtaaataaaaacacccaactccgtttctttcacaagcatatttaggaccattggataaggacacatctatgccccccaaattgtccacgtaagcccttaaccgcttaaatattctgtgcttctcctataagtggattaatatttttaaatcccagaagttctagtaatgatcagcaaaatcagtaaatcctcactagtatgagtgtaataaatactaaaataggtcactctcacccaagatttaagaaatgttaccttttatcttaaaaagtaatgcccattgagcctaattttttaacacaaaaaactgataatcattgagtctacttttttctcaaatgtattttactgtttaagaaatatatcttaatttttttcatttgattttattttaaaacttctaagatctaaagaaaaacaataacaacaacttactaggatctctgtttgtatatgataagaatgagagatttttccttttaaaaggcaagtcttatcagctagcactagagcagtagtgagaggggtctgaattgtcttctcaccgaattggtttctggaattgctggagaagaagatgcaaacccacattttaccatgaaaaatgttttctctccaattgaaagtttggggtttttcccccccaatgagtaaatagctttttaaaatctccacctaaaatgaaagtgttgcctcgaatatttacaactgctactctcttcatc

SEQ ID NO: 1882594 - DNA, 4001 bp, Homo sapiens; identical to SEQ ID NO: 585899

SEQ ID NO: 1882595 - DNA, 4001 bp, Homo sapiens; identical to SEQ ID NO: 585900

SEQ ID NO: 1882596 - DNA, 4001 bp, Homo sapiens
tgtgcagttcaggactgtggcctaccacctcccagatgcacagcataggccaatgatggggcactctcttcacattctaagcaggacaccaggacaccaccaccctgccactagtaatttgttccctaataagtctccgtttaccttcattcaaggactcgaagaccaaagttataaaaatagtaaccaataaaattccacgacctcaatactaatcactctttactcccatccacatcctcccatttgacctgacattgaggtggatatatttgttcctttagttcttgccctaatataaggtaaatgctcagagtaaactgccagatatctactgaaccaaccggtatcaggtccctgcctaagataacaagggcatccttcaaagggggaagtgggagggccaaggatatcccttataacagccctccccatggtccatctccctctagcacaaacaccaattgagctggtttgggggaaagaataaaatatcaaggtcttctgaatcagcacaccaatcagcccaagcaaaaaagaatgacatagagcctttattaaactggttctgaggtatgtgggactagcctggctggctgaccaggcttcttgagccccacaggcctctttcacagaaagggagtttggatcaacaagaccatgtacaaaagggggataatatacctacgtgaggagccaagtttccatgttgatggtaaatggaaaaacttttgagtcagagctgagctctgggacaaaaagggaaaagaagagggatgaagggaaggggcccaattcctcttgactgattctaaagctcatagggggattccaactcacagctagccctctgtactaaggaaccagacgaatcttgacctcccagggaacctagacctgggaaggctgaacttgctatttgagggtcaagtctactccctgaaggtggagtgctggatattttgatggggacaaggagggacaatagatcaacctcagcaaaggctggtaagcctgggcaaggttccacagggatggatcttcctaaggggtgggggggcttcccagttcctagaaaatggcggtgcgcgcagactgcctccctcctcttcattgtagcttgatcctgcgcagtgaccgttcctataaaagaaaaaaaaaaatcagaagaaacttgatacataggaagacaaaacagcagagaaataagacaaagttaaaatcacaaaatgtaattggcagcacatctgttttccaaagatatttacataattactcccattctcacaagaattctggattagggcattatgattgtgtcactttccagttgagcgggcatgcccacaaagggtaaagtgtctttcccatgatcacacagcttagatggaagacttgggacttgacaaggggaacttctgaccccagatctgggttccaccagccccaacccttcatcagttaccatagggagggaagggagaaatgggagcgaggcggcagcgagcccaggaggaaaatacccacacggaaagagtcaggcctgggaggggccggaccggggcacaaatgctggaggtttcagagatgggctggcgctggcgaaggcaggtctgccagtgacgtatttgtcctgtgggtcctgggctctttcgtggcacgcagggcactctccttcctgggatgggagaatggaattcttcttccgtgagagagaaaatacggaggtgaagaagagcagaatgggcgagtaccagactgcagctgcagccaagccagggaagaggctaaagagggtcctcggcggctcccgcaggacattccctccccagccggtcgggaagctccacacctaggcgaggacgggcagcagcggccctgggaaggcttccgtggaaacttccaaaaccaccttgccaggtaagtgaaagtgcgctccgttctctagccacatcctaggccaagtaagttcttcttcattctttcagcagtcctgatcttcttggggagcacccctaaatcagcctgtcaagaaggaaggcaggctacgggtatcttccaggaacagatgaaggttgcgaaataactgccaactgtcttctgctctggcagttatcccgttagccacgcccatcgccccacccttctggcaggcctcctccaatcagaggccctgccccacccagggagaagccctgggccttccagaaagttccacagcctctgattggtcctagaccagctttcctgggtgggagtgggggcaggggactcctggagtccatgcagtatgcagagggcgggggcttggaggaaagtcgttgatgatgagcactgcctgttggggctaagggaggtggggccttccagaatttaggtgggccatggcctggcttctgagaggacaggcccgacagagttagggctgtgctggtactgtctcctgctctctacttaacaggcctttgaaccctgggtgcctgtgatcctggagtcttttcattttaccccagtggaaagcaccacccagaaggcacttgttttgaggtctcacaagagttaagagtacgactgcaaatagacccccccagtgccatcctatgactttttcccaccaaccaaaggcctggcactagagagaaaatgcttgaacagactcagtcagctcctagggacccaaagtcctaactggagggtttgctacaacaccctacttttcttcccccggctaatcagcagtgcctggaaaacccaggctctgcttcaaagcctcagcatcaagggtccggccaatgggagaaagttgctgagcagatgagaatgctcttggccaatggaagagaatgccttaaaggccaattgggggatgcccatatatttatatttattgggcaagtgttttgaaagaccttgttctgaaaagttcaaatgtaccattatatttgagcctcccatatccctttttaaaaaattgatataaaattaatgtagcatagaattaacagtatttagtgtacaatttagtggctttcagttcaatcataaaattgtgcaatcattatcactaaccctattgcagaatatttttatcaccctcaaaagaagctccatacacactggtatggtttagatctgtgtcctgcccaaatctcttgtcaaataataatctccactgttggaggtggggcctagtgggaggtgattggatcataggggtgacttcttatggtttaataccatcctccttgatgctgtcatggcaataatgaattctcctgatatctggttgtttaaaagtgtgtggcacctccctcctccctctctttctcctgctctggccataggaagtgctttctccccctttgccttctaccatgactggaagtgtcctgaggcctccccagaagcagaaactgctatgtatgctttctgtacagcctgtggaactgtgagccaattaaacctttttttgtttgtttgtttttgaaacaaggtctcattctgtcacccaggctggagtgcagcagaaacttctttataaatcacccagtctcaagtatttctttatagcagtgatagaacagactaacgcattcattaagcagccactccccgttctgccctcccttcatcctctgattggctttctgtttcaatgcatttgcccgttctgggcatttcatgtaaacggagtcatacaataggtaaccttttgtgtttggcttctttcaattagcataatattttcaaggctcatgagtatcatagcctgtgccagttcttcattattggtaaggtttatattccactgcatgaatataccatatattgtgtatccaattgatggacatttggattgtttctactttttgactgttaggaataattctgctgtggacattgtgtacacctgtttttgtttggacatgtttccagttctgctggatatgtacctaggagtagaattgcggggtcatgtggtaatcctatatttagatttt

SEQ ID NO: 1882597 - DNA, 4001 bp, Homo sapiens
atcctctgtgcttcacgaagttctaagtagcttctccctctgagctacaggatcgacgcaccccacgggggtgtgtgggggtggggtggggagatgtgctgcgccgagcctgctggccgctgggtgcgggagcaccagcttctgcaccagcccagaacgaccgtgggaatccttgcgcggctgcagaccacctctggtgccgcaagcccgctgggccgacagagcgcgccgctttggaacccattttaaaacgcagagtcccctgagctcgccttcttgaggcagcaagggagaccctagcgcgacctgtccacccgcaggaggcgctgggaacggttacaaccaacactgtaatgagcaatgagtccgagagaggggttggggtgtgtagggctggagattacctaaataaataggtggcagtcccaacttttgctgttttttttttttttcttttttggcatttgcagctgagaatgttaggcaggaggtgtgtgtgcaggcgcaggggcggagatcttgacttcactcgaaaccagaaattgggtttatgtgaacgatgtgtcacccgctccctcctcccttttctttctgaagattattttaaatcgttctcctttcaggccccccaccccggtagatggggacggggtgacatcccacgggtactggctcttccctgggggggtcctgtcgcgctagaggaggggcgcagggaccccacgtcagaccagtcgctttgttttcgaggctgggggcgagctttgcgggcaggtaggaatgaagccgaacccctcagtctcataggacaattcatactgtactggtctgggctttggccggaggcttgggcatttcactttcgcagaggccgaaacccagctccaggtgtgggcgccctcggcgggcggggtccgaacctccgtgcggctctaggtgccgactggatggggtgggtggctaggtgggggatgaacttgcacccctagagggatcctgtgggggcaagtgtgaatgcgtgtgtaagcgaggcaaaaaaagatgagagagagaggagaataaagtcaaagctgtttccacaactttggccgtggtgggcaagcgccggagcggggatttcgggtttcggagctggcttggggcagtctgattgtgccggggctctgtagggacacgcaggaggcgaggtgccgcttgttctgacaacctggcgggtagactggcaaaggcagcacgccgggagagctagtcgtgtcatctgggggggcgtcaggcgggagtggcccagccagtcggacgggtttttgccgggagccgcgagccggtgccagcggcgcccgggctgggccgcctagcgtctgtgcgcgccccggcccgcatcccggctcccgatccggaatccccggccccagagagccgagggcagagcgacggtggccggggagcgcacggtgcccctgtccgaggaaagctcaagaggaggccgaggagaggaccagtgcagcgagcgggccggtcccgggcagggcgccgggtcatggaggagccgcgcagcagcgggcagccgagtcccgagtcccagactcggctgcgaagcggcggagcccgcggccagacagggccgggaagcgcctgccgcgccgagagccccacgagcgcccggacgcggtcccaagcagctcctacccgctacgcacgacccccgctgcatcccgaggtctgccccagccttttaggtctgattgtcctcgctcgcttcctctccccttccccctcccccgcggcctccccctccgtgcgctccggctgggccccctccccctccctccctcccttcctccctccctctttccctcccttcctcctctcgggctctccctccttccctccctcccctctccccacccggggctcctctccctcgcccacactttctttctcacacacgcacgcagacacattctccctctctgcgctctctccttcggtctccctctctgcctctttctctttcacttttgcatgccctgcaaccttttaaaatgttgccccttccctgtgattcgccagacgccgcgccgcggccccccgcgcgctcgcccgctccctctctcgctcgctttttgtctctcgcgctccctctccccactccgatttgctacactgagactcccgtcaatggactgcattgagagccggctccggcgcgagttgcctctccgcttcacgctcgatttccaggcattcttcccttattaagtattcgtgtaatattaatagtcatgaatatctgctattaggaggctccaggaacgctgcccagcgcggttattagaagctcaagcgaagccgccgctaagaaaagagggggagacacggattaaggaacacgcacgcacccacacactcacacatactttttcctttttccttttttggggtttttcatttttaaagaactttgaatcataaccagtcgcggcaggatagagaccgtgggttcgaccagctgaaggcgccgcgcgaatcggtggttcaagttcggatggatccgagccgggctcccgcgctccggggagcgtcggcgccgtgactggagtcctgggtggcgcggggctctcggcgccttttgtgtggggcgcgctcgggcggcggggcagccgggcgctccaggcttgcttgtttttttccaccctgactcgttaccccagactcttcgcagatgttagttcacagtttttcagccatggtgagtcccatccccacccccgttgctgtttctttaggaattggattctggaaacctggtgccgtggagctgcccgaaacctcgggtttcacgcccagctttccttcaggacaccctctccatttgcatcccccaccccaccttccgcctttctctcgctcttttccatccctaaatcgagtgcattaccccctaccccagcccccgctcgacctctccgagcacgcagacctacctcgccgcggcttcccaaggcgtgtttctccccacgttcatcttgatttccttgagtcttcacttgtccccgagatgttctcaacatttgatgcttaaactgtctgcaggaaaagtgcagcgcggtgtgccccctaccctcgggacctgcggccgaaccgccgagggttcgcggtctctggaatcaactctcttcgcttgttttgcaagggaattgcaatagagaaacctaaagtcaggcgtttcttctgccctttggggctggggtggaaggggcggggggggggggccacagccccggggtgcacctctctcttttaaacccaataaggctgaatctttctattttaaaccttgacttgacgtccccctttccctatccaaaccataaatcgactctgtcgagaaaaaggctcctaacagaggaagcgaaaaagacagaccccgatcctgcagttaaaaccttctttaagctggtaatttaaacgtgtgtttttgttacagcccctctgcgaaatatgtttctatttaagtagtcatgaaacggtaacagtctttgaacgtttatgatttttttctctccaaataaatggaagagaataaacaataacgcagtggcagacaggttcaaatcgggggaaaagaaaaggccgcttctgctgtttagtatttaggaggaattttaattttgcttaagagagatttcacgctgcagtttaatgggctgtgttccaggagacccttttctatcttttcctctctttgaaagaaacccctaaatagtctcttgtgccccctccatatacagtttctctgcgttgttcggtctgtttcacttgagggtatttcctgaaaagaacttagagctgattttttcccggcggccagccaacgggaacgggcgatttcccacgcagacttgtcaagtggattttgtgtggatagttgtagctcgacgcctgattccttgttctttacctttcctctcgctctcttctaggaccgtcacgacggcacc

SEQ ID NO: 1882598 - DNA, 4001 bp, Homo sapiens; identical to SEQ ID NO: 585935

SEQ ID NO: 1882599 - DNA, 4001 bp, Homo sapiens; identical to SEQ ID NO: 585938

SEQ ID NO: 1882600 - DNA, 4001 bp, Homo sapiens; identical to SEQ ID NO: 585946

SEQ ID NO: 1882601 - DNA, 4001 bp, Homo sapiens
cactctgaggctcccctgaaaacgttggggatcgagggttacccagggaaccccagggcggctggagggtgggcagagtgcaggggggagaggaaatgcgaggcgatgagcacatggcaaaggcaccacctccgtccgccagctggtaggagactttgaagctgtccgcccgggatggtgggggcatccagttgaccttggctgaggtctccctgatttcactgaattggaggtcacgggggctctccagaactgcagaggggtcaaggaacaatgacgcaggcaggggcagggaggctcctccctgcgagtccccccctcgcctctgctccagcacaggctcaccaccccttttcctctagtccccaggaatggaagtcgctctgcagattcctccaggcccaccaccaactcgcccacccccaccgctggctgaggcactaggtcccccccgtgaagtacaaagacccccactttggggcagagtgtgtgtgggtccttacctgggctgagggtgcgggcggttccctggatgctgtcggccttgtggggtcctcgcagcccatacagtgtcaggctgtacagagtcccggaacgcaggtcccggagcacggccgagtgccgcgtccccggcaccatcagctcgcgctgcagcagtggacgcggatgcggctccagagtgcttggtgatggaaccccaaagcggagcaggaaggagtcgaaggcccccggtggggcctcccagttgagcctcagtgaactggtggtcacgtcagtcacagacagctgggacaggcggggccttgactcctctgaggtctgaccagcaggagccagccctgcacggagtgggtgggggagaagggattggagacagaagcacaccagcttggtgacccagagcacgtcccttccacccccctccctgcccccgtttctctatctgtaaccagggacttgcagccacaggggggtcctgtggggcagagctaaaggccactcgcatccagcccatccatcctctctccctggtacccgcctcacgctctttccctgcgaccaccccttctgagcccccgtttctcccttctgagtcctaggctagaggccggagacgcctggtggtacctgtggtgccctcagctgagaggggccccaggcgcttcccttcatggaggccatagaggaggaacctgtagcgggtgctgggctccaggcctgagatgaggatcttgctctggtcgccgtccacgagcaaggcctggggctgcccattcgtgtcctcatactggaccacgaaggaatcaaaggggccctgggccacgctccacgagaggcgcatggagtctggggttgtgtcggtcacggtcagcactcctaggcggggctcttcaggaggctcaggggcctctggggctaactctggggctggtgtgtcctcttctggggctgcgtgggagaagcccaggggagaatctgagtgaggggcgccatggggtgctccatttttatcttccaggcttggcccaaggctgaggtgggaagtttataggtccaggcccagtcagacaatgaagtcgctgtggcctcgtgactcctgcgagctcccgcgctgtctgagtcaggtgctcgcttcccccttccacaccccggtgtcctgccgagcccacctcgagatatcacaggctctggccccacccatgccgggatacattcactgagcttgaggagtgtggtgctcccttctgagagaagctgagggtggaactggctggttgaggtgactggcaaatcccaccagccgtgccgtggtcaggcctgtctgaggtgggcatcagcgagctctggaagaggagcctgtaccacaaatgcagccactgctgttggtttctgtgtccccgctcattttgttttccagtgatgttcctcttaagaaaatgctcctgactcatccacggcagggaggtttgccactatctggacaaggccacccttcggggaggcgacagcagccccagcgagtaatgaggagcagcggcagtgacggggcagagtcggggctgggagattagagagcccctcccagggcctttccctcccgcctggcctggctcctgctctggactccttgatggatgttgaagcccacagggctgcagactcctcctccttcctgggcacaggccaggtcaccccactccggcctgcccactcctgcagtcatctttgtcttcagaccaaatgcacaagtactttgttaaaggtatcccatctgcagctcaagcctgcagcccctcaccttttggtggctcctcaggcctctaggccttattcacctttcccctttcctgtgccacttctcctctagggcgccaggctgtccttggcatggtccggaaggcaaagtaccgggagctgctcctatcagagctcctgggccggcgggtgcctgtcgtggtgcggcttggcctcacctaccatgtgcacgacctcattggggcccagctagtggactggtgagtctttccctggcctctggcagattatggagcaatgacccaaagtgggatttcctcccagctcatgcttagtttcctagtgaaggccagtggctctcattcttctctggaacccgggagcaccccttcccaagttctaagttctcctcacagcttgagcctaggcgtctggctccagccttgtctttctcctgcacagcatctctaccacttcaggaaccctcctccgcctgccagagacatgaagattctgctcatcattgctcagctcctcagagtgggccgggaggggactagaagagctgcatgatggtggctgagacagggtcaccttgggaaggcttgggagccaggatgagtgtcgggctctcgtgtgtgcaaaaggtcagatgtgactgctgctgtttgcctggtttctgacccagtggtggggtttgagcaatgcttctctgcccttccatggaaagtggaaccagaaatggtgccaaggctgtggctgttccctttcgtgtaaaatggtgctgttattactctgtcttgaaataggaaggtgggatttctggggaggctggtgaaggagggcagggttcttttctctacgtgtcatgttaaaattgccaaataaagtacctctgcctgtgatattttctggatgtcctttatttactgtgacgtgtgtttgggtgccttgtttaggggtagaggtgaagtctgagctttgcctcattcagagaggaaaggggtcaggggttcactctgacgttcaggccattctccctgtggagtggtgagggtgtacctaatctcctaaaccacggaatttctgttagggcctaaaaaagcaaaagcctagtatagttcaatttgtgttggaatgaaagtaagagacaagtgtcttagaagcctgtcattgttttgtgagggcctttaaatatcctgtactcgtgggccatgttgggcccttgtacgcccaggtatacatgagcttgtgtgcacctataccctgatacagatatacctggtagggggaggtgctcaggcactggaatgagaggagttaacggggaaggacagggttatttctgggccaagattcagagtttcccatggacacccaggtgtccggggtgcccccacaactctgggcctgaggccagttgcacttcttggctgtcacgtggtttcccagcttagctgggctgggggaggagcaaggtccagagtcaactctgccccgaggcctagcttggccagaaggtagcagacagacagacggatctaacctctcttggatcctccagccatgaggctgctctgggggctgatctgggcatccagcttcttcaccttatctctgcagaagcccaggtcctggaggcgggatgctgggtgcttggattggggcagggctggcatcgggacccgattcaggagtgagggagagcaggggtggaggtgtcagagcgaagtctgactgctgat

SEQ ID NO: 1882602 - DNA, 4001 bp, Homo sapiens
cagggagaagaggctgcatgagagaaagaaaaggccatatgcatcagtggctgggtggccagggccttgatgatggtctgggccttgagggaatggtgaggcagggcctcaggacagagatgacaggaattcaactagatagagtgctaaccttcctgtagtcacagacatcagctctagggtgtggtgggggtgggtgtcaagtggccaactggcagctccctgtggcccagcctgaaagggagtgggggctggagtcaggtctatttcggtcacagggcctgagaaggcctgccaagtttggatggctttgagtgtgagaatagctgggcgacagaggcagtgacacaggtcagcctctcctttgcccattcttagcaaaggaagccaccaattaaagatgttatataaagaactacatgttaaaaaaagaaagaaagaaaaaagaaatataaaacccaaaccaaccaaattacaggccgatgggcgaattgtaagtggtaggggggttagttaaacacattttggtgctttggaagcccctcccattccgtgcctgcactagatctttttttctagaagtgagagtgagaaaatagaaaatctttttgtacattttccttttcctctttttttttttttttttttggcctttccttttctttctcttttctgtggtcttgggtgctcccggccccagggcaggtagacggtcagttggccagcaccacggactggaacggttgactaggatattgcatggtgttcaggttgtagctgaggtcttccatgaagggtgccttctccaggaagaggcggtggcaccacctccaaatacctagaccatgtagaagctgctggcgttgcaggtgacagtcccactgcctccaaagagggctcgggtgtcactaccctggccattggccccatcaaggaagaaactgggcaagccaccactgttgtacttgagactgtacgtggccttggggcgagagctgggattgagaggccggttggccgggatgaagttcaatgaatgcacagacagagaaagactcctgtgtttcaacaagctgttggtgttgaagcgggccgtggaggctgctgtactggctgctggccacctgcttcaccgctggctgcacccctaccacttgttgccccacccctcttcttcatcttagtggagcctaatttggtggcagcaaaggagtccatggtgaaggtgatgggctgggcgaggcagaggatgaaggtggggctgggtgatgggcaaagcatagcgacggggagttggacaaggagctgtcctggcttccgaggagaaagagcatctggtcgtcaggagtgaaactgctcttgatcttcatgtccagctccggggccccacagccgtcactgtcatccaggtacagcactttcactgctcccttctcaccaatctggtaggacaccccgaaggggtcaatccatatgctcagctcctcaggcacattggcccgcacatcttccactgtcaggccacttcgcttagcggccagctccccaacggggtccaccatctcctcggtgtggaagccagagcccttcagtggtttgtcagggtaccagtgggcttcttatttctttttcagaggcgccagagcagcttgttgtacaagtagaagatgatgaagttcagggctactttgatctccagctgcatggtcctttcctaggcagagaatcagcacaggggacgtgcacagccttgggctccagaaggcttccggtctccaccgcggctgggcgctctgccagcctcggggcagcttctccctctagagtggccctgagcgcggggcggcggtcgctctctcttttttcccccggagccgcccggccgggggccgaagtccttttcgtcgtcgagggttgggggaagcaggcagctatggtcatgactcccaaaaataattccttcagcgcttaggaggttgggcggctgggggacgaagggctggcgggcggcgaccgggcggggagaacggaccggaaggtggcccgtggggggggcggggggagcggaagaaggaccgggctgtgaccgcgggacggtcctgtcctcctggccctgcgtctctcgagctgctggcttctctccgccgacgacccgcaccttcccgcgccccggcccgaagtctatacattttttaaatgtgcatattctttgacacgggaattctacttctaggaatttatcctagagacagactcacacatatgtaagataatacgtgtctgaagctcagcattgtttataaatggaaagtgataggaaatattaatagcttaattgcttatcaataaatgactggtgcataatgaaatagtatgcagctgtcaaaacagagctgcagctctacatgtatggctataggaaaattttctactatttctgtaaaatcccagggcaaaattatatataaatatttgcttctacatacctaaaatatctctgaaaggctgtataagaaatgaaggccgggcatggtggctgacacctggaatcctagcactttgggatgaggaggcaggcagatcacttgagttcaggagtttgagaccagcctgggcaacatggtaaaaccccgtctctactaaaaatacaaaaattcttcaggcatggtggcacatgcctgtggtccccagctacctgggggcctgaggtgggagaatctcttgagtctgacaggcggaggtttcagtgagctgagatcgtgccactgcactccagccttggtgacagcacttcagcctcagcgacagagagagatcctgtctagaagaaaaaaaaagaaatcaatacctttggctgtttctagtggatgaaattaggtgactagtggtaggaataagttgtatatttctatttaacaaatttttattttgaagatgtttaaatatgcaaaaaacacagaaaatagactagtacatgtccaggatcccttaatcacagttctaaaatccataaaattctaaaaactccaaatctttcctccataaatttggcactacaatctatctgaggggaaaacctgaacttcttcatagcctttatttaactcatttaaagtgactaatcataaatctcaaagcagaaatattgaggtgtttgatatgctctgaaactctgctggaagttacataatgtacagtgtatgcacattatctttctaaaataaaaaaaaaacaaaaacctgaatttggaaacacatctgctcccaaaggtttatgtatttttaacttaaggaaaatatcacaagatacaaatttagaaaaagagagaaaagactttatttcttcttaagggttacagcctgcaaggtggccagactacaggctgggaagccttcctctggccacatccagagacaggcactttgaaggaggaggggttgaggtagaagctttatgctgaatgagttgaccaaacatacatattcaacaggttactgaaggagctatgaatattcaggaaggggtcctgacacatgcacattgaacaaacgtgcatgttacatgttcactttgaagtagagacttaacatttgcatgtattacaactaggctctatacgtcaaatggtcactttaggacatgagagcacagaagtgcacaatctctgtaaaagggctagaatgagtccatggttggtcttatcaggagaaagttactaaaatcagtctcacgttcagtcaaagctatagttacagttagtggaacaggggtacagtttgtcagcatctagtggagctgcaaattgtttgaatatttcttatctcggggcagtgcttgtttagctgctagagaaaaaggaaaaccttgtggcagttaaaacatagtttcttctttaaatgaaaggaagcgtgacttaaaccttccttggcatggacttagatcctgcttataatttggtatcttattgccacaaagagcctattctatcagtcttatgatct

SEQ ID NO: 1882603 - DNA, 4001 bp, Homo sapiens
atcttttttcccagaagatgttgataccacctaaatttctaatagcaaatgctggaatcaattcaaatatctattaatgggtgaggaataatttatggcttatttattgaataaaatatgcaagattaaaataatgaattgagtgatgtataataacgggtgcaatttggtagcataatattgggtgaaaaaagtttcaagagactacatgtaacataattctatttttataaagcccacaaataaggaaaaccaaataatatattgtttgcaaatgtatgttagtaaactataaaatatagtaagagaattataaatggattgctattagatttacttatttgagtattatagattttatacttccataggatattattagaagaaattattagaagttatttatgccatgaaaaataaaggtagctagtatgctggccataaggtcaaatatagacattgtgattacacatatgtagttttaccttctttacataaagtcatttacatatgactttcccttctttacacaattattttcactaaattatcccttaatattatgctcttaaataagaaagacattaaaacagattttgcagtttctgctgtcattattcactatgacttttaagacttcccccatgtgcattctaatgacaagaatccttaatatgtagatcatggacttctagaggttccaaggataggcttgaaacagttcatgaatctttgaaaatgtctataaaatttctttgattttctttttcctttttttttttttttttagtgccaggtgtttattccctcacacgtgggtggttcacatacacagcacacacaggcgcgggcaccgtgggagagggcagcactcatggcttccgaggggaggatcttggcctcagggtgtaagaaggaagaggatggtttctctccttccctcattagggcctaggggacccagcagcaaatcctgccccttccacctctcagccaaggagaagccaccttggtgacgtctagttccaacgattatactaagtggagaagggagtggcctggtcccaaccattacagggtgaagatataaacagtaaaggaaggtacagtttggatgaggccgcaagagggggcagatgacaccatcagaaacatgtgcaggggaggggcagttactgggcttctgggctgcttagtccctggcttggcaggaagggtagggaagatggatggggctcattgtttggcattgatgatgtccacgaattagggcttgagggaagcatcacccacgaggaagccatccacttcaggctggctggccagctccttgcaggttgcccccatcacagagcctccataaatggatacgggtgctctgagccaccacatcagagatgttggacaccattctcagaacttctcgtgtacttcctgggccttctggggtgttgcagtcttgctggtaccaatggcccacacaggctcgcaggccaggacgaccttgctccagtccttcacgttatctgcgatgacctctttcttctcgaaaacaaacttctcagtgatgccacttccctttcagctagcttctccccagtgcaagcgattactctgagtccctttgccagagcatgggccactttctgcccaatcagcttatctgactccccaaagacatgcctactctctgagtgccccaggaccctcgattggctttgcagtctttgatcatgccagggctgatctcccaagtaaaggccccgttagttactttgtagcagttctgcgcagccacagcaatcttgggctctagcttctggggcaaagtcggtataggcagtggggagagtgcaaaccacctcagtgttggccggcaccttggccgccttcagagtgcggatgagctcccccaggctcttcttccgtcggttcatcttccagttccccccaacgaacttcctggaggtcgccatggcgctggagctgaggtgctgaaggtcagcgtcagccttcagtgattttctaggttggggattataggttttatgatattctaaaaggtatcatgttaaaaaaaatgtaagaacctgtgttgtgagattagtatgggcaaaagcttaaggttcatttctcttgaaaagttgaattgcttcctcacagcagatactaaaaatttattacacatcatggttttctttatttttagccactaggaagctcagagtccagctaatgcttattcataataaccatatttgtctttaagtctggcttattttcttccttctcacactctctttttttgaattcttttaaattgttattctatagaacatatgtggagttttataggcatctgctattttagcctactctaatacatgaataataatgatcagtcttgacatgttttacattttagaaccttaaattataaagaaaaaattttttatatcttaatctatatactaattaaaaaatacatttttaaattgcctttctgagcttggttggaagactcattgtaaaccaaacatgacaggctgtttgacagaattgtaattaatgaatgttggccagaaacctcctctagctacttccttacctggctcccattttgcttctgtggctctcatgctgattggtgctgtctcccctgcctcttaccttgtttatcccgttgcttttcaattctaactgtgcacatctttgctggagaatttgacacaagctccctgtgctttcccctcatttgcgggtttgtacacatgtgtaggattcattctgttttcctccaaatctgcaaagcaaggcaggaaagtgtcttcagttgggcctttcttcactctacctgaatgagacccaggtgcagtagaggagaaatatgaggtgtagagaaaacaatcaaaagaaaaagaggagacacattagtttaaaatgtgggtaaaaaaggcaggtgaatttttaataaacattagaaaagaagatgtttattaaacaaatgatcccaaaggcaaaaataaaagaaataagctaatgtttaaggaaaacaagtaaagtgagaatgtgtgagaaacgatagagaataagaagggatttacgagtagacagataatagtatgcagtagctgagggaaggctggatgtggatattgtgctcagtatggaaataagtcagacaaatatgggcatgccagaaagttcatgattctgtgcttatattattttaattatatttttaaagtccctggagcttttgctcctttaccattgggtctgtagtgtagaaaatgaaattctaatcattgtcattgaaagtgaattaagcccatttcttccctcattctactttctttatatcaaccaaattatctattacactttggtgttgtttatctttcttaatgtaaaaagaaagcaatgcacaaaaatacgaacacctgttgtacaggcagtggaaccaagtaagagacttcagggacctaaaattaaatttgttaaagcaacttaatagtaatataaaaaatcttttatatttgctaatgggaaattggctgtacaggcattttaaaggtggtaaaaccaaaggcttctgtagggtattagagtaagttaacagctttgcttggctgagtgattcagaaagtctacaaagaaagcagtgatacatttgggtgtgcctgacattctccattaggacaaacatgaaatatgtgttatttgctgacttaatattcaaagaaatactatgttaataatactaaaagtaactttttttctcttggcatgctcacatgtagaatatgaaattgctttttgaggagttaaaggaatacataattgaacttggattagagaaggttcatatgtttctgcacagttccaatgttgacataggacagtgctcatttaatttgctcaacatatctgtacatttaatttacagttaagtacattgatatctatgttgtaacgttattttacttatttaatgaata

SEQ ID NO: 1882604 - DNA, 4001 bp, Homo sapiens; identical to SEQ ID NO: 585965

SEQ ID NO: 1882605 - DNA, 4001 bp, Homo sapiens
aagtaaataatgttgattcaagaggtaaggggaaagaaaccctcttctagaaatcgcaaatctgttaatttgatgcttttaccattttctagttaggaatattataatttaaaagttatggatacactgattataatatagtacaaggattctcaattttattttgcttaagaatcacggggtggcaagtagtgttgctaacaatacagattcccaggccccatcccccaaaatataattcagtaagagccaaaatatcaacacttaaagaattctaggtgtcatggaacactgagaatcactgatattgtgtatctgacattcggcgtgtacaaaatatttattttataaaaaatacattttagcatggtagtcatattttaaaatcacttctatagccttctaaaatttcagatcaagagattttgcctcttaaaaatattagctaatttccagcatattagtagaaatcttgccacgtatgtttataatcatgctctgaggttaaaaactacaagctaatttactgtagtaatcagtctcaaatccctcggagcgtaagttcttattatagcatttatatgttagggaatttatagacagcttcttaccagtgagctgtctctttgggccttttgattttcctatttgaaaatccacaacggttccaaacgagtagctctcacaccacttcaaatacgtggcaacctggtaaccactaaaatgcacctgtataacacacaaatgtaaaagaacgatctctacttggatgggttagaaatgtgtcaagggtcctaattcaggggcaaatttcgaacttgaacccacgctttctgcctcctacagcttgcatctttttgttgagaagaaacccttcaggattagtttttaagagaaaccttcccgttttacatatgtagaaactgagcccaaagaaacaaaattatttgtccaaggtcacgcccaatatcagtggccaagtcagagaggaaccccttgtttccaatttaatagccaagccagctgcatgttactactctttaaaacaaaaattccctaactgcatcgcttcaccccctctcgatttttgaataaagttgtttattcaaaacggcccttccccacggtggtgcttttatgccttcgggtagtaaaaccttccataacgtgttagtgaaaaacacgaggaggccacgtctaacgcggtgactttcacaggcctttttctttggccaaaattttctcggaaagactgttaatcctacattccgctgggggaggagcgacgagggaggagggaggtcaccggcagctgacaagtccttacatgtacttgcgcgtgcccgggacgcagcctgcggggccgaggaaaccaacgaaggatgtattaggacgagagggaaggaagggggcgggagaaaaacacggtagtgggaaatccctgtgcactggatctgccaacccctcgcaaagctgagaagagccgtgcgtgaataaatctcattaaatggcccggcgcagacactgcagcagcaaagaggagggggcaccgcggctcgcgcggcacgttcgggaagggggaacgccagggcggcccttttataggccgaagcccgcgcccgcgcgcccccacccttcgcaccgcccccgggccacgcgcggagccgcggcgttacctgagaagggccggctgcgtccgcacccggccccgcccgttccgccgcccgcccgcccttccctcccgcgaggccgcagcggcacgagatctgcgcctcgcctccctcctcacgcgggcggattttcttaccttgtgaaaaaccgtctcagcggctgcccccgcctcctctgctggatgtgaaatggcggtcggcgaggcaagtgtgagcatcgcagctcctgccaatcctgcatagccgccaaaacggccccgaacactggcgcccccctcccgcaagcccctcggagcccatccatgagatcggtgctccgccgccccttccgctgcccctcacccaggtgaccgtgcccgccagccgagtcatcgatcccgcgcgggcgctgccggccgccggccgcctccctcgccgcgtgcccggggagggggagaaagccccttctcggcccccgccctccgtgtcccgcccgggcgcccgccctctcgctccttttcccgccgagccccctcccccgcactactcgcagcctcccttcgccacacacacccccctctcccctccccccagtggttgcgtccgtgacatcatcatcatggcaacaagagctgcagcctgggaccgaggagcccgtgtgattcccggcggtggcggcagtggcggcagcaccagcaccgacgaaagctcgagggcttctctcctgcggccccttgccgggtgctcctgaggaggcggcggcagcagcgcctacaccgccccgcccgccgctcctcgaggtgcctctgtgtgaggggagggggccgtgccgagaaggggagggggcgccgccgccgctgcggagggagccgccgccgctgctgctgccgctgccgggtcgccagtgaagggaggcagtggcggcggcggcgaacatgttttcagtaaggatagtgactgcagactactacatggccagcccgctgcaggggctggatacctgccaatcccccctcacccaggcccctgtcaagaaggtgccggtggtgcgagtcttcggagcgaccccggcaggtaagcgggcgccgggcgcggggcgggagcgggagtcggcggggcgccggggccgccctccccgccgcgcacacgcgcacacgccaccggcgccggccgtctccgtggatcgctgccgcgtcttccctcccctccgccctcctcgccttttctctcgtgcgtgacaagagccgcaaaaatgtgggtccgcgcgagcgctgcgcggcgcccccacccccgggcagggaggtggcgagcgccgcgtgtttagactgcgtgtggcggccgggagcgggagccgcactccagggcgcgggccgggagagcgaaagccgcgggcgccccggacggcgggccaggtggccgcgccatgtccatcggtggacgggttcgtagggcctgctctgaggtcggtcgctagtgggacatcccttgtgtcccccaagtgccgctttctggaaacggggaagtgtcagccttgttgtcagtcgctccccatggtctcttctcaccctcgctctcctctgccagttccggagatgcagtgggccggagagagtggcgcttggggccagataatctttctcactggggtgaccgtgtggctctgctgtgagtgcaggtcgtgactccttagagtttagtgcctgagcgtcgggggacagggcagcatccttaggtgcagtgctttcaggaaatgtgcatccatggaagtaggaaatgcgtgtttatgttgcccaacctaaaacatcacacttaatggggtgaatttattaggaaccacagccagactcagcagcacagacattttgaaatgctcctaggctgggctgtaggattgcgttttaagtacaggtatatattttttaaacacaactatgttgaagaagggatgggaaggggagacagccgtgacagaaggtacgttctcaaaaactcctggggcttatgataatataaaaaagatagaggcccagtttactaggtgttttaaaatggttttgcttttttgcatgctttgaactgcttccatgaaataatggagttctaggaaataatgcatcttaggaaaggttgttcttccctctagctatgaattgccctatgggattttagatagcatttcccacttgatgctccttgccctcatcaccattcatcttattactacagtcagtttctgtggactaccaagataatagcgctttcccaaacacaagcactcattttaaagcagttatcttttaatgtgaattctctttgttaaaatgtcaatgttgtgagatttggtagcatatt

SEQ ID NO: 1882606 - DNA, 4001 bp, Homo sapiens
ggaggacatatacccatatgccacgtaatgatattcaggtcaaacaacatataaaacagttgtttcataagatcttaatggagctgaaaatttcctatcacatagtgatgtcgtagccactgtaacattgtagcgcaatgcattaaccacgtgtttctggtgatgctggtgtaaacaaacctactgtgctgccccataatatagtttagtataaatgtgtagcaaaaggctgggtgcagtggcctgtaatctcagcactttgggaggccaagacgggtggatcactgaagatcaggagttcaacactagcctggccaacatggtgaaaccctgtctctactaaaaatacaaaaattagcagggggtggagggcacctgtaatctcagctactcaggaggctgaggcaggagaattgcttgaacctggaaggaggaggttccagtgagccgagatggcgtcactgcactccagcttgggcaacagagaatccgtctcaaaaaatggcggatcacttgcggtcaggagttcgagaccagcctggtcaacatggtgaaacccccacctctactaaaaaatacgaaaattagccaggtgtggtggcacatacctgtagttccagctacaggctgaagcatgagaattgcttgaagccaggaggcagaggttgcagtgagtccagatctcgccactgcactcctgcctgggcaacagagttaagactctgtctcaaaataataataatagcagtgggggtaacttaaattcaaccatctaaacctataaagaaaccaattgtataaagttcaacctcataggtgtggccgcacgttgcaaatttgaacacatcttcacaggtggaaagtcgaggtgcttcagagttcttgatctttctgttcctcacaagacgaaggttcaactttgagaaaggtcagccttgaagttaaatgaggtttagtccaatctaggcattactttgtcatttccttgagagtcagataagggaattacagacccaagactgtattttaagtaaggtggagtgcagattgaggaagtaaaatttctctaggaactccatcctgtctcaattacattccaccgcgtgccacttttaaaaaaccatatttatttagaagtgaaataactgtggacctaataaaaaatggaataggaattagttttttttgttcattacgtatttctgcacatctagaaagtaactgactgcttcattactggtaggattaaatccaatatttgcgaatataatttattaagaacaccttttgtccttccaggagtacttttaagacttaatattaaatagaaactttcagtgagaaagttccttccttttttgcttcttctgtgtttattcttccacttcttctgattaatatgtaaggtagactttcggtgaaatgtgtgtagctaattaatggtggcatgagggtcccaaaaattactgggcaaaactgcaatcatccaccctctccccgcattggagcgaaagctcccctagggcagggtctttcggtttgttgatctacctgaactgtgcctagcccactgcaagttctcgataaatacttgagtaatctccattcactgatcgtccgtgcagggcgctgtggccagccagaaggccggttcgcggcttccctgcttccgccgcacccgcgccgccctcagcccccggggccacagcccgcaaccccgggagcatccggctgcccggccacccccggggcgctcgctgcctccggggcctgcccttcccgcggaggaaggagcggagcgaggagtgggaaagctgggcccacttcctgtccgggcaggcctgggcgcccgcctcctccgcggcctgctttctccaccgcgagcggctgagcctcgggccccgagaatgcggccgggcgcggcgctggcgcgggacgaggaggagccgagccccgctcgccgcccccgtacgcctccgccccggtagcccgcgcgtgcccagcggctagagggttaagcccgcggggggcggggccaggcgcgccgagtgcgggccgcgggctgggcgggggctgggcgggggctgcggccgggggcggttacgggcggccgggggcgggcggaggaagggggcgggccccgaagttgttccgcgctgggcgggcgagcggctgtgggagagcgggcggcgggccggcgggcggaccgggccggtgctggagaagtttgcgctgcggttcgtgagcgcagggtgcgggccccgccggccgctgcgcgcccgctgccatggctttccgcaggaggacgaaaagttacccgctcttcagccaggagttcgtcatccacaaccatgcggacatcggcttctgcctggtgctctgcgtcctcatcgggcttatgttcgaggtgagagcctggggaggagggagctggagggacagtgccccctgtcgtgcaccgcccggcacacccctgcaggtcagcgggccctcctctgatcggaggctcctggctgccgtgtacgttatctgcaccccggctttgtgcactgtacccctccggcctgtaccccggccagcccagacagcacccccagctccgcgccgtgccagccatgccatgctctgccgcccccttgggcactcatcgtatcctgcagctctgtctgcagccctgaaaccccagcctggcctcgaaccaaccgccgcgctgccaccatggcttgacgcgtggggttccctttctggcgtccaggagccaagcccagagactcccagacccgcagtcattgcacaaccccctcttgccccaaggggtggccactagctcttctgggcttttccagtgggagagacccagaaccttttccacttcctatgtgattttctgggtgttttgcatctcagctctggaacgtgctcggatgttcacgtgtggccctggccccatcccagcagtggccttctgctctcgtctcgctcccacttttttgctgtgctctagaaggccaatttttggatatcctttaccactccgtgaactgtccctttagatccatctgcggcgacccagagcttcaccccctttacagagacaagaagagagacagggataccctccactttttggggaaagttgattctcttatagtgtaggagtggggggcagaggatggggatcccacccccaacagcaatgtcctggtgtcggcctcccaggcagggagttgtagaaagccagcaaggggtcagaattcacaagactgatgggaaggattccctactcttgcagagcaagaaaaatgtgatattcaaaagtgggaagaactggaggaagcttggcatgggtttgttgcggtatatcttgtctcagaagtgagatatgtgagcgacattcccctcactctcaccgtggtctcctctggttcctgagactccttgtcctcccttctgcgtcagcttgcttattgcattctcacggttgggttaggaagctgtgatcatttacaaacttccttggagatggaggatggcttgcctggctaaatttccttccctgtccctctgtctcgggttccctgtatctctacgaatgacaagggccctaattggctggcgaagctgccctcaagctgggaacgttcttgtggtggccaagtcagggttggatgaatgaatgtgtccgtggctgagctttagggtctgtaggaaataaacggtggtgctaggactggggtctccactccactttttgatagtgctcctttagttcagtccctctctccttcctctccctctcacagctctctctagtggtatattgggtcgggcttgctccaccttgttctgggttctcccctggaagtgtgtggtgtcacacagagtcatatccgtgtgtctcagtccctgttctgtgactagtctgactgaaaactgactgcagcctcagtttccccatcattaaagacgttcataaaactggtcttcgtcacagggtggtt

SEQ ID NO: 1882607 - DNA, 4001 bp, Homo sapiens
accttctatttattaggagtgagccactaagtccagcccacactcaaggtgggggaacgaattgcctctttttgaaggaaggaatgttgaaaaactggaggacatatacccatatgccacgtaatgatattcaggtcaaacaacatataaaacagttgtttcataagatcttaatggagctgaaaatttcctatcacatagtgatgtcgtagccactgtaacattgtagcgcaatgcattaaccacgtgtttctggtgatgctggtgtaaacaaacctactgtgctgccccataatatagtttagtataaatgtgtagcaaaaggctgggtgcagtggcctgtaatctcagcactttgggaggccaagacgggtggatcactgaagatcaggagttcaacactagcctggccaacatggtgaaaccctgtctctactaaaaatacaaaaattagcagggggtggagggcacctgtaatctcagctactcaggaggctgaggcaggagaattgcttgaacctggaaggaggaggttccagtgagccgagatggcgtcactgcactccagcttgggcaacagagaatccgtctcaaaaaatggcggatcacttgcggtcaggagttcgagaccagcctggtcaacatggtgaaacccccacctctactaaaaaatacgaaaattagccaggtgtggtggcacatacctgtagttccagctacaggctgaagcatgagaattgcttgaagccaggaggcagaggttgcagtgagtccagatctcgccactgcactcctgcctgggcaacagagttaagactctgtctcaaaataataataatagcagtgggggtaacttaaattcaaccatctaaacctataaagaaaccaattgtataaagttcaacctcataggtgtggccgcacgttgcaaatttgaacacatcttcacaggtggaaagtcgaggtgcttcagagttcttgatctttctgttcctcacaagacgaaggttcaactttgagaaaggtcagccttgaagttaaatgaggtttagtccaatctaggcattactttgtcatttccttgagagtcagataagggaattacagacccaagactgtattttaagtaaggtggagtgcagattgaggaagtaaaatttctctaggaactccatcctgtctcaattacattccaccgcgtgccacttttaaaaaaccatatttatttagaagtgaaataactgtggacctaataaaaaatggaataggaattagttttttttgttcattacgtatttctgcacatctagaaagtaactgactgcttcattactggtaggattaaatccaatatttgcgaatataatttattaagaacaccttttgtccttccaggagtacttttaagacttaatattaaatagaaactttcagtgagaaagttccttccttttttgcttcttctgtgtttattcttccacttcttctgattaatatgtaaggtagactttcggtgaaatgtgtgtagctaattaatggtggcatgagggtcccaaaaattactgggcaaaactgcaatcatccaccctctccccgcattggagcgaaagctcccctagggcagggtctttcggtttgttgatctacctgaactgtgcctagcccactgcaagttctcgataaatacttgagtaatctccattcactgatcgtccgtgcagggcgctgtggccagccagaaggccggttcgcggcttccctgcttccgccgcacccgcgccgccctcagcccccggggccacagcccgcaaccccgggagcatccggctgcccggccacccccggggcgctcgctgcctccggggcctgcccttcccgcggaggaaggagcggagcgaggagtgggaaagctgggcccacttcctgtccgggcaggcctgggcgcccgcctcctccgcggcctgctttctccaccgcgagcggctgagcctcgggccccgagaatgcggccgggcgcggcgctggcgcgggacgaggaggagccgagccccgctcgccgcccccgtacgcctccgccccggtagcccgcgcgtgcccagcggctagagggttaagcccgcggggggcggggccaggcgcgccgagtgcgggccgcgggctgggcgggggctgggcgggggctgcggccgggggcggttacgggcggccgggggcgggcggaggaagggggcgggccccgaagttgttccgcgctgggcgggcgagcggctgtgggagagcgggcggcgggccggcgggcggaccgggccggtgctggagaagtttgcgctgcggttcgtgagcgcagggtgcgggccccgccggccgctgcgcgcccgctgccatggctttccgcaggaggacgaaaagttacccgctcttcagccaggagttcgtcatccacaaccatgcggacatcggcttctgcctggtgctctgcgtcctcatcgggcttatgttcgaggtgagagcctggggaggagggagctggagggacagtgccccctgtcgtgcaccgcccggcacacccctgcaggtcagcgggccctcctctgatcggaggctcctggctgccgtgtacgttatctgcaccccggctttgtgcactgtacccctccggcctgtaccccggccagcccagacagcacccccagctccgcgccgtgccagccatgccatgctctgccgcccccttgggcactcatcgtatcctgcagctctgtctgcagccctgaaaccccagcctggcctcgaaccaaccgccgcgctgccaccatggcttgacgcgtggggttccctttctggcgtccaggagccaagcccagagactcccagacccgcagtcattgcacaaccccctcttgccccaaggggtggccactagctcttctgggcttttccagtgggagagacccagaaccttttccacttcctatgtgattttctgggtgttttgcatctcagctctggaacgtgctcggatgttcacgtgtggccctggccccatcccagcagtggccttctgctctcgtctcgctcccacttttttgctgtgctctagaaggccaatttttggatatcctttaccactccgtgaactgtccctttagatccatctgcggcgacccagagcttcaccccctttacagagacaagaagagagacagggataccctccactttttggggaaagttgattctcttatagtgtaggagtggggggcagaggatggggatcccacccccaacagcaatgtcctggtgtcggcctcccaggcagggagttgtagaaagccagcaaggggtcagaattcacaagactgatgggaaggattccctactcttgcagagcaagaaaaatgtgatattcaaaagtgggaagaactggaggaagcttggcatgggtttgttgcggtatatcttgtctcagaagtgagatatgtgagcgacattcccctcactctcaccgtggtctcctctggttcctgagactccttgtcctcccttctgcgtcagcttgcttattgcattctcacggttgggttaggaagctgtgatcatttacaaacttccttggagatggaggatggcttgcctggctaaatttccttccctgtccctctgtctcgggttccctgtatctctacgaatgacaagggccctaattggctggcgaagctgccctcaagctgggaacgttcttgtggtggccaagtcagggttggatgaatgaatgtgtccgtggctgagctttagggtctgtaggaaataaacggtggtgctaggactggggtctccactccactttttgatagtgctcctttagttcagtccctctctccttcctctccctctcacagctctctctagtggtatattgggtcgggcttgctccaccttgttctgggttctcccctggaagtgtgtggtgtcacacagagtcatatccgtgtgtctcagtc

SEQ ID NO: 1882608 - DNA, 4001 bp, Homo sapiens
tgatttgacaggaggcggagctcaggcggtaaagcaagctatgaaaagaggctgtaattcagatgaacttcactggctcaccactcacctcctgctctgcggctcagtctctaacaggcttggggaccactgccctagagcacaagaccccagggacccccattaactgcgtgcttgttctctggttagggttttaccttcaaactccctgagagatagtctgtttgtaatccacccgcgctggagtttgcagggggagagggctacggagcaaatgctctggcagttagttgtctatttccatcaatagctcatggcttttgctgtgctccatggtcccccagggcacctgtgacctagtctattgcagcctattcctccagttaaggggaggccgtcatggcctcaaaactcatgactacaaggataggagcagaatttaagagtattcctctcacctttctctggctgacatctccagccaccatctgccccagggtgcagtcactctattcacactcacccttcaacacaccaacacggtctaaggtttccacattttctgggttccattttgtttcattgcagaaatccatgttgaactgtcttttccatggttcctccacaattaacaacctgcatcctcttcccctttcctctctaacaaactttgagtcatggcctgggggctccacggctgtaacctatgccccaacccaccagagaaggatccttgggtgccctggacctgatttcagggttcaggagctaatcaggccgtcccttcccaagacctccctcccagtgttaaaatccctgaactgaggcctgagatctccatacccagctaaagttaagtctggcactgtcctctccatgctggcgggaggccagggacaggagggctgggacacacatgtgcaaggtgttccatatggactcccctctggggacagctgcccatattcgtgagaacatggcaatcttctgatcacatcagatagtgcatgtttctctccctaggagacagcggaccctgaaggtagcttcccacaagcccaggccccaagagatcagtcctcagaggcaggcctccctggtttccccttccctgaatctgaggctcccaagctgcctggtgactcctctaatctccccccaccgaggcctccaacctacctgtgtttgttgggagccaggtgagggtccacgtaggagacgtggttggggctaaaggaaaaagacagcaaacactgactctccaggggcccagaagtgagcagggtctaccctatatatgagaggaggtaggggcccagagccagaccctcaggatgccttaagccaggagtggcctgagcctaagatctgcatgacagagttgttggcgtgtgtgtgttagtgtgtgtgtgaaaagaagagttgtgggtgtgcctgtgtaagacaaagagagacgcagagtgacagagagactgtgtctctgtccagggacctctgggggtatcttcccaacagttgaggccaggatgtgccgggtgaaggagaggtgagagtccatgtctgggtacaggatctttgctcccttcggaccagagcagaagacctggcaggatgggggatgatagaggcatgggagtgggtaagtgactttccttcaggtccctggggggtggcacagtggtatttcctcaagaaaagagctcacctgcaaacaccaccaggctgacatctctgagaacagtgatgatgtttttggaagtgttgtagatttcacaccagtaggatcccgagtcctccttcagctgaatcatggtgattttgaagatgctagcatttggcttgtcccagattgtgtaatgagacttctgaactgctgtctggggcttggagctggtgacaagtaaggtacaccgacttggcgatgtctgctgacaccaggatttgggctgataggaccctctcttgggtgagtactggcattgcaggaagagggtctgtccttagtgtttgtgaagttcttcaggcacagcgccctttacccaggaacctgcagaaagaaacccaggtcagagctctggagagatgcatgacacacaatttacctaactaaaaaccctgcacatgaacacctgaaactaaaaggtttttttttaaggaaaccaaataatgacaaaaaataaaatgtaatccaccaatcttcatagttcagctgtgaaaaacacttgtaaaaacactagtaaaagggattgctgggtcaaatggtatttctggttctagatccttgaggaattgccacactgtcttccacaatggttggactcatttacactcccaccaacagtgtaaaagtgttcctatttctccacatcctctccagcatctgttgtttcctgactttttaatgattgccattctaaccggcatgagatgatatctcattgtggttttgatttgcatttctctaatgatcaatgatgatgagctttttttcttatgtttgttggctgcataaatgtaggattataaatcattctactataaagacacatgcacacgtatgtttattgcagcactgttcgcagtagcaaagacttggaaccaacccaaatgtctatcaatgatagactggataaagaaaatgtggcacatacacaccatggaatactatgcaccaaaaaaaggatgagttcatgttctttgcagggacttggatgaagctggaagccatcattctcagcaaactaacacaggaacagaaaaccaaacaccacatgttctcattcataagtgggagttgtacaatgagaacacatggacacggggaggggaacatcacacactggggcctgtcaggggttgcggggctaggggagggatagctttaggagaaatacctaatgtagatgacgggttgatgaatgcagcaaaccaccatggcacgcgtatacctatgtaacaaatctacaagttctgcacatgtatcccagaacttaaagtacaataataataagaagaatattaagggataaccccccaaaaatactagtaaaagattgtgaatgatgcatatggacttaaccaaaagctatgatatacctatgtcaggagggtggagacttgggtagtttatgcagctaaatctgcctttcagacaggacaccaataataataaaaattgacattttggtatatatatatacatatatatgcgtatatacgaaatgtacatatatatgcgtatatacgaaatgtacatatatatgcgtatatacgaaatgtacatatatatgcgtatatacgaaatgtacatatatgcgtatatacgaaatgtacatatatatgcgtatatatgtgtatatatatatatatgaaatgtctgtgcagatcatttccacatttttaaactggattttttggggttttgctgttgagatttttgagctccatgtatattctggatattattcccctgtcagatgagtagtttgcaaatattttctttcattctgtaggttgtctttccacttcgttgcttgtttcctttgctgtgcagaagttttgtattttgttatgatcccctttgtttatttttgcttttcatgctgtgcttttgaagtcttatcatacaatctttttttacaaatcattatcttgaagagtttcttctttttttctagcagttgtatagtttcagaacttacactttggtctttaatccatttgaattgatttttggatagggtgagagatggaaatctagatttattcttctgcatattaatatccagttttgccaggactattaattgaagagattgcccttctcctaaaacaagttcatgatgctgttcttaaaaatcagttggctgtatatacatgaattaatttatttgttctctattctgttccattagtctatatgtctgtgtttatgtcagtgccatgcttttttggtcactatagttttgtagtatattttgaaatctgaaaattcagctttg

SEQ ID NO: 1882609 - DNA, 4001 bp, Homo sapiens
cgtacgatgtggaaggaagaaccaaaagccagcaggcctgcattctggggctggctctgcccttcagcagcaggtgaccttaggccaggggcttttcttctccatgtccccagttttcagtgatgagaaggtggaaggagaagatttctaggatcctctccagctctaacaccttgtgattcaggaagtctgagacccacaaatacgaagggacagaactcaccttgagataccaccaggcagatgattctgacaatagagatctcaggggatttagagattccacacccatggaatcccaaggcctctactctgagctcagtcatggtgacggtgaagacgccatagaagcgatcatcttggatgaagtatcgagggtcccaggccgctgtcctgggactgtcccctactatggcacatgtattggctgatattttcccgcaccagctttccacctgtaaatgttgggagggctagtactggtgttttacagaggttgcctcgccctccaggctgggaagcaactctgtccactgtgctcacaatggcctccatgcccatgctcataccctccctagaccatcctcgacaagtggccactacatacttaaaaataagctgtgacacacctctcttagctctccagtagcttcctcttgtacttagaatcacccaaacttcatctcataggcttcagggctgcttgactcccagcctcatcaatcactgtcctgcactcaatatggagttactaaataagcatttttttctttgctttttatttttttttgagacagggtctcactctgctgcccaggttggagtgcaatggtgcaatcttggctcactgcaacctctgcctcccaggttcaagcaattctcctgcatcagcctcccaagtatctgggattacaagtacatgccaccacactcagctaatttttgtatttttagtagagacagggtttcaaccatgttggccaggctggtctcaaacttcggacctcaggtgatccacctgcctcagcctcccaaaatgctgggattacaggcgtgagccattgcacctagccaaataagtctttcttgtacaagccaagcaccttctgacctcaggacctttgcacatgcagcccttgccacaaagtgcccttcaaagcacccagatttcaacagagctggagaatgctcaccattcaggggtctgcttggtgtcatctgctcagggaggtgttttctgatcctcagtatttccacagctcccgcattactgagttaactttcctgtttacaagtgttgttttttcttacaaaaatttgttatttgcaattattatagagcaagattgtgtctgtttttgctcactactgtctccttagagcctagaatagtgcctgccacataatacgggctcagtgaattatgttgaagcaatgagtgaataaaacacagcacagacagtgccaagtttgaactttatctcagccacctgctagctctgggaccccggacaagctcagagtcacactgggttttcaggtctcattatcttcatctgtaaaatggtgacaatagtgccacgaatagtgccataaaggcactttgaaaacactacagtgcaacatgaccattgatggattattatccttattatctctgatgttagtggagtgtggggcagggaggactccctccacccgtcccagtgcccctgcagcccgctcacctggagacacatccagctggaagcccatcaaggggtacaggatcccagaggtgttgcgcatgcaccagtatcggcctgagtcctggagcttgagggccaccatggtgatgttgaccaccttggcctgggcgtcgtcctgcagcaagtagcggggccctttcacccagacttgggtgaaaccaggctcacacttcttcctgattttgcaccaaaccttgccctccatgcggtttttgtagcccttacagaagcactgcacagacagagtccccctttcaaggagcctcacttttgtgtatgcgctcccagcagaggggcctgtggagacaagacttgttgaataaggtctggcaagaggagaggaagaagacatcatgaaagttgaagatcatggtgaagggcggggtggatattgtcctgctgtcatggaacccacagattgagggggaaatacagccccaccctcagggagcttgccccagtctgaagggaggtaaatgggccctgaaaacagctagctcccagtattagggggcagacagaggtccccctctcagggagctttcagtctgatggaggaggcaggtatatcccacagtgagcccccagtctaatggaggaaatgcagcacttacacttggagctccatcagacacagcccctttcctcatggtattttctagtctgatgggagagtgacattcttgtgggaaaaacccagtgagaaagatgcagagacacaaacacaggtcattaagttctgaaatttcagtgcccaactaattaggtagataagaaaatccagtgtttgaaaaaatgattaatagttatttatttcacaaataggttcactgtagtcctctttaaataataacctaccttagttcattctagctggtgtttagttttaaagtattctagttacataaaacccatagatcaagcctgtccaaatgtacatgtaaacaaactcccaatggagtatgaaccacaggattctacaattattcactttccacctgcaatatctttctctctatgctgaggagtaagatgtggtccaagccttcataatccacagtctggtagagagagagcagaactggggtgtgcaaggtgactcaggggacagagagagggagaaagctgccgtgggctccctccacccctctgcctgccctaagctcagctgactcttctgataatttcaccccagagtctcccacaaaaccacacataaaaagactctcccccatagtacagaatagagagcacacattttggatcaaaataaacacgggtcaaaaccttgtttctaccacttaacggtgtgatcggggcacctaaaatctctgtctttgcatcagtcaagtgagaatagcaccacatccctcacaggttgctgtgagaattctgccccaggtcagtgcttttcacacagtgcgtgctcaatgcatgctgtattttcccacacgctgggggctcccagatcctccagtggaacccagagctgtgatagtcaagggcccagaacccaggacatctgtccagttgccagcagccactagagctgaggctctgcgtgaggcagcaccctctctgagcatcactctgttctttgtaaactaagcagaatgatccaactccattgcatggtggatgagcccagaatttcttagcacaggagagacccttttttgctgtggcagagggaggaacctctctgaccctgggaggtgcagagttgggtgactttgggatgggtctccagggcactgtgttcatgtgtgcctacacctcccacccctttcacaggcagtagggagtgagttttgccaacccccaccatgcccagtggtctctggtaaagagctacgaagtcagccccaacctcttcctcactgaacccacaaaaaactaaacaagacaattgggccagaaaagcaagaagggtggtttttgataaagatctagagctcctgcttatgtacccactccctcctccacaaggcagccccttctcccctccctgagatgcggccctgtggccacagcagcaacagcagcaggaacgcagcagccatggctccatccagctgggcagtcacaggcccagcaaggggccagggcacccgggggatccagggtgagggcccaccccacacaggacgtgccacctgggcctgccagggaaggacctggggttctaaaagtgaagctacccaattagggaagttaggcagtatgggacccaccatccccaaccgactgcag

SEQ ID NO: 1882610 - DNA, 4001 bp, Homo sapiens
ttgttttattcttaattttgttgtctgagcttttcttttgtccactaactgctctgctttgtctagctcctcccaccccactgggcatgatctcagccgatctagcaactttatttatttgtttatttatttatttatttttgatggagttttgctcttattgcccaggatagagtgcagtggcgcaatctcggctcactgcaacctccgccttctggtttcaagcgattctcctgcctcagcttcccaagtcgctggtgttacaggcgcacaccaccatgcccagctagttttttgtatttttagtagagacggggtttcaccaggttggtcaagctggtctcgaactgctgacttgtgatccacccgcctcagcctcccaaagtgctgggattacaggcgtgagccaccacgtccagcccgatccagcacctttctaggctcttcaggtcaagaatagtttggttctagtttggaatttcaataaaggagcccagccctttccacttcatcaggtttggagttggggagactggtgtgctctactctgtatcccccttttctttccctctttcacatacacaaactcacacacacacagtcccccaactcccacctggccctatttccttcttttttttttctcttatttttattttatttttaccccaaagaagaaggcacaatggccacctggccctattaaagcctaggaaatacaggaggtggtagggagtctacttataccacaggtccaatctccacagttcttattatgagggttggttctccctgctcggggtgactgggtctggaacacgtacgtggagaagggtgtggctgggccctgaagccgctaaaggcccttgtaggtgaagtgctcccaggcagtgtttcctatgctctaggtttgcagacccctcctaagagggcccccgcgtctcccctgagcagtccccatgactgggctggtggctctcagggaagctacccacgcttgtcccactacctagccccaggctgtcttgtgctgtcttggggctgcaagacactgggggaagggtgctggggccagaagtagctccccatctaggggctccaccctatagttctccactcagtccagcacccctacaggaaatctaggccaggaatgggccattgtccccagcttctgggctcatcctctacctgcaaaaggagtctcttctggcaggggtgaactgggagatgaaggcactcggcctccccttgcaggagctctgtcttcgttccccctctcaagccctctttcatgggaaagagggcaggactgccatccaggctttaggagagtggggcccccccttaccccacctggctcctgggtggttagccctacagtaggccttctgaagctaaagggtgaagcctcaaggcactctttgtcctgagcacctacctttgtcaggcagtgagaaaggggctagctctgcactgtccaatttagtagctgctagccacatgtgctgacaggcacttgaaatgtagctagtccaaatttaaacatgctatatgtgaagaatcattaatttcacaagattgagtgtaaaaagagactgtaaaagatagcaataatttttataatacatgttgaaataacattttgagaatattgagttaaataaaatatataattaaagttaattttactagtttctttctactttttaaatgtgactactagaaaatttaaaaatatataagtggctcacattcgtgactcagattacattcatcattcatactggacagtgctgggctaggcagtcaccacaggaaatcagaaagggcatctctcaagggttgcataccttcctggtccaataagaatatgagagtcaaatgcagcttctacttctcccaggcatttcaaattagtgccttgctgtgtgatagtgagttctttgctcaacccctctggactctcaccatttcatcccattctttattccccagaccaactccaggctgataggaaaaaagatgaaaacagattcttcaaaagcatgaataaaaatgacatgaagagctgtaagtgagaaatgatggttggttgcttctgccatttggggaaagtgagaaaaggggaagaattgtgtctctatgattacatgaaggccagatataagtgaatgccgattcctcagccaattgagagaacaggcatatggttgttttattattttaaactcaggtaactcacaaaacagtcactaatcccaaactttgaagtattcagaagtaatagaaaattacaaatgtatttcttcactcctagagacagggaggaaaaagtgggacaagaaggaggcagctccacctctgtagtatttgctgcccctacagggcagcaggtttcgaggcaaactcctctgggtgtgaggtcagtacagctcaggggatggagacccactgtaataacagcctgtgctaaagtcattagatatggttctgccacctaagacaataacagtagaagtaccatttcttaaaggaccactatgtgcgcatctaatatttcaaaaccccacaactatcctccaagataggtgttattatctgcaacttacagtgaggtccatgtagcttccgggaggggaggtaagttacccaggtcatatgatcattaagtgaaagagagagaattagaactcctttctccaaagccagaaactacagaatgcattccaaagccagagagcaggatttagggatcctattccaccagcatttctccacaaaaggagctaccggtgtttagaaaggccatctttgttatgctccatgacttttgccctgttaaatgcttagtatcccaggccccagaaagccctataagccagtagagaaccacactcttgttgtcactgagacaacctgaaaggtttccacacttccccctgggtggggaatgggtcccactgagaaccattgactgttctgattgatgatggcagggtgcttgtttttgtttttaatttgcagcttctggttatcaagaccaaataggttttctctccccaatttttagggggcttgttacagaaaaataatcataaaatgaacaaaacctcagagcccgggtcatcttctgcaggtaagagtcctgtctctgaatactaagggacctctaagtctacaggtggtcaaaatgctgtatccacccaattccactaaatggaataaatgaataaatgaatgaattcatttattccatttcctcagttcctccccaaattacacctctgccaggaaacagagggcgctccgacttgttcaggtgtactttcttgagtttcacctccatccctcctgctgtatgtagagctcagctgtgctgtctggcaatggaggattgctgccgaggtgctcccgctgacctcttttctcctttccttctcccgcaaaggcggcagaactacatcggggccaccaaatcaccactcttcagccccatcccactccctgtttcgggcctcgtctgctgggaaagtcacttttccagtatgtctcctggcctcttatgatgagatttctggtcaaggagcgagctctcaggatacgaagacatttgacgttgcgctgtccgaggagctccatgcggcactgagtgagtggctgacagcgatccgggcttggttttgtgaggttccttcaagctaagccagctcagagaacacggggagcggtggtgctacacggacttcggagcatagagtggcgctgagtgagtggctgagaccgaccacggttcttgacttagtggaattgggtcgaaggagtggagaatgggagggctcgggctactgagagtggagatgggggcgggggtggtggtgaagagagttggagaaggaatggacgaattcttgagcaaaaggaggggaagagacaatctccagccacccgccccacgcttgacttcttatcactttggctgtggtgccgcctagtggaaa

SEQ ID NO: 1882611 - DNA, 4001 bp, Homo sapiens
taaaggtaattatttgttgggttggactttttcatttattgtaatattttaacatctctgaccctcacttattaaagctaatgatataccctcagtcattgtgacactgtaaaacacttcacaccttccaaaaattccctagtgatatgaactgacataggattgagaattagtggtctggaaaatatgacatcataataaaaagccagacaagtaaaacattgtagcatacacacagtaatagacagataggtcagtaaaacagaataaagagtgtattagtccattttcacactggtgataaagacatacccaagactgggaaatttacaaagaaagaggtttaattgacttacagttccatgtggctggggagacatcaaaatcatggtggaaagtgaaaggcacatctcacatggcagcagaaaagagaagagagagagcttgttcagggaaattcccatttttaaaactatcagatcttgtgagacttactcactatcatgaaaacagcacttgaaagacctgccccatgattcaattacctcccactgggtctgtcctacaacacaaggaaatttaagatgagatttgagtggggacaagccaaaccatatcattccactcaagcccctcccatatctcatgtccccacatttcaaaaccattcatgtctttttaacattccctgaagtcttaactcatttcagcattaactcaaaagttctcagtccaaagtatcttccaagacaaggcaactcccttctgcctatgagcatgtaaaatcaaaagcaagttagttatttcctaaatccaatggggatacaggcattgggtaaacacagcatttccaatggaagaaactggccaaaatgaaaggggctacaggccccatgcaaatctgcaatccagcagggcagttaaatcttaaagctccaaaatgatctcctttgactccatgtctcacatccaggtcatgctgatgcaagaggtgggttctcatggtcttgggcagccctgccgctgttgcattgcagagtacagcctccctcctggctgctttctgctttaccaggctggcattgagagtctgcagcttttttaggcacatggtgcaggttgtcagtggatctaccattctagggtctggaggttggtgacactcttctcacagctccactaggtggtgccccagtagggactctatgtgggggctccaaccccacatttcccttctgcactgccctagcagaggttctccatgagggccccatctctgcagcaaacatctgcctggacatccaggtatttccatacatccactgcaatctaggcagaggttctcaaacctcaattcttgacttctgtgcactcccaggctcaatatcatgtggaaactgctaaggcttaaggcttgcaccccgtgaagccatggcctgagctctacattggcccctttcggtcacagctggaaccactgggttgcagggtaccaagtccctaggctacatacagcaaaggaccctaagcctggcccatgaaaccactttttcttcctaggcctccaggcctacgatgggaggggctgctgtgaaggcctctgacatgccctggagacaatttcccctttctctttgggattaatattcatttcctagttacttatgtaaatttctgcagccagcttgaatttatccttagaaagtgagattttgttttctattacattgccaggccgcacattttctgaacttttatgctctgcttcccttgtaaaactgaatgcctataacagcacccatgtcacatcttgaatgctttgctgcttagaaatttcttctgccagataccctaaattatatctctcaatttcaaagttccacagatctctagggcaggggcaaaatgcctccagtctctttgctaaaacataacaagagtcacctttgctccagttcccaacaagttcttcatttccatctgagactacctcatcttggactttgttgtccatattgctaccagcattttgggaaaagtcattcaacaagtctccaggaagttccaaaccttcccacattttcctgtcttcttctgagccctccaaactattccatcctctgcctgttacactgttccaaagtcatttccacatttttggttatattttcagcagtaccccactctactggcatcaatttactgtatcagtcaattttcacgcagcttataaagacatacccaagaatgggtaatttacaaagtaagagatttagtggatttatagttccacatggctgtggaggcctcataatcatggcgaaggtgaaaggcacatctcatgtgtcagcagacaagagaagagagtttgtgcaggaaaactcccgtttttaaaaccatcagatctcgtgcaacttattcattatcacaagaacagcactgaaaagacttgcctccatgattcagttacctcccaccaggtccttcccacaacacgtggatatttaagatgagatttgggtggggacacagccaaaccgtatcggagagtgtgaaataaatctatgcatatatatataaattttgctagcagtaagcattatttttgtaaacattgagagaaagattgattttgtataaaatggagtcaaagacaaaaatcatgttagagacttacctcatccagtatatacacacacatgcacatacaaacaagttatgcagattgattaaaacattaaatataaatacatacgtaaacatctgggggaaactacagaagagtacttatagaaactttatataagcaatatcttctgtaggaagaaaaaaatagaaaacaatgataaacttgtctacaaaaatatttaagatcttatgctggtagacatcatttaaaatgttaaaagcaaagtggcctgcagagtaacaagaaaaaaatcagtgaatgattaatatccataatataaactgttcttataaaagataagaaataaaagtcaatttaaaaaatagtaacaaataagccaatgaagaaagcataaaatcagtttgacaatttattctttacttttaacttttattttagaatcagggagtacatgtgcagatttattacaaacatgtattgtgtgatgctgaggtttggagtacaaatgatttcgtcacccaggtagtgagcatagtacccaaaagttagtttatttccacccttaatcccctcctaacccttgtattcctcagtgtctattgttaccattcttatgaccatttataagtgagaacatgtggtatttgcttttctgtttctgtgtttgttcacttaggataatggtttccagctgcatccatgttgctgcaaagaacatgatttcatcatttttaatggctgcatagtattccatagtgtatatgtatcacatttttaaaaatattccagtctgccattggtggacacctgggttgattccatgccttttctattgtaaatagtgacaaacatatgggtgcatgtgtccttttggtagaattatttacttgcctttgggtatgcacctggtaacaagattgctggatcaaatggtaattcaactctcaattctttgagaaatcatcaaactgccaatgaaaaaatgctaatcaccactaatcatcagagaaatgcaaatcaaaaccacaatgagataccatctcacaccagtcagaatggcttttattaaaaagtcaaaaaataacatatggtggtgaggctgctgagaaaatgaaacacttatacactgttggtgggaatgtgaattagtttgacaatttttgaaacaaacacacagacacacgcacacacacatatcctctaggaatattgcttgagagcagatgcaaataaataaatttgttaatttgtaatgacatcattacagtattgagacttccaacacagcatatcattttaccgaaaaaaaatgttttccagacaaatctacaactttcttcaattgaagact

SEQ ID NO: 1882612 - DNA, 4001 bp, Homo sapiens; identical to SEQ ID NO: 585997

SEQ ID NO: 1882613 - DNA, 4001 bp, Homo sapiens
tcttatgatttctattttaactttaatgctggtcagttgttgtgtctaaattacaaaatagaggaagtatgacgaggtgtatctaacttcccatcctgtaatctccctatatttgaatcctttgaaatttgcacaatcttatgtccatgtgtctatttagaaacagaaataaattgtgttccatgccaagcatcttttgggaatccatgaatctaatcaactctataaacccaatgcaaaatttgtgcaaataaatggtttacaaatttgagaaatataccaagaaagtatagaaataagagcaaatattgtttattttaaacttatttacagggcattttggacatatacagatgtgaagtactaataaacatataagtcaattcaggaaataaaagattacaaatgaaggtgaagtcatctaaattcccaaatcttttcacatgttcttccaaaccccttaaagataaccactactttgaatttgaattttaccatgtccttacatttctttatttttactacattagaatttgcattgatataacttttcatgtttttagaatctgtatgtattttacactttacgtattcatctgcaatgtggacatttatgcttgaagaaactttcatagattgagtcacaatggattattttttctcaaatttttgcctaggtgcaatcaggactaaatttattttttattttattatatattgtttctcttcaagtatgacagccaaatgaataaatttctttttctttttcttttcttttctttttcttttctttttttttttcagacagggtcttgctgtctcccaggctggagttcagtggcgtgatcttggctcattgcagcctggacctcccaggccaaaggactaaatttctaaactcaggaaagtttaaaaacacattctcttgtggttaaaataatttttatcaggatttctttgatgcaatagaaagctgtgtggtaagcagggggaaataatcatatttaaaatggcacaggttaatctggaaactttattatcataattaatcaatatcaaagtacagataattgggtaggaagatgaaacaaaactagtaatgttctccaggattaggctgttctcatacatggagctaatataagtggaaagacacacgttagtcccataaaagaaaacaaagcggctcaccagcaagaagaaaacatgactggcttctgtttcaggaaaagattgtggagacagactgatactgtgaatatgaaagaccgtcttttgatgccttaagaaaatagtcaccatgtagaaactagtccaaatcatgaggaacaagaagaggaaaccttgagtaaacatggcactttgaaatatcattgcatggtagtatataaacagtcttgttttacagtatatcagagaatatacaagtccaacattagtggatttgctggtggctacggtgcttataatgacccacatattgattagcctgttgtttaggaataaatcaataagggaaaatttatggggagatttgaggtttgagccatgcccacttggaatgacaaggacagatgataacagcctgaaatgtactcaggagagaagaagtacatacacaaatgccccatgtcattttataaatgtatagccctgttttacaaccagtatcaacaaaagtacttctaagtctgaaggatgacattatatatggaacacccctgatgataactgttataacattagccaaagttaggtgcatgagaatcacatctaaggggttcttctgatggggccaaaataagaagatgtacatatatgtaatgaatagcaataagttccccatgagcccaatgccactttgaaagacaggtaagattcccagtgttgtgtcacttgaatacaaaatattcatggttttcttggatcttttgattgaagccagcacagcctaaacagcagcataaatatattccacatatgaaagtttagcaatcactgaattcttagaaagaaatttcagttttgacatgaaaatgatcatgaacgagggacaaatctatcatgaaagagggacaaatactcaactatacatgaattcattacatttttgtgggatttccagaggctggatgccatgtattgttcaaatatctagagaacagagtaagtttacgtggcagttgagatttgcatacacatttttaccatttgttctagcccgtttttcaggagtagtctgttctattttaaagacaatttcccatgtaataaaaaacaattttatttcaaattctagtattgtattttaattataaacttataacttgaaatattttttactttttatacacaggtaatatttataacctataaatagcaatatatgaatatgaatccacttttcggagtgctaattgtaccacactgttattttatgaataatgaaatgtatttatagaatatggttaactactgagtaatttctgtcattaaatgctaagtttgcttgttctgaagaacattctttgcttaggaagcatatttaatatttttacaaatgtagtaaaggtttaattgaagttgataaagtgatcaaatgtaataaggtattaaatcaatttactttccaattagccaacagggttgatgaagtctttttcatttaacagataaacagcccttctcctgacactgaattaccatctagttattacataactttttatgtttccttacagcaaggtatattataaacttggtctccagcttgccctgcagtattcagattactgtacacatgcacacacatcctattgattctgtttctctggagacctcagacttagacaccagggaagtggaaatgcaacctgcatgcccagggccagatgcatgctccagaaagtcctaagagtacctttggcttgtacccctgattgatctttggagtccgtgcaagcagaagatgatagctaaggcagagttgcaggtggcctggcttagagataaggagtacaccagctcagagcccatctgaaaagaccagagtgttgggttttttctccctctaggtatttatgaaaatctttgtcaagtcactggctgactgctaaggtaacagaacttcagtgacaacacatgacaagcaatatagtctttgcaaaaatagtttgcgaaactcactaaagaaagagatgactgaaatcctcaaacatcaaaaatcaactatagtaaaccctgtggaggagaaaacatctgatatccagagtttccagattataatattcaaaatgtccacttttcaacaaaaaactacagggcataaagaaacagaaatatgtggctcattcacagagaaaaaaagaaatggagagaaactatccctgaggaagcccagacattgggtttgctagataaagactttaaatcaactgtcttaaatatgctcaaagagctaaaggaaaccatgaacaaagaacaaaatgaaaccaaaagaatggtgtataagcaagtaaagagaatataaacatagaaagagaataaaaagatagaatgttaaaatggaaccaaatagaaattatagagttgaaaagtatcatagtttaaaaatttactagaggtgctcaacagcagatatgaggatgcaaaagaaggaaccattgagcttgaagataggacaattgaaaatatccagtctgctcatgcctgcaatcccagcactttgggaggcagaggaaggcagatcgcttgagcccaggagttcgagaccagcctgaccaatatggtgaaaccccatctctactaaaaatacaaaaattagccaggtgtggtggtgcgcacctgtagtcccagcttctcgggtggctgaggcaggagaatcgtttgaactagggagatggaagttgcagtgagccaagatcgtgccactgtactccggcctgggcgacagtgagactccgtctcaaaaaataaaaaaaaaaaactcttcacaatcttgt

SEQ ID NO: 1882614 - DNA, 4001 bp, Homo sapiens; identical to SEQ ID NO: 586031

SEQ ID NO: 1882615 - DNA, 4001 bp, Homo sapiens; identical to SEQ ID NO: 586040

SEQ ID NO: 1882616 - DNA, 4001 bp, Homo sapiens; identical to SEQ ID NO: 586041

SEQ ID NO: 1882617 - DNA, 4001 bp, Homo sapiens
tcaaaaaagaaaagtcctcctccttataagccaatatccagagatcattaatgaaaagattggtaaacttgacccacatagaataaaaactcctgtgaggtaaaacaaacaaacaaaagcactttaagcagtcaaagacaaaaaaatggaaatatatttacaatttctatttctgaaaactggcagccaagatgaagttcctgaacgataaaaaaaagtgtaaacggcaggtcagagctggattctctcctgctccagcttcactctgaacttaatcagactctgctaagcattcacaactcacttatcctgatcctgtcatacagcagttgttgttaagtcacctcaggtcccttacttccagaatccccagaagaccacaaaacatcaaagtttagcacaactctcctgtagagggaagagtctgtcattaacacttcagtggcatattcctgggtggcactagagaataactatcttattctccctctgcttccggagctggcatttcttgcctatttcctgactgtatccaacagctggggccagaaaaaaattaaacacatgaatttatcaaagaatcgctgtggaaatgaataaatcagcagaacaggctaattccagggaggtaagcaaagtaagaaataattacaacaaatacctggatagcacttcctatgtagcaggtactgttcatgtaatcctcataacaactctagacaggtgcttttattatccccattgacagatgacatataggcacagaaagataaaatgacttggccaaaatcacaggtagtgtggcttctgacttacgtgcttaaaaagtaggggaaaaaaagggaagaatccctaagagatcaaaagttgtaagatggtaatctctctccccacctgctgtctggattcactcaattccttgaaatcatccagcttagccacttgcccaaggaaaatcctccctcccctggccagtgctgttccctctcccagacctggtgttcctcaggatgatcaggaactggcctcagccactgtcaactgggctgctggagccagcttacagaatgctggcctgtggagttttctcattaacagaatccttggaaccagcgaaaccatctcctctaaagatgcagtcatgcagcttttcctgtaattgacgagttttcaggaacacttctgtaaaagaaacattttactcaaagaaaaagcaaagattgccataggtgttatactactaagggttatggggggaaagaagtgcaatgttaaataaggagctaatttgcaaagggctctcagatcacatgctggggcagcaggtctgcagtggtaatcttccccgttgcctttaagcactgcttgggatagtggaagggctcatgagagaacagcattaaggttgctgtaaggtggtcctggcgtggatggaagtgactgctaaagggaagggtagccatttattgccaagctgaagtagagagaaaataaattctgcattcgaaatgaaatgtcacgggcacaattaagtggtggaagaagcctctcctgaatttagagcaccgaacatttatttccaattatttgcattttcccccttttgtttgaaaaagagagctgaagatctggtgggcagtgataccaattggtaccagaagcacacttgtagttggcactcaatgaagctctgaagacggcagtaaaaaccagggttgtaactgaaagggaagtagtcccaactctgggcacctgcggcactaaatctcgaggaaaaaccctttcctggaagactgcatttggatacaatccccaccgtcccaggatgggttgcctctcctggagttcctgcacacattccacccaggcaggcgcggagagacgaggtctgaggggttgcagctgtgcaacatccacccaagcgacacccaaatgcataccagcgtttctctgcctgtgagcagcaaccagctccgaggcctcgcctcggggcggaagtccctctcagtacttccggggcgtgtcccggaaatttctgggcggggcctggctgcgcccgaggttgccaaacaggggttgaaacctccacctgtccccgccgcggtgtaggcagggtctagcccgggagcgatttgctccggcccgtcggcaatgctcagacttcctacctcacctctctcgaaggttgattttgcttcctgagttttatccagggcaggaccacccgtgtatgttggaatttaaagatagtgcagttggtgaaatttctcgtgtgggccctacaggatcccttaaagcgacacacggggccacagaactctggtcttaattattagtgatctgaaagccaacacactatatcctgtgtgctttctcaaagattagagacaagaaccaagaacaatattttcaaaacatgactgcgatactgcaaaatttctccggctattcaattatttatgaaagaacttaactcaaagcactgtagtcagtaaatatactggtttggatataaagatgataaaaggagtaattcctaaaatgaatcattacaggtggaggcacaaagtttgaatccatcttatggcagagcatgaattaagaatatacaagggtcacacctgagggcataactaggggagaaaagaaatgggcaaagccccaggaaacctaaccaagtggcctctttgagcctccatttacagaataatggattggaacactaaacctagcattctaaactatgaatatttaaatatgacagagcaagcagttatttctttggtatattacacatttaaactgattttctaacttgggttgaacttttgagacctctgtcgcccagtggcataatcatagctcactgcaagggctcaagggatcctcccaccatatccttttgagtagctgggactacagatgcatcccaccacacccgattaacttttttattttttaagttttttttgtagagacagtcttgctgttgctcaggctgctcttgaactcctggccttaagcaatccttctgccttggcctaccaaagtgctgggattataagcataagccactgcacccaggggttgaacctttctaaacctgctgaattaagtacccctgctgcaaaagcaagctagtgcttctaaaggcctgctttttaacgatttaatttaggaaatcacatttcctcctacatatttgccttcctaaataggattaacacagtatgttaaaaactacgttaaaaacaaataaaactggaatggttttacttgacaaactctgacaatattctggcttgtggtttccttggcatgctggtaattcctgcctagaggctgtccaagggactgagggtcatatgttgtccttaaggctaaatctttgatgttatagcccctctgttaaagagacagcccccagtattttacctttgatgctataatgaaccaagatatggaagactaaaactagacttgtacttctgtaacacttgtatgctgaaacacttggcatagggatgatggcagatctgatgctgaaagcaaccttaaaacatcatcaactttattgtttatcaacaccctgacatatgttgctgtgaatgccaaacattaagtcttctttttcttttatagtcttaaaaaccacaaaatatgcacacacacaggattctcttaaggcttggcatagctaatttttctaattgtattgccagtacttcgtatctctttctcctatttaccttaaatatatcaagtctcacaacctcagcattaaggattttgggccagatcattctttgttgtggggcggggacaggggcaggggcggggcgatgcgggggggtgaggtgctgtcctgtgcaaacatgatgcttagcagcatccccagcctctacctactagatgccaatagcatcccagctgcccaccaatggtatgaccaaaaatgtccccaaacattgccaaatttctcccaaagagaaccactaatc

SEQ ID NO: 1882618 - DNA, 4001 bp, Homo sapiens
cccttaaaattttcaatatatggctactacccattgcccatagaagacacggtctcttctacctctaagttttgtcttatattttcttcccttaaaatccctcagttctcctttgacaaaattgcaaccatatctcagtgcacaccaaaattccaccccttcataaaatcctccaaatcacactctccttctctgaactcctatgggatgttttctctttactacttaaaatggatgtgtgtgtttccttgaattcttccttaactccttggttagacaaggctgctgaagaactgaataccacagacaatgcctaattgagagcctacctgctatgctagttatcaaatgctagttactaaatgctatgctagttaccagaaacaaacaaacaaacaaacaacaaaaacaaaaacactatgggaaggcaggtggcaatagacaaccaatcttataaaattcatgatcaaagagaataggccttggttcctagaaaataaaatatctggaattcaagtgactgaattgaagtttttttgggccccaaaccaccagaatgaaagtagaaaatataagatatttcaggaaatgaaaagaaaatccagctcaccctgaatccagccataaagggcctagcagtcattctctcttcttctgggctcttctcttgaagaagggcagagtcttgagacagtggctctgagggaagagagaggagctacgaagaagtcagcttgtgtctatagcaaccacttgatattctagaactacactctccaatatggtagccattccccacatgtagctatttaaattaaaattaaataaaagacttaattcttcaattgcaatagtcacatttcagtgctcaatagctaatgtggttagtggctactgtaccgagcaatgtatacatcaaaaatatccacaaaagttatattgcatagcactggtctagaaatccacatatgtggtatgtttttgaagtcataccaactgaatcttcagctccaggaagtaaaggcaaccaaacattccttgccacctcatgaccacagaaacgccacaggcattgcattctcaatagtttgaatgtttgccttcccaaacctcttgttgaaattcaattcccaatgttggaggtgggcctaatgggaagctttggatcacggcggtgaatccctcatgaatggcttggtattgtcccccatagtaaggttctcactctattagttcctgcaagagctgatttattcatttatttatttactttggttgaggtggagtctcactctgtcgccaggttggagtgcattagcacaatcttggctcactgcaccctccgcctcccgggataaagcgattctcctgcctcagcctcctgagtagctgggactacaggcacccgccaccactctcggctaatttttgtatttttagtagagatgggttccaccatgttggccaggatggtctcaatctcttgacctcgtgatccatccgcctcggcctcccaaagtgctgggattacaggtgtgagctaccgctccaggctaaagccggttgttaaaaagagcctggtccccctctccattctcgctttcttcttctcttgccatgtaatctctgcacgtgccagctctctttcaccttccaccatgaatggaagcaacttgaagccgtcaccagaagtagatgctggagccattctttttatataatctacagaactatgagccaaataagcctcttttctttttaaattaaccagcttaggtattcctttacagcaatagaagcagtctaagacaccatccatggtttaagtaggttccagataacaagagcagttacctagactctatcatagcatttactacctgttttgaaattatcttttggagtatcttttgccatccccacccctacacacgaatcaagattttcccatctttatattcctaacaacaaaactgtgcctggcatatatatgtaagtcttgatatgtttgatgaaatgaatagacgaggctaaaatttgtgtcaaactcataatttagattttaacatattgaattctcacattcattcagctctgtgataaggacttttataggcactggggatgcaacaagtacaagacagaataaagcccctatgagagggccagcaaaaaaaaaaaaaaaaagcaaaactaaaccaaaccatacaagcatatataaactcaagtagttacaaacatatccccaaaaaagtagaataaaaggataaacaagacctttattttagatggcatggccagggaaagcttttctgagaaggaaacatttttatcggatttgtgtaaaaagagagagtaagccataaagatatctctgggcagactgagaaaacagcaagtgcaaagtctgcaaacaaaatcttgaggttggaatatccttgtcatgctctaagaacaaggaggccaacataagctaatagagtgtaaaaatgaggaatttatcattaagtgctataaaataatgctgtcgcccttggttttttcgaggatataggagaaattacttggcaaatcctttcaacatagggcatactgcccttattatcagaggcagtgttggttaatggaataaacacttcactgggattgaagaaccctgaattctaatatctgagttagtaaaatgctgtacagcattaagcaagtcactaacttccttgaatctttgtttgttcggtaacaaaacaatagggataagagtatctgttccttttgttttacagaactttgtagggaataagaaagatgtaagattttaaaaagatcctctgaatttaaacatttgaaggaagaggtttaggacactgcttctcaaactatggtccgtagatcagcagcaccagcatcacccgggaacttgccagaaatgcaaattgttaggcccaaccccagacctactgaatcaaaaactctggtggtgagtttagcaatgtgtttaacaaatcctccaggtgactctgatgcatactcaagtttaagaagcatgagtttataagaaaatgaaattgttaaagccagctcctgaaagacctaagcaatggaggatgtcctcttggaggtttagaatgttattgcttgcagctgccatgagctagttattttatttttatttagttatttattttttgagacagagtctcgctctgtcgcccaggatggagtgcagtggcacaatctcggctcactgaaagctccgtctcccgggttcacaccattctcctgcctcagcctcccgagtagctgggactacaggcgcccgccaccatgtccggctaattttttttttttttttttggtatttttagtagagacggggtttcaccatgttagccagaatggtctcgatctcctgaactcgtgatctgcctgcctcggcctcccaaagtgctgggattacaggggtgagccaccgcgcccggccatgagctagttattatattgaatgtttcacataaaccagaggaactcagcagacaggacctggtccttgtattgagtggaagaaataactactggcatttaatttgtaggagtcagggatcccagatgtccttcagcacaggacaatcccaaacaattttttaatgttttgcaggacattcagatgggtaaaaattctattgataattatcagagactagaacctaactctttttttacacacaaccacagagtctttttcttttctttctttcttttttttttttcagtgctaatatatgatgattttctataaggacaactatggtctaaatcaaggtactttgttctgaattttactgagattcgatcattttatcagcctgagttgcagtgtattctcttttatttctcctttattgtagaattagggcatcatatggctttaaaataggtaggttaagcttattgccaatttaatgaattttatttatggatagaaatgggggcattacaaaata

SEQ ID NO: 1882619 - DNA, 4001 bp, Homo sapiens
atcattttatcagcctgagttgcagtgtattctcttttatttctcctttattgtagaattagggcatcatatggctttaaaataggtaggttaagcttattgccaatttaatgaattttatttatggatagaaatgggggcattacaaaatatttgttatacaaagagcccgcttggtctgaaagagttgaaaactattgagatatattgggtcgtttaacctcacaacaacccactatgaaagttaaatcccccgaaaaggttaaataacttgcccaaggttaccacagagccaataagtttcaaagccaggattcaaattcagacctgtttggattcaaaatcctggctcaagaaaaatgtatgttcacacaaaaacctgtaggtgaacatttacagcagcatcattcataattactaaaatctggaaatgatacaaatgtccttcaaaaggtgagattttttttaaaacctgatacatctatatacaatattatttagcaataacaatattattcagcaaaaaagaagaaagtgacacaataatgtggccaccttaaaggcttcatactgagggagagcagccagtgtgaaaatgtacatattgtattattccacttatatgacactctggaaaacacaaaactatagagatggagaacaatcagtggctgccagggttaagggtgggaaaagagtgtaaatataaaggggtagcacaaggaagttttctggagtgaatgaaacagctctgcatcctgtggtagtagttaccggaatctaaacatgttctagaacagtatgccccaccatgccaattttatgtatgataattttaaaattaactaaaccaggctgtttccattgtactatgatagataaaaggctggagtggagaaaggggtacgtacatttgaagtgacccagagaggggttttggtcgtcttcatacagcccctactacacaagcgtgaaatttcgctttcttcccactttctcacacgaaaactcgtgtgtgtgtgtgtgtgtgtgtgtgtgtgtgtgtgtgttttcctcagccttcaggtgaggaaagggaaagctctcctttctcaaatcagttcccagaacacactcgctcttgagctggtctatttcttatctctcttcaggcaaagtcgtatcctccaccttacctgctccagccgctgtgacatcacgcaggttccgttccctgcactaccgctggttatgtttccttagtgaccctaggcctcttgcaggagagtccctggtcccagccagcgggagcggcttctccagtttgtggctctcggagagttcgcctcgtccctccctctcagataaccacctatttctgacctctggaggccgggctgagcccggaattttatgaccagcgcccgctggccgtcgtcaccctctaatttctcgcaaaactcccggggacccttcttaatgtcagtagccacagtcgccgccgctcctgcgcctagaagccttccacgaccctcaaccccacagagccccgagcaggctcgggttcccgcaggatacactgcccgcccagtggcctggagggcgcgtcccgggctcccctacgccttttggaatcagcgacagacgcaggtataaaagagagcctccactcccacctctccagggctccccacccgctccttctggccgctttctcctgaaagagcaaggcacccctagaagcttcaggctcctccacaggcgagtgcctacccacctatcaggtaagacgtgcaactgacactcagcgcgcggaggagcccgctgagaaagggtttacctgtccgaagagaactgcgcttgcatggctctggctgtgggccggctggctcttgtccgcagactacatttcccagggttgtctgcggctggagagatttagggtttggggcgtggctagcacaggcctgaggtcctaattgggaggtgtaggcatggcggctggagagtctgatctatgtgacacctccactgtgactagggtataacgtgaataatttgtatgcagtaaagttcctctgcattacatcattgacagatctctagtaagcaaaggacagaaacaggttcttattatctcttttataacacacaaacattaaaccactaattaaaaatcacagggtcccagaaaaatcagacacctttattctacaataaaaatagccaattaagcacacactgtatgtcaggctctcttctaagtactttacatgttttatcgcatttgagaaggcaaaaatcagccctgctattaaccagactcaatgacactgacaggctgctgcaaagttaacatcaagcaatatttctaccaaaatcatactgtagcagctataaagtgtcataattgttaaaggtggagggagtccaggttctcggcgtcttgaacaaagaattgaacaaatcacacaaagcaaggaagggacaaagggatttattgaaagtgaaagtacactccacagtgtgggagggggccgagcataggaactcaaagacaccgttacagaatttttgggagtttaaataccccctagaggattcaattggttacttcgggttcgccctatgtaaatggagaggatgaagtaaagttacaaagtcatttatggtgtaagccctatggagaagatatttcctgctatacctgaagtgtgaaacagttgtatgtttcctgcctccaggccctattttcctgcctcaataatcactctctttaaatgtttattgtttccttatcaatgacatgcccacctttgtcttgctactctcactaaaaaaagataatattgtttgctgaaatcataagattgtcaagaattttgctatttgaaatgaatgaattattaatgaattattattaacacattacagatgagtaaatagtcacagagaggttaagtaactcacccaaggtcattcacttgatttggctacaggagcacatattcttaattgctgtagaaacaggcccaagatgttattaaagtttcacaagtagcaaatggcaaaactaggattagaatccctttctattcccagttcagtctttttccttatactacctcactgtggtattttttggattgggacgtatgtgtgtatgtgctctctaactcctctgcctgatcttgtatacatctctgtattgcaaatgacaacatctctgggatccagtctcttcatacttaaaatagaaacgaaatcagtttccacccattgataaggtataaccttatcaagaccagcctggccaacatggtgaaaccccatctctactaaaaatacaaaaaaattagctagatgtaatggcgagccgcttgaagctactccggcggctgaggcaggagaattgcttgaacccaggaggtggaggttgcagtgagccgagattgcgccactgcactccagcctgggcgacaaagcaagactccctctcaaaataaataaataaataataaaatacgtacacattcttgtgaagtttgtaaaactaggtatttgggtgcctcctgccttgagattattcctaagtggctccttccacccattgttatgaatattaaatgagttaataatgtaatggttgtgagaacacaacctggcaagtgacacaaggagcatctaaagggaattgtcaacaactgagtcagatggaactgagaattaagtacctagaacctcagtgctccaaaacgaaaaattgccatgaggattcaaataaagcaggattggaaaaatataaacaattcaatctggaaaattaaaaattagaaaatcattgtcaaataaactaggcaagattaatgaaagactagtagaaagcagaaacctcctgtagcttctcattggaaacaacagaggagacaattaaccagaactccgaccacaaggccaatttgatgcaacttggtgttgtcagtctcattaaccatttagtgctgtgaaaggaaaatatcttg

SEQ ID NO: 1882620 - DNA, 4001 bp, Homo sapiens; identical to SEQ ID NO: 586073

SEQ ID NO: 1882621 - DNA, 4001 bp, Homo sapiens
tgatcttcccttcctctaaatacttgacatattttaattctacaactcatttgaaaattaatcgtggtttacactgtgatatctgtattcacatatcacttttaacattttgatgctgaaatttaggctcataaggaatgaaaactgtaatttatatctacaaatatgatgcctctatattgttggaaaggatctgatatcaaatatttggtctcactgacctcttaggaacattcttatttgtctacgtaagcttattttgagattgtaaacgtatgatcatcttacttttacttctctgtacatggcttctagcacaatacttaacattagagtctgtgatcccaagttctcaaaattaatgatttgctgattgctgatgatccttgacacataatatctgagcatcttttttaaatatctgccataacattgtatctatttttattaagccatttcccagtcttccttgaagtttacagatatgtttcctttatatgcatgttctgggctctcacattttgtacctactagcacagttttattatattctaattattcattcatgttccttgaggtcagagaacacagatttcaactttgcaggctcagcctcagctcaaaacctggcatagttgctcaataaatctttactgattagactgtgagcttttgttgggaaaaggatatgccttttaatgctttgttcctttactgcaattcacaggggatgttggctgtttttcaaattaaaaacagaaaactgaggagggtagaatttcaagttccattttcaaaggagacacacagataagtgagaataaaaactgtctacgacaatcagctcaacaacacgtctccctttgtaagacagaataacaagcaatttcacagttaaatgatagggcttgtcactcttcagcagtttgctgagttttaaccctttcactatggcgttctctccattattacagagaaaggcagatgggagcctctcccagcgaaaagactacagcttgtgtccttcataggagaaaacagtgatggctccagaacttttatatgaatgaacttagcacagctatcagagtggatggtggtgggagggctagcaggaaactagtaaacaactacaagctgccccttcagggaaagtttctacttggaatataagttacagattaatgaaaatagaaagatttcccaaagatacttattctcatgttttataaaagatcagggaaatgtcagctgtccacttaacggatgacataatgaattaagagttcgataggcggcaggcacaactaaaagccaaactcgacctaagtcttatgaaatcctacttaatgagctttcttgactactgctagcctcacttatctggcaggagtcgaaggagaggaagccccaagctcctctgttccaccacctccaaagtcctgaaccccttctcaagtgtaccacttcatccctgcttcctttcgtcccgtgggactaagcattcctcgggccttcactctcaccacttgctgtccctcaaaaagccgactcacccctttccaagcgcagtgaaccgtccgcaaagcacgaggccggttgcgagctgcagaaagcccacgctcgccagcgggacccaaggaacgctagaactatacgtcccagaacacttagctttgtttttaactacggtgcagccgcaaaagggaaataccggctcaggacccaggggagttgtagttctctaatccaaagaaatcattatttggcaacgtacggttttcagggggatataccccgcgactgcgttcctgtaggatgtgagacaaagagaataaatatcccaggattgggtgctggtgggaaaatttgctggaagcgcagcattggttaccaattttgtgctcaacctctcagtaccagggtgaaagtggagacgcaatctcccttggaagacgttagtctccatctctaacgctcccgagacacggttcgcaattaattatgacgtcacagccaatcgtcaacgcgaaagcctgacgctctagccggctctatctcgctgccccgccgcgggcgcagagctggcgctctagcccacggagttggttaactcctctcaccggcccctggaaagggttccaagtcctttagtacccgacgctgtctgggaattccgggcgtttcggctccttggtcgcagaggcaggaggcgtgcgtggcaggagggttcgggttatatactcctaggtcctgggacagaatagttacgacctctgggacaggaactcttctctcttttgttaataaacttccaactccctcctcagacccgaccgcatgtctgtcatggacctcgccaatacttgctccagctttcagtcggacctggatttctgttcagattgcggctcggtcctgcctctgcccggggctcaggatacggtcacctgtattcgctgtggcttcaacatcaacgttcggggtgagaggcttgtacgcaggggtcctggcggagggcgcagggtcggaagcttggggaactcaagatcggttgggttgaggaggggatcctagagcaggacatcaggcggttgtacatttggtctagcgatgaaaactgagggaaaggatgtagggcctcctggcctaaccagccaggggaaaggggaggtttccggtgtcagctctctctggttgtctccataaccagttcttacttgcctgtgcagactttgaggggaaggttgtgaagacttcggttgtgttccaccaactggggacagccatgcctatgtcggtggaggaagggcctgagtgccagggacctgtggtaagctaatgagatcaagaactggctccataaggtgggtaggaaagaaatggaggagtgattgcaaagctctggagagttttgtgcccaattccaagagggaaaagagatgtaaaccatcgacgtttgagaggcgtgatcgcctgattcctgtgggaagtaaggggatatgaccaggcctccctaacccaccagtttcttcccaggttgacaggcgctgccctcgatgtggtcatgaaggaatggcataccacaccagacagatgcgttcagccgatgaagggcaaactgtcttctacacctgtaccaactgcaagtgagtattctttcccctccctctgctcagtctgtttgctaactaaacaaatccagtgatttatttttttgtacgaaatggccgtttcccttggtcccatcccttatttctgtgcagttctggtaatagggagatttgtagttgttttttatttttttaagttacacttttttaaacctttttataaccagtgaaataaaccttttaggatttttttttttttttttttttttttttgacagggtgtcgctctgtcacctagcctggagtgcagcgaggcaatcttggctcactgcaacctccgcctcctgggctcaggtaatcctcccacctcagcctccaaagtagctgggaccacagacacatgccaccacgcctggctttttttttttttttttttttttttttttgtatttttagtagagatggggtttctctatgtttcccaggctggtcttgaacttctgagctcaagtgatccacccacctcagcatcccaaagtgctgggattacaggcatgagccaccccgcctgacctacttttaggatatttaaaaggaaatgaagaaaaaaaaaacaacataagaagcaggtattgtttagtggtcagcatcttatactgcagtcttcaaccgcagtcaaggtagctttctttggagagaattagtcacacatgacttagagaacatgggctttctgaatgcttttaagacctcatttttgtctttggtgttctgcagtcactatagtatatcaaaatacgattttcttttattctgtttgggatttgttggactttctgaaactgagagtggacttttttttcatcaaccttggaaaattatcagcca

SEQ ID NO: 1882622 - DNA, 4001 bp, Homo sapiens; identical to SEQ ID NO: 586074

SEQ ID NO: 1882623 - DNA, 4001 bp, Homo sapiens
tcctccgatatgatcaccatttcctctctgttctccggctgatgctctaacatccgggcttggagctcctctggcaggatagtcaagaactgctccagcaccagcaattccaggatctgttctttggtgtgggtctctggcctcagccactgatggcaaagttcccagaatcagctcacagccttacagggtccaggtgtctcctggtagcagaaatgcctaacgttctgatgagctacctcccggttgctggagttcttccatatgaagtagcccatattcttggccccaagtgtagtcctctgctttaactgtcaggcgacttttttattccctttgagatttaatagtcaaggctgcagctgttatgggctgtaacatttcacgtaaagtcttcttttgcaggttggggtatatggaagtctgctttaaggaggctgtccttgagcaagtttcttttgggtcactcctaaggcaaaataaatcattactaactcgcagaaatgaaaaggttgctaagaacttttttttttaagattaaagacgtctagttatcttgaaattcattgattcaaaccaccaattcaaaaggaaaatgaacaattcgggtgaattttatcatgtgcgacagaaagcacaaactaggtaagacagacatacaatttataatatgatttgaaaatttcagatacgaggatgaaatcacttttgtcagacccagataaaatacggcggggatggcatgaaggagaggaggttcatgcttacatgtttgagataagaactgtttccaaggactttctaaacaccgcataagaaaccatttcatttcctccatgcatctcctgctttgacaaggtttatcagtagacattctttatagcactgctgtaattcagacacgatgttctggaaagaacacttgcataattatggcatctccaccaatgaactgacaactccagctttgagcctctgaaaccaatgaacacggtctctaagcagcttatgtgaacctctctttttgttaataaaaacttgcctttacccttccctcgttgaatgcgttagtagcttgccattctgtgcattctaggttataatcttcatttctcatttgcgagtaaactttttttaagtttaacaatagaaacaatgtgacgcttgactacaaatattataaaattaagacaccaaagcaagcatgctaatgtgtctcactacaaatacatctacagataacacttctgatcattagaaaatgatccaattgtgtttagaggttcaatgacagcataaacagatttaagtgtgactatacacctcatttctcccacagggctcctctgctaatgcttctgggagacaccttcatacggccagcgccaggaggcgagaggagaggaaaggaagtcttctcttcacgccctcctggggcccgtcttggcgttgtgtgtggtggagggggacgaatctggggtccgcagtcgcagcctcctcttgctgctgccgccttcatccccgaaatcctgctcctaaccatcaataggaaccctgaaaaaagtcagaggtgtgaagtgcacacataaccctgggccacaaactcggtcccggacgccacaggacaatcgctcaccaggaccacacatcctggccggaagatgggcgggtaccgcggctcccgatgcttccggctcctctaggaagaggctctgggtggtggcctcacgcgccccctccggggagggagccgccgcggggtttgagggcgcagtaggctcccgtcctagcgggtcgcagctccttacaagattttgaaatgttggtggattaatcttctagaagggtgctaggtctccccgtttcccccgccaccaactttagagttgtggtgtacaagcgctatcttttctgatgttatatcccataggaatattttcagtgacataatcaagtttaagcattaagaactagggccctggaataaaatgtgcgttaaaatcctggttctaccacttactatgtgatctttagcaagatagttaacttcactacagctcaattttctcatctataaaatgtgaaaaataatagttacaaaatgagataggacatactagcacactacctgtaaaaaactgtgggctcaacattaccttaaaaaacaatccaaatattgtgttacttagatcccgtcaggacatttttaaagtcattgaaaataaatgctaagctatttcttataaagcctcttagtgggagattttgtacatttcacattagattatcatacatctaacatcaaggtcctgtttacattttataatgtaaaagccttacatactgtggaatgtttaagacttaaatcattcctccctaccctctttcatatactatcgctctatactctcttctcagtcttttttgtagagagcagccagcaacaacgaaataacatttcaggaccattatttccagtactaacttcctcagtaatcttccacaattgccacgggccggagaatcctgtcagtttctgttactgtcagtttctgttaggagaactccttatagtccctatcaacttaccccagaaaggtgccaaaaaccagtaaaagcctggttatcctgtgtctatcctccaacttctgaggtttagttcaatttgaacaccttttctcactcctaacccaatttttccttaattcaattctattctcttactgtcttacttaaatgtctggattctggcctcttccctggggtgttcttctggttttttacttcctggtatgacctctggacacagattttggcctcatataggaatgccaccattacatatgtcctcatttgacattactctctaacttaacatgagcatcttagttttgtggtcttcagtttttaaagggatgctctgaaaacactgttctgcagtgcactgtgcaacctatttcactcctgggtttagctgacctcttcttgtgctaaactaactaggaaaataaactaggactgattatcagtctctttacctaaatcttccttttcttcccacactgtaatcatgattatttccccagacagtctctatttctctacattgcactgccatagactaccctattagcccccctaaatgtagctcttttggtttgactttagtagtcaatgaaagaaggggtacatccccagtctcacagaaagcacatacacacagattgaacaccagaaactggtctttcagtcttccatcttgcccaatatttattttttatttaatatttttcatattgtgccatttcctcagcatttacttacaaatttaagttccttacattaataggttttccctcatgtgaattctctggtgttgactaaggtttgagctctgactgaaggctcttccacactcactgcattcatagggtttttctccagtgtgaattctaaagtgtcgaataagatgtgagctcactcggaaggttttcccacattcactacactcgtagggtttctctctggtgtgaattctctgatgcctgataagatgtgagttcaggttgaatgctctcccacattctttgcaaccaaagggtctttccccagtgtgaattcgccgatgtctagtaagatctgagctctctgcaaagcttttcccacattcattacattcatagcatctctctccagtgtggattctctgatgcctagcaagttttgagctgtgcctgaaagctttcccacattcattacactgatgagttttatctccactgaaaactgctgcatgtttagcaagttttgggctcttgaaagattttccatattggtgatttttttctccagcataaattatttgatggttaataaaatctgagttccatttgaagctctggtcacaggtaccatgtttacaagatttctggtgtgtgaattcatttgagttcagatttaatctcctctcacatccatcgtggcttattatttcacctctg

SEQ ID NO: 1882624 - DNA, 4001 bp, Homo sapiens
taaagataatttcacctgtctttttacatttttaatatggctattaataagaatgttttaaattacataggtgaatcccattatattcctatttattagatagaactgaccttcagttctgcagaaaaccattccacacgaaagggagaggtaatgcaaagtctctgaatagggatgaatttggtgtgttacaggaactgaaaaaggccacgtgttgaaagcactggattaaggggaaggtgacacaagattaggttagagaggtgaacaggggccaggatgtgtattctaaacgtgatggggaactactagaagggaggaacataatccaatgtttgtttagaaaagatcattctggctccttaaagaggcaagaatgagaaaagagcagaagtaaggaaatcagtccagaggctactgtagtaacccaagtgaaagaaggtagtggcatggaccatgggttcacagtggatataaagagaaacaaacagacttaacgtacattttggagatgaaaatataatcttgctcattgttgtagattcctaaattctgcttgaaaagatgtttctgtattaggttaaacaaatgaaatccctgtttttgtgggtcaaaatggttaaataccagaaatgtaaaatgatttaacctaatagaaacaaataacgacagagaagaatcagaggaatgatacaggagaagggacgttgaaatggggcttatttattaaaatgaaaatttttattgttctccttaaatctctgtggaagccacccttatcaaaaaaaaaaaaaaaaaccctttgttgaaaggcaaattgccaacaaacccgatgagattcagaacactgctgcaataacatatctctgtagaaacttatacttccatctggatagcaaatttcctaagctgataaaaccaggttatcaatgaaaggccagagtacagaatttaaaggaagaatgcctgggtatgaatctttgttctgccagttactagttatatgaccttggctaatacatttttctctctgtgcctcaggttccccatctgtaaaacagtattataatgatatctacctcataaagtaggaattaaatgagtgaccaaatgtgaagggtttagaacagtggctggcccataatgttaaagtcttagcccctaacagcgcacttagatctttttgttagcattaaattcagcattttcttcctatcaaagctgcttaaatcagttaactggcatttgatcttcgtgggctcattgtattgttgctgttgtgtatctttttaaataatactcgtaatcttaacaattagcataattttgaaccgctccctaatacctaaccccaatcccaaaccggacggtcgagcctatccaccggcagagaacaccacccaatctcgccctcactctgacactcaccggccagaccttttcttccgtccgttttctgcctctggcccagggcccagctcacgtagcgttttcgggggctgtttgggaaccgttagcaaccggaagtggctagaggtcgcgagagaactgaaaaaggggaccggcctttcccggctgcctaagcacttgggttccggcctggaaggaggcccagggctcccacaaagagaaataagggacctatttggatggatcccaagaaacactgtctggcatctgatttgaacgaggctcggcgcagccgggcccttttcgcaaagtaggcccactgcagacctgtgggaacctccgggatgcctggggacccgcatctgccgctacccgcaatttcctatcccgaccctctctgcagttgtcgaccccggccggcggctttgagcgtggggtcccgcagaccctggcacctagggggccgaagccgagggatcttggggtagaagagcggtcctacagagctgccgcttcgaaagagcccccaatcgaccgctgatggggaatggaggattttgctgttttattgcagcccgcccccggagaaaggcgggctcggacgttcttgactttaggatagactggggaggggtgccgaggagcgttcttccctttacgtctcgcggtcgcagactgtatttgctggtgccctgctcactgtgatctcgcaggaccttgcggacttacggagacgaaaagtggcctactttgagcttctctgatccttaggggaaatgagtgtccaaagagaaataggtgcagagtgccggcactagaattctttaaacctggattcaaattctgactccaccactctccagttaggactgagggcaatttatttttaacttctccaagcctctgtttactcgtttatgtaactcaggctaataacgtagtgtctatttcatagggtggctttgactattaagtgtgagagtgcatgtaagaacagtctaagggaatttccctgcctttccccttgtctgctgtcactctcatccgtgttagacaaatggaattaattaaccaacttccgcttttctgaagcacgggtaaagagtgaagtgcaggacttgggtaaaggaaaaaccaagaaggatgcaaaagatggatggtcattgtgagatccacagaggtgctcatcccagcactttcacctcacttggcatctgtcacatggtgggtgcttgataagtacatgggtgaatgaggacctacctaagcagaaggaattattgaataagactagaattgcagggagaggatgaatcagattgattagctacttgacaaaaaaaggcaaaccactcttcctgtcagaaatgtatggcacatctgcatatttcaagggctgccacttactgcaactgggaaggagatctcagaaccgacacctcaactatggaagctttaatctattgacagcaaatgcaacatagcaagtaatataagacagaatgtgatcagtgcaaaatcgaataataaagtcttgagagggggttattagaataatagacgagtgtttagattgagtagtgagcaatgagataagtcctttgacttgggggtacaggggaattatgaccaggggtatgggatagggagaaggtcattctggaaggcaataaaaggcagacaggacgctagtggtagaaaaaaaggaaaacacttgtttatcaatgtaaatcaatggcggaagaattacatatgacatatgctattgaggaatacctttcaaccgttcaaatgacaaaaggagtgtcagaacaatatatattccatttttgttgaaaaaatttgtttatatagatataatttgtggggtatttgtacaagaaaaggatgcactccaaacttaacagtgattaccccatattgaaaattgtgaaacttttaccctacttgcaagctaacaatttaacttgccacagttttatggatactaacagaagacactggactcctgcgtcagagacagaagactttattacttaataacacaggcatcataagctttatattcccttgttcccaaagcttatgttcccaaagcccacagaggggcctaagcttggcattcccctgctaggatggaacagtgggtttgcaacctagcagaggaatgccaagcttaggaagcccaacctttgctcagccttgccccagaatgagccattatctttattatcctggtcaggaaacaactgtgatctagaaggagatacaaacatccttgaaaacctaacctcaaagaaaaatctaccataagactaggagtaatttgagaagccattaaagaattatctcccaacattctaggtaaatactatttgagggtggagatgtcagcttttaagaattttatataatattaatctttatcatgtttcatttatttttaaaaatacaaaaaataaaaggcaagcatagaagtttaaattttacttagagataaggaaccactcagggtcagtgattggaagaatgataatgatatttaaggaccacgtcttgtatagttaggaaggctatctcaaggctgttgc

SEQ ID NO: 1882625 - DNA, 4001 bp, Homo sapiens; identical to SEQ ID NO: 586091

SEQ ID NO: 1882626 - DNA, 4001 bp, Homo sapiens
tggtagggtccccaggctggggcctgggcgagtaaagcatgcccctcctactacccaggctagcttactgcacgaactgggagtttccaccaaggagaaagagtgttggcccgaggtaggactcctgcctctgtgggaaagccaagatcttgtctaggtgctgggtcagggcatccaagttcaccctccacacgaagcgcccgtctacctctaccaggttagtgagcaggtgctgccgcacggccatgtcctgtgggggtgcagcagttgggggaggttccttgtgcggtctgggggtgccactcttcccttgacaggtcctggtctacaataccatccggggcaccttgggtgtatcacctggatgacagaactgagctgttcatccgccagttttcgggcacgggagcggggcagctcatctgcgatgttgatggccctcatggctgccacataggttgcaaagtgggagacacctgtgctttccactgggctgatatctacagcaatgagacgttccaccagctctggctgtgggagagaaccgaactgggaccagtcttaggcagacatagggagtctcaggcatggctcctggagcctgaacttggtcatccaacgatcatgtgagtcccaggttgcctgcagggccctcagggtatatactgaatgggaggaggccccagacatgggcggctcaccctctgtagtgccagcagcatggctgtctttcctcccatgctgtggccaacgacgacgcagggcaccaggcccagctggggcagaaggtcctgcaggtcctggctcatgatctcgtagctcatgtctgggctgtgggggctgtcaccgtggttacgagcatccaccgtcagcacctggggagtggggtgagacggggctgcgttgatatccccattctgggggtagacagccaaaggcttgtagggacagcaggtcaaaggtgtggagagcctggggatacaccctgtggaggggaagggcccagtttccagacctaggaggcccagatgaagaacctggggccactctgccagagaagagcaggccccagggttgtgaccacgtctctgaagggctggcctggctgggtggcaatctcggagaatgccaggaaggagactccaggaatttccaacagtaggagcacagaagaatgggctgccataagaggtggtgagctcccggtcatccctagtgaacaagcaggccccttcatggaaagggtgcaggcgcctaggcatgggccagccccgatggagatctacaacatgaattaatgaagatggcaacgtgagggaataaatggggttgccgttcagggtccatactcagagtgagggatctggaagtgagcgtgagaagcgggaccccccctgccccgcctcctctcaggccccgcccactcccgcccagccccaaaggagccccgcccactcgaaagctcaccctacggcctgtctgctgggccaagatcttggcgatggagttgaagttagttttgctgccgaagagcccgtgcaaaaagacgacggccgggagggctgcctccccgtccagaagcctgtaggaaagcggaagcggcctggcaggggaaggatcgaggtcagagtctgagccggcggagacggggaaaggggtagggggaaagagctttgggggagaggcctgggaggtgacaggcccaaagggaggagatggggccgtcggggcccggcaggaaaaggaggacagaggatggcctcccgcccggtgcccttgactgacctcggctcggcgccccctcggccgccgctgctgctgctgggtgcgacaggcaccctcgcgaagctagggccgtgggggccgagtccctcacgcgggagcctccaggctcgggtccagcggagcatgcttgcaagctgttggccggctcgcatctcacaaggtacgtcctccccgcgctccttctcccgccctagctcgcagccccgcccatttccgtcttcagccgccccgcccagttccgacttgagccccgccctctccccgcccccatcgcgggattctccgcccttggtcccgtttccttacgtatccccgagaacagtccggccccgcctccatccccgccccttacgccattacgtaatccccgcaggctttgcgcgggtcgccctgagcgccgcacctggcctcgccctaggctgggcaacccgcggtgcttgcccctcccctcgcgaagcgccgcggtgcgtagaatctgggaattcggtctgcgccgctctgtgcgtgctcggttctggttgcagcttagggctcggttcccgccccgcacctgccatcgctcactgacctgggtggctgccatcgtttctgtgccgccggcgggggcgagcggcgccagggtggctctgggcggcggagtgccagtgtggtggcgccgtgctccactgccgggggcccgggcaggttgggcggagcacggacacccacccatcctggagtcgtcgatctagaaggagctcgggggcactctagagctcttccccaagccccttcgtcccttttacgtttggggaaggctcccccagtctgatcccacctgcttttctgcccatactccccattctcatactcccctatcaggcaccctgcctttcaaggtcttctccacaccccacctcctgctggggtgctgtctgtcttccagatagccagttgcccgagtcctatacttttttttggtgggggtcttaccctcgcccaggccggagtgcagtgacgcgaccgtagctcactgcagcctcgacctcctgggctcaagcgatcctcccgcctttgcctcccgagaatctgggactacaggcgcagactaattttaacatttttttttttttttttttttttactgaatcatggttacaatttttttttttaggccgggtgcggtggctcacgcctgtaatcccggcactttgggaggctgaggtgggcagatcacctgaggccaggagttggagaccaccctggccaatatggtggaaccccgtctttactaaaaatacaaaaattagctgggcgtggtggcgggtgcctgtaatcccagctactcgggaggctaaggcaggagagtcgcttgaactcaggaggcggaggttgcaatgggcggaaatcatgccactgcacaccagcctaccggacggagacagactccgtttaaaaaaaaaaaaaattgccgtgggtggtggcacggccctgtaatcccagctactggggaggctgaggcaggagaatcgtgtgaacttgggagatggaggttgcagtgagccgagatcttgccactgcattccagcctcagtgacagagcgagactccatctcaaaaaaaaaattttttttttaaaaaatagaagcgggggcttgctatgttgcccaggctggtctcgaactcctgggctcaaagtgctgagattacaggcatgagccaccacacctggcccaacaaaattttttttagagaaggggtcttgctaccttgcccaagctggtctccagctcctggcctcaagcgaccttcctgtctcaggtatatggcttttattttattttttctgagacagggtttcactgcgtcacccaggctggactgcagtggcacaatcacggctcactgcaacctcttccccctgggcccaggcaatcttcctgcctcaccctcccgagtagctgggaccacagatgtgcaccaccatgtctggctaatttttttctgttttgtagagatagagtcttactatgttctaggcatagcaaggggacagtttcaggctggtctggaactcccagactcaactgatcctcctgcctcagccccctgagtagctggaattacaggtgtgctccaccatgcctggcctcagctataggccttttaaggcattgtataactgctgcctcctcctcaagccttcgcagactttctgagttaaaactaatctcttt

SEQ ID NO: 1882627 - DNA, 4001 bp, Homo sapiens
ggtagacgggcgcttcgtgtggagggtgaacttggatgccctgacccagcacctagacaagatcttggctttcccacagaggcaggagtcctacctcgggccaacactctttctccttggtggaaactcccagttcgtgcagtaagctagcctgggtagtaggaggggcatgctttactcgcccaggccccagcctggggaccctaccaggggaggccttgggtgtggaaggggggtggctgagaggccagaaataccaccgggcatatgggctcacacagctctctccatttctccccgttctgcttccacgtgtctctttcactcctcctcatcccactttcacccgtttttgatggccgtcgctgcgatgcacagtcccagccaccaccctgagattatgcggctcttccctcgggcccagatgcagacggtgccgaacgctggccactggatccacgctgaccgcccacaggacttcatagctgccatccgaggcttcctggtctaagagttgctggcaagaagatggccgggcgtggtggctcatgcctgtaattccagcactttgggaggctaaggcgggaggatgacttgaggccaggagttggagaccagcctggccaacatggtgaaaccctgtctctactaaaaatacaaaaattagcctggcgtggtggtgcacacctgtaatcccagctactctggaggctgaggcaggagaatcacttgaaccctggaggcagaggttgcaatgagccgagatcacaccactacactccagcctaggcaacagagcaagactctgtctcaaaaaaaacaaaacaaaaaggaggcacaaaaccccaggcttcaagtctctgcagcctgctccacatttgggcacagaaggactcagacaggcactgtgtgggcacgaggttttacaggggtggtcagacctcaggctttaatgaataaagacactactcccaaagtcctgggctgaggtctgtgtcaccaccaacgtccccgacccagggagaatctggatcggggggtgctggcagctccagggtccacgtgggctccccgagtacccttggcctctctctgcagctgattctggacctgctgccacaccagctgctgcacgtcctcctgtggacaggagagcaggttcaaggctgagcctgtgccctctttccccacacctcccaggccctgatggcattcccctacctcccaggcctccagctcccgcctcagcctcagtttctcctccaggacctccagcagctgggcctccatggcgtgtagcctggctttgcatctctgcagctccgcctccaccgcctgcttcctgtgggtggcagagagagtagctgaggctcggaccctgtgggtctggttgtgaggtcctgggggtggacgagtatggccacagcccccgcctcagtgaagggcagctggttgtgtggctttccttccagaatgcctgactagccccccgctcctccattagcaggacaaggccctgcaggggagcccccaactcccctcccagcccccaaaagcagcttccccttacttggcaatggcttcatcccgttcctggaggacttggtccagggagggttctgtccgggtgtcccccagtgctccagccgcctggtactctgggctgtgtcgcagggtgacagaggaggaggcagcgaccaagtcttgtctggaagaggtgtctcactctgggccctcccgccttggcctcggctttgatgttgctgtcaggtggagaggcggctgaggtgctctgtacctgcccctgctgctgccccagtctcatggacctatggaaaggaagaggaggtggatggtgtggccactgcctggcctcaatgcaagcagcgtgggcagggtatttggacctccagggagcaaagaattctcacccagtcatcagggaaggacgaggcagctgtgttcagaagaacacttaccctcaagggctgggacttagggtggcctggtgactgggactcttggcagctgggtggagcaagcgaaagacatggccctttgccctcccttcccagcaaggcactccctggcaggccccacccctgccaggccaaggaggaaggcctgctgcatcctagaaacttccggccaggcccagagcacactcagcccccttcctcccttcaccacaagagggtgctctacccacgtcttgtgaaagaaagggcggagctgggcacagtggctcatgcctgtcatcccagcactcggaggctgaggcaggaggatctattgagcccacttcaaggctgcagtgagccataggatcacaccactgcactccagcctaggtaacagagcaagacgttgtctcaaaaagagagggagaggtaaggagaggagggaagaaggcattatgtctccaatgctgagaggcataaggtaccccagcccccatcctgaagggttagcttggtaccttgaatggcatcatccacacatataaatataaccttacctctgcagaaaaacagaaggaaaaaagtgtatccctaacaaattcctcctcacattttattttatatatatatatatatatattttgagacagagtctcactctgtcccccaggctggagtgcagtggtgcaatctcagctcactgcaagctccacctcccagattcacaccattctcctgcctcagcctcccgagtagccgggactacaggcgcccaccaccacgcccggctaattttttatactttcagtagagacggggtttcaccgtgttagccaggatggcctcgatctcctgacctcgtgatccgcctgccttgggctcccaaagtgctgggattacaagcgtgagccaccgcgcctggccatttttaattttttttaatttatgtatttttttgagacggagtctcactctcttgccaggctggagtgcagtggctgcagtggtgcagtcttggctcactgcaacctctgcttcccgagttcaagcgattcccctgcctcagcctcccgagtagccagtggcatgagccggtggcgtgagccacagcacccaactcaatttttttttttttttttgaaatggagtctcactctgtcgcccaggctggagtgcagtggcacgatcacggctcactgcaagctctgcctcccaggttaaagccattcatctgcctcagcctcccgagtagctgggactacaggcgcccgccaccacgcccggctaattttttgtatttctagtagagacagggtttcgccacgttagccaggatggtctcgatctcctgaccttgtgatccgcccgccttggcctcccaaagtgctgggattacaggcatgagccactgcgcccagccacatttgtgtgtgtgtgtgtgtgtgttttgagatggactcttgctctgtcacccaggctggagtgcagtgagatctcagctccttgcaacctccacctcctagttcaaacgattcttctgcctcagcctcccaagtagctgggactacaggtgcatgccaccacatccgggtaattttggtattttttttagtagagatggggtttcaccatgttggccaggctggtctcaaactcctgacctcaagtgatctgcctgcctcgaactcccaaagtgctgggattacaagtgtgacccacatgcccagcccacattttttgttcttagactcaatgtgtcgcccaggctgaagtgcagtggcacagtcatagctcactgcagcctcaaactcctgggctcaatggatcctccctcctcagtcttcgaagtagctggtactaaaggcattcaccaccatgcccagcaaatgtttttaaaatgttttgtagacatgaggtctctctgtggtgcccaggctggtcttgaactcctgacttccagtgtcagcctcccaacgcaccccgccctcctaacatcttcaatactacctctaatattcccagcgttctgatccaagagca

SEQ ID NO: 1882628 - DNA, 4001 bp, Homo sapiens; identical to SEQ ID NO: 586099

SEQ ID NO: 1882629 - DNA, 4001 bp, Homo sapiens
gttctctgtggattaatctgaagaaatgggactcagctacctgggagattcctggaatccttgctgatatctcagaaactagttagtcttggaatcatccccattaggatttcagctggagtggacagtggctggtgctgaatcacaactggggccagggtgagtttgtattcctcagcgggagccctggaaggcccaggcagaccaggtcactcgatgaacttcaaaatatagcaaacctgtgctttcctggttgaatgttttagacttcacttctggtgttaagccaaggctttactgttattagtgtgcaaacttggggaagatgtatttcagtttcagtatctccaatgactatagaaatatcaccttatttacttcagcaaaactgtgaggaagaccaaaagacacagtcagaagcaggttgacaagtcagagccctactatgtgaagcatcatgtttagggcagaccacctagtgtccctttccaagtgaactgtcccaggtttaagaggagtgacatttatttgccagataatagaaaaggtttgagcacactaatagaagccttggcatattttttttccttagtaaatttggtagataaaaatgaaaagtagtggctattaatagcaaatgttttatagaccctagcaaaaagagaatgtttaagtcctatcacattaaacactaaaagccttattcacgcaacattatatccaagatacttcaggcatttgaggcaggaggaatgcaaattaagattttcctcatcaactcctgcttattcctcttgagcatttatgttcttaggaaactcgttttaaatgtaccttaaatgtacatatgtgaaaaagactgaatatttaccaagaaaaattttccaaacttaaagagcgtgagcaacctagtgagtgttagatcactaccgcattgcttcaaaatttcttctgacctttatcaatgatagatatttatttttacagcatagttggcacatgtttactattttgtgtaatagtttcatttaacgtttccctgtgtgtgggtatgtgtgtgtgtatttccatgcatcgagaaagcccactggttcccatttttgatggatatttagtaaatacaataattcgaatttggtaatattttaagccctaatgtcagcaagcaattgatgttcttaaagctttgttgtgtgggagaaagagagtaatgacaccaatccctcattcatctgattctgccagtcttccagcaaagcagggagtatcctcagtgcctttccttcactgtttacatttgggctctctccatcctgcactgctgtggacaatctacacagtatattcccttttctattacatgtacctgcattagacctgaatggattattttcaaacagtacaaagtcacttggaggaatctaagtaactgctgttggaaaaagataaaaaatgtcatcaccagttaaataagcattgttttatccattccccagaattaaagtctcaaagcagatgggggattgttactttaccaaaaaaagaaaatagctcttgggttggtatttttaataacgctggagagtttcaaggcccgggaatcaaagacaagggctacctgcttagcgttggaaccatgggtctcccagttccgctagttggctcctcctccgtctgtcctgcagtggcgcttgcagaaggtaagcagggttcctcctgctttctgcctctcagtcccaccgtgccaccacactgcctcccatctgctcaggtccccaccgctcccattaccttagtgcctttcttgtgggagcaccacattatgcaactttcagagccttccttggctttcacacacactttcctgccagactcccatttctgtagcctctgctgcatgaatctgtcctacaaataaatgtctaacctactcatgatgcttggatgtgctgtttcccagataacttgcattaagcgagagtggggaagagaactaatgcggggttccccttatgtgccaggcactgagacaggaaaaacttgcacaaattgttcaattcaattacacaactctgtgaggcagccttcctccctcctctcctccctctctcccttctacaaacactttagagcaactaccatgtatcagattggatattccctctaataaagaacaagtattcacacctcagacaaacagcagcaaattaaatgaccaacccttaacccagtgagaggctctgggagggcccctcttatgatgagcaccttcccttgttgattcaggcccctggaggacttctgtgttttctgttgttgaaagaatcccttatgcaaggcagcgcagggcccaggactgctctggtctgaactcagatatgtctggcctgacatatcccggggaaaggcccccgggagacggcgcacaccactgcttgggatgacttgccaaggtcatagatctggtaaatagtagggctgggatttgagcccaggttctggtggaacaagaaagggagaggtgtagagcaggccgggtcagcaccatcctcagcttcccatagcccacttgtatctggtccttgctttgcccccaagctgccaaatcccataaaatcacaaaatgggccaagctgggctagatagtccttgaacgtgaggcttcctggttgcctgtttagggggcagtctcccagatactgctttgggtgaaaagttctgaagtccacagatgatttgagagctgccgccatcttttccttctctctttctcttgtatggagaccgtgtctaatttatgaagagtgcagaatgaatattttggggaaaaatactgaaaccatatgtgaccctacacagaaacccccacacaccctactcttctgcacccagggcctgtctggcctgacatacccaggggaaaggcccccgggagatggcgcacaccactgctctggaggtctgccttccagtggggtctggcagaggaagttctgggagaatagagagaggatatatcatctggtttctgcctctgtcatctcaggcttaactagattaggtagcacagttctcataaactaaggctttaatatagacaacttcaagaaagtaatttaactctgtgcatttgatttgtaaaccttataatctcccgtgtgtgagatgagtctcatattgagggaaagtccctgtggccctatgattcattatacacacagaggcacacagaggaaaagagggagggagaggggggaaggggagggagagagagagaaacatcaggcaccagactgtgctgggcactctgttggactccataccaggcagctgtgggctccttcttcatgggactcaccgtctagaggagcacagacaataaacacttcccatctgggtaacctggaagtctttccttaatccttctgtgcttcagtttcattaccaataaaaatagcttaataatagtacctatctcattgggtggttgagagaattaaaaaagataatctatgcatgacgtttagacttgtaagagctcaataaatgttagtagcattaagggcagtccagagtactgtgtcagcacatagaagggacatctgccccacatgtggggctttcaagaaaggagtcttgaaggaagtcttatctaacgtgtgagtcctggaaggctaggaagagagaaccaagcacagaggggccagggggaaatagttccagtattgctaacaccgcatgcaaaacctcagggctaaattcatcatatcatatccaaaggagaccaacaaacaccaagtattacagttacacattttcatgtaacaggtaatccccaaatttagtgacttaaaatgtactacacaccagcagatcagtagcaataactactcagcacctggtacgatgcttattcgatgcacattcaacttcagcgaaataagtcactttcagggaaaaagtagagcctttcctctttgaccctctgccagtacaaaagc

SEQ ID NO: 1882630 - DNA, 4001 bp, Homo sapiens
tcgtgatccgcccgccccggtctcccaaagtgctgggattacaggtgtgagccaccgcgcccggctataataattattataaaattcaaatcttaaggccgcacatggtggctcacgcctgtaatcccagcactttgggaagcggaggtgggccgctcacctgagatcaggagttcgagtccagcctggccaacatggtgaaaccccgtctctaataaacacaaaaattagccaagcatggtgccggacgcctgtagtccctgttactggggaggctgaggcaggagaatcgcttgaatctgggaggcggaggttgcggtgagccgagatcgcgccacggcactccagcctcgacaacagagcaaaactccgtcccaataaataaataaataaataaaataaaaatcttaagggtctagtcacaacagttcaaaagtctccaaagggagactctcaccttcaagcttgtaagtaatactaaagttctagatttgctggaagttatctccttcaatggattacagcacatgatctagcaataataacgtaccttgtcaccacatcgaatgattttgaacacttcccatcaatcgactaccgactaacaaaaagaaggacttgattcccggcaattttttctcttctgaactgagcattcccgaaatccagcttgctgaacgcgcagatgcagggtgagaggcaccccaggaaaaatggaagggaaagtggtacaagttaaaacagtcttcgtggccgcagagacgatcgctacctcggccatggcagatctgggggtccggggcgggggttcttccctgatacccaccgggcacgcgagttcacgccagcgacagtggaaagccctcccctcgcagcgcgctccgccactagccgcaccccgccgagctctgacctccgaagagggtccctgtggcgatcccgccccttcgtctgatgtttgtgcctttgattggctcttaggtggatccctcagcgtggcttgcccaatggagcaatgccggctggtggcctggccgctccgccccttccctacccctcgcggagggcccgccccctgccccgcgccggctagcggaggagagtaaatacaacaggagcgcaaaatggcggaaccgccgagccccgtgcactgtgtcgctgccgcggcccccaccgccaccgtctcggagaaagaaccgtttggcaagctgcaactctcctcccgggaccctccgggttctctgtccgccaagaaggtccggactgaggagaagaaggcaccgcggagagtgaacggagaagggggcagcggcgggaacagcaggcagctgcagccgccggcagcaccttcgcctcagagctatggcagccccgcgtcttggagctttgcccctctgtctgctgctccctccccgtcctcttctcggagcagtttctctttctccgctggcacggccgttccctcctcagcctccgcttccttgtctcagccggtgccgcgcaaactgctggtccctcctacgctgctgcacgctcagcctcaccatctcctcctgcccgccgccgccgccgctgcctcggctaacgccaagtcgcgcagacctaaggagaagcgggagaaggagaggaggaggcacggtctcggtggggcccgagaggccggcggggcctcccgggaggagaacggggaggtgaagccgctgccccgaggtgggtgccgtgcggggagggggaggggagggcgccgtgggtccccgccgccccctggcgcccacggggcccgggaagggggagcgcggcggccgcgtgcgccggcctggaggggctgggaggcgtccggttttcagcagaggattttgcagttcccaaggggacaggaaatggagcctgtaatttcggttgcagagagggggatggccgacactcttattttctgtatcgtttcttcctcccagttagtgcgctgcaggatttgtgaaaatccatcttgaggactctcctaggtttgtttggctagggagagagatggagggaacgggatgggggaagggtttggttttgtaaaagatgcttgattgattgttagaccacttagacgtggtcgcgggaattcgtatttgtgacacagcgttcaaccccggataatcctgtcaaaaaaggggtgtggagagagcactggcgtcagctggaagctaccagaggcctgagcttttcatccctattagggaaatgaggtagcgtgcagggcccgaagtgcgctgtttcgtaaggtaccctccctgcaccctactctccgctgcgtattcttaagtgttttgggtggtcctgtttgaaataccacccttctgaaagaattttcagccatattctttttttccctgcagcaaatgataaaaccaggagctttgacgatttttcgccagatcaagcggctgcagaatgtttgagcattagaaaaaggcgaattcttaagggttcttgtcagacagggtcagttttgtttttaaatgtaggctagtcgtataatttttcaggtgtttccaccacttcagctacggatacacaatgatctgacaatagtgcaacatacggactagttgaaaatcaaatctttatgtgatcgcaagcttaaagcgcataatctttattataaatgtgcactgctacacagtgttgtcaaataactctttttgttttttagaaaaagaaatgtcaagcagtttcagcattgctgatctaacagtagctcagatcatgaaaaattctgtttggattataatggtttgttttcacaacttaaaacatgctgcatgtgcatgtagcaatagtgtcacttcttccttgatattttttgcctgtagcaaagctttaacatctaagcatagccatcagggactctggtgcaatgtaaatatctttcagcttctgggagtgttgtttctaggaaagtggttttgaggatgggattttggtacttttagtcaggaattccaggtgattagtattttaaagctattttgttttaacaatttatatgtaaaatttaggagataagtgcctggaagtttgtccatatgcagcttggtatcatcactagtgtttgtggtgtgtaaactgcacatttgctgtaagttctctgaaagaggaagtgaatatgagtattacatagttggagtaatggaatatttgagaagaaataagtaagcattctttaacaattctaacttaaaatgtggagtacacaaatggtccttaaagtgaaatggctgttaaagaggaatttttatagtcttttcaattacatttagaatccttcttcttttgagggttaacactaatattattaatcctgaatataaacagtgataggttttacattaagatgtgggaatgatcttttcccatgacctatgtgggttttttggagtagtgacaagatattaacactactgtaagattttcattttttcagacacaaatgctatcttgttgaggaaaaactatcagagaaaaagattcctttccagtgtcttggtggtaaatttaatggtgaaaatttttccctcgtaacttggggaatacttatatctttctaaagtttggatttaactgaattgatgttctgttttaacgaattaagaagattcttaaatagcggtattaacaagtggtatagcaagaatacatatatgcctttattatagatataattgcaaatatgaaagtcctgatttgcaatacaatgatcatttctctgtgctttttgtaaaaatcttagtgaatgggtgaccaagtgtttgtttaggtatatacctctttttagtgttgccctaagttggctgtgcatggttcagtaacccctcaattatccacagctggctgattgaacagtctgagtcagaaccagacattagctataaagacacctaaacaaggaagagattctccctcaacaaaacaaaactgaaccacacacactcgaaagacctagcctgcacccc

SEQ ID NO: 1882631 - DNA, 4001 bp, Homo sapiens
gcttggcccacaggtgacctccctgggccactggctccttgctgaggggttgtccttctcaaaggttctctcgcaggggcctcagggtgttctgagacccctgcttcatccttagaggtgggtccctggagctccggagtccagggagtggtaggggaagaggggcataggaagtttgtcatgttgctgaaagccatgccaggggacacttcgctcttactcctgctggtggaagtgaaagactctgttgatctagctgtggccgggggccaggaggtgcgtccagcagaggcagggagggggactgtccagtcttgacaagcaggtcttgttttggcatgaccccctgagttcatatgtcctccccaagtgctcctgctcctccccctggactttgggggcaatgggggtggttcggtgggagggtctatgatgggtagtgggggtagaggcctgtagatccttgagctaccaggagcagaaatgggaggaaggtggggctgcggcaaatcaggggtagggggtagcggcttgttgtatctccacctgggggtggcctgagcatggtgggagctgtctggggtagatggcagaggtcggtgctgcctggccacagcggggtcagaggcttggggaagtgggcctttatggggggcatgcagccctgaacctagggccaatggaggagggtggctatgctgcttcagcgtgggaaccactacacgagcatggccatctgtctccaccacggagggatgggtgtccctcctctgtgggggaggagggggcagaggttcgtggatcctcacatcctccatggagacaaaggatggggaagaaccgtaggcgggagactctgtggcaaaggctggattatgtggggagacccagggctggatgctgggaggactgctgggtctctctagatttgagatggattcttgagagtcctgcttcagcgtggataaggcagtaggggatgctgaaacggtgctgtagtccctaccactccttctgtcccttcttggggtcacagagctgtagatggcaggtttggggggcctctggggcagctctgagtgggagtaggaaagcaacattcccaccaggtctggagtctgctctgtcctgtgagaaccagggaaggagtcactccgtaagtgctggacggtgcctgtggagttggctgggggcctcggagggctggtcccggtggaggggaagccatagagggcagccgggcacatctcagaagtcccacagggagatgggtcatccattgagagaggggcactggcagtttctggagcacgtgcagcacaagaggtttccctcctgggaaaggcaactgggggcctggcagataccgaggcaggtgtgatggggtaggcttcagcaggactgggaggagctgaatctggtgtccttggaggagtcacagatgcactggcaaagaccacctcagtcccttggctggacactgttcccttcctcagcctggatccctcttgctggctgttttgatctatttccttgtcaggtgactcctcagtcaaaaaggagcccagtagagaaatgggctggtgagagcacctgatgggctctagcgagggagacagagctgcgggggacagttcctcagccctggactctgtctgagtcccgggaatctgagtcacgagatatgaggcacctggaaacaggtcacagtgaggagagtcctcaggggctatcagagcgggcattgaaggcccatgatgctcattctcctcttccctgctcctcgctcttcccactgcccccagcctgcccccatcccaactctctggctctttcgcctcctgcccgctgactggcacccctttctcctttataccatgatcttcttgctttccagttacttcctctgattttcccaaaaaggtttgactcttttcgtcctgagagtccgccctgttctcttctggcacctgcagctccctcttcctctcttctccctgttctggacctccctgaccctgagccttcctctccatatcctcctgctcccactcaccgtcattcagaccctctggctccccagtgagccccattctttctccttgtctcccaagcatcacatcttgtacctgttcctgtttttgcttctgttctcctttttcatcattaacctgctctatcatctgttcctcccctaatagcccatcggcacaaacatcctccctcagagttccttccccccgaaatcctgcttcctgctgtccctgctcctccagaacttggacctcctggggatgcaagagcccttgactttcctgcagctcctcagatggcagctcttccccctgcctgatagtcccactttcagcgccttcattctggttggtctctgcaggatgctcttcgcagggagaataatatctggtctgaccagagttatctgaagaggtttcctcttcttcttctgcctgtccagatcccaatgtcaaagaagtaagtcctggccaaaattccacctcctcttcttcgcctcccaggtcactggaaaatggggccatgtctagatgctcactctgaatggggcaggcccagagctctgggggagctagagtccttgcttgtcggcctgctaggctctggggtactgcctcccagtgttccggagtgtcacaggcctcagccacaaggctttcctgattgggctccacatctgcagaaccttccttgggaaaagagggcatcgtctcaatcgcatagtcacacacatcccttaactcactctgctgagttgctgagagtctgtgttcctctctccacttataggatgggtcctcatcttcttgagcttcaagccccaaggcagagacctggctgctcctcatgggagccttagggataatgctgaattcctctatggcagagatgggaggagaggctccacgctgggcctcctcagcctccatcagggctgaatcctaaggaggaatcaaagacaaatgtttctaacaactctgcttttacctatcagaggaagagaccataaaaaagaagagtgatgcatttatttggttccatttagggtcattctttgagacaacaggttctcaacaaaataagcaatagcctctaaaaaacttgtcattgatgtatttatttcataaatattttcctagcgaccctgttaagtgtggggcattcagtagtgaatgagataaagatcttgtcgtcatggagactgtggtcttgtgagggaaacaggtcataatgaacaattaaattatagcagaggaccattgtcagagagtgcccagaagctcccagttgtcagttctctctagactccattatgtcatcttctgtctctccctgtctactcttcggacactaggagtgactcatcctcatataacccccagacacagcaagggacacacctcagatctattaggccagagaagcagtgtcaggagagggtcttcctcttaagctgtggacatcagttaaaataggccaggctatgatagccaatgtgtgaggtgctatggtttcatcttctttacagagggtttggagtttactcatctttctgttttccatagtgtctactacagcattgtaactaacagttttgtttccaattctagaggcagctgttgtaaagtgggatgataacagccttattggattagtgttgaactagacacattaccaccttgaaggaagaccacagaagggtgctttctgcatcaccttactctccccttggcctcagtatccatatgaactcttctcattaattcttttgaccttcctgtcttttgatttcgaccttcctgcctttcttctcacttccagcagaacacctcatctcctattttgcaaagaaaatagaaactgatggaactgggtttctctcacctcaatttcttgtgatccaaagcaacctgtatttccactctttctatcttccgccctcagtcaggaaaagacgtatccctcct

SEQ ID NO: 1882632 - DNA, 4001 bp, Homo sapiens; identical to SEQ ID NO: 586162

SEQ ID NO: 1882633 - DNA, 4001 bp, Homo sapiens; identical to SEQ ID NO: 586168

SEQ ID NO: 1882634 - DNA, 4001 bp, Homo sapiens; identical to SEQ ID NO: 586173

SEQ ID NO: 1882635 - DNA, 4001 bp, Homo sapiens
aaggaaaagagtaagagctgcaggctgctaatatgagtggctgctcagactcagcaatgtttttggttctggccaaagccaagacaaaggagcagaggcaaagaaggaaatacatttcactttacagctgtcattttctacagaggatttttttttttccagaacaaaattcaaaaagtccgtcttttttgagctatagaactttcgtggtgattttttttttttttttttttttgagacggagtctcactctgtcccccaggctggagtgcaggggcacaatctcggctcactgcaagtgcaagctctgcctcccgggttcacgccattctcctttcagcctccaaagtagctaggactacaggtgcccgccaccatgcccagctaatttttttatatttttagtagagacggggtttcaccgtgttagccaggatggtctcgatctcctgacctcgtgatccgcccgcctctgcctcccatagtgctgggattacaggtgtgagccactgcgctcagccctcgtggtgattttttgaaggcctgtatggacatactcttaactctatctcctggatgccaagtgcacccttatcctaggccagtgttctcaacaatgtacacactctggatgagaaaaataaccattgtttacaatccagctaaaatctcacctcctccagggagtcttcctggatttctccaccctctgaattctcataatgggcatttggctactttgatcacagggctcttagaactgcgctgtccagcattatgattttaccagaatatatcactcctcaactactttagaaacccctcgaaggctaggatggtattttatacctaacagtttggtgtcatcccacgcccacctccaacttacatgaatgttggaaggatggatagggaggtttcaactagagaacggagaagggcggatgtaactggttcttgatttcagaaaacagccaggagcacacatggctgacggggtcagtgcaaggacaggcacatttcccttctgcatcacgtggggactgcgcctccctatgtcatgaagccagggaatatgtgtggccggccgcttggggtagcacttgttgctagagataccgcctggaggccactgatctgtaaaagggatctctacagaagatagggatttttgatcgccagagaagaagggatatgtgagatccaaacgccgaaggaggaaagcaggctccgtggtctcttccagccctgatggaagaaactaccgagccttattatactaggtgctttccacatgcctattcatttaatcctccagcaaccttgtaagaagggccatcccattttatatttaaacaaaccttaactactgacgcaaggagtcaaggatctaatcccaaagcctctgcctggttcgctgcagatggatgtccgcgaggacgccagccctccgcctcccgccgggtccctgaacgccggcccggccggtccaacctcattccgcttcccgccatcgaaacgcgaagcccccgccttcccccaaacgtctcagcgccgctggggcctttctggctgcgccgcctccgaccccaggccccggtccgcgcccgccgctcgctagtcctgggagtgaggagaacgcgtgctgaggacccggccagagggacagcggggaccgccctcccgctgcgtctctgaaagcgaggccgttcctcccgcgtccgacccccgcggggccgtcaggttcggggcggcccaggctgcgggtccgcagggcgcttcgggccgagccggcgcggcgcgtgaagggcaggggacgccccgaaagaccgctggggtgggaccccaagctccaggggtctttggaaataagaatgcggcgtgacgttggctgtgcgggcgcggggctgacgcggaccctataacccatcgccgaaaccgggcggccgcgcccctattcctcggcatttctctctgtccgcggccctgctcagccaatcagcgagtgggctcctaggcaggtcctgagtgacagcgcggcgggctggatcaggagatgcgcgtgcgcggcccggcccggctgatcgcttcgggtgctcgactcctgttgcgcatgctcagcgcgctgcccggctggggacccgcgcacctgcagcgcccgctgctcggccctgcatcctgcctgggcatcctgcgcccggccatgacggcgcactcattcgccctcccggtcatcatcttcaccacgttctggggcctcgtcggcatcgccgggccctggttcgtgccgaagggacccaaccgcgggtaaggaaagcgcgcaggccctgcagacctctccaccccggccccctggcccggctcgcccctccgccccggggcggcggcttcctgctctgcagcgagcgtccgcaggagggacgccaggaccccggacgccacctctgaggtctctctgcacctgggtctctgacagccgggaacaggcaggaggtggggcgagagggcatatccagaaggtaaagaggagagtgacattggagatgtctgtcacccctcctgcagccagtaaagggcacaagtgggcactgacgcagtttctccactccttgctagctgtgtgacctagagccaatatcaagtctcagtttcttcatgggtaaaatggagataatgtcgactcctgccttaaaaggctgctgtgaggatgacctgcggtaacgcatttaaaacacctaccagtgcgtgacactttgtaggtatgggataagtttagctggcgttatttttcgaaggtcctctagcagattgctgcgccattcaccagtttctgcttcatattatcttcagttacaaagcacccttcccttgactgcatgttcccaggggctggagtttgtccagttcaccattgtctactcagtgcccagccaggactggcacaacctgcttagtaatgttgaaaaagggatcgcgtgctcctgtgtccagcaccagcttgcagtgctttagatcaaagatcaagggcctcgtttggattagagttagctttgcccaaaggccgtttggacatgtgagtgctgcctttgttcttaaagacaggcagggtttgggatcccacagcttcactttgtaaaccattttcgtgtcttgcgtctcctgctattcttggtgagttcttgcttcagtttgactgaaatttcttttgctgcacttgaagcatctgtctctggtcttctctgagtacacgcaaagtggctagtccctgttctctttgtaacaactcactgggcctcagaactggctcacagtctgcctgcttcttgccctgtcttctagcctattgttttccttccccttgctccatgaattttgaattctacagaccactccctgttgggttgccacaaatgcagctctgtgcagtgcctttccacaacacgtctgcattaagatggagcaatattgggtggtagagaagggaaatgaagggaaggattcttaaggcaacttggatgtggtcaaggttggcctctctgtgaggtgacactttcagtttttattttctgccttgctattcttaccctgagtagaactcagcctcctgtgtccaggaggcatcaggaaggccaatggaaaagagctcacaccaggagctcttcttgctctggtcctggccaggccttgtgaggtgctggctgcatttgttctgacccgtgtcctcttctgctgcagagtgatcatcaccatgctggtcgccaccgccgtctgctgttacctcttgtaagtactactctccccagctcaaagtcagccagttcctttgtcctccctcctttcctcctcaccctagcctgctcttccttctgtcctggtagtaaatgcctcttgaaaggctgaacctataaaacaacaggagtggaggtggtgtggaatgggaaagagagcagtgggccagaagtcatgaaccctgggctctggatctggctctgcccccagag

SEQ ID NO: 1882636 - DNA, 4001 bp, Homo sapiens
atccctttcgttgactgtggaggccacaggatgaaacagaagagtcccaagatgcaaacagcctggatccctgagtcaccctgtggaggagaggaaccttgcccaatctgcattgaacttgacatgagaaataaacatttctagtctaaccggacaaatacatatagttagaaagtgtaggaaggtgaatttactagaaaactcaagaagtgacccagaatggatcagcatagggtaaggctaggatacctctcagaattcctggcattgtatcttgcagtttggtacaagatggaagctgagagagtgggacatttccacaattagttccatagttaatttagaatataatttacatgagtgttagtaatgttggaagtcatatggcagatttctaatttaagtactgaagtcattcttgctcatgagtttctgaatgtgattagcctttaaatcagaccttgagtaaaacagattaccctctacagtgtggatgggcctcatccaatcagtggaaggcatcaagagaaaaggctgaggtcccccagagaagaaagaattctgcctctagactacccttggactcaggaccgcaacaccaactctttgcttggtctctagcctgctggcttgctttgctggtttaggacttttagccctcagaattgtgtgagccacaagaaatattaaataaaactcctccctttctctgttttgtatatacatacacgtatatatgtatattatacatatacacatatatttagtgtacatatgaatatacaatgtatattcatatatacatacgtgagtgtttatacaatgtatattagttttgtttctctggagaaccccgaataattcatatttgggtgcagaatgggattaatattataaatgtgattattataaaactaacgtgaaacacctattttgacaatttgtaaatgtcatgaattttattttattttatttatttatttatttttttgagacagagtctcgctctgttgcccaggctggagtgcagtggcgcgatctctgctcactgcaagctccatctctcgggttcacaccattctcctgcctcagcatcccgagtagctgagactacaggcccccgccattacgcccggctaattttttgtatatttagtagagacggggtttcaccgtgttagccaggatggtctcgatctcctgacctcgtgatccacccacctcggcctcccaaagtgctgggattacaggcgtgagccaccgcgcccggcatgaattttaaactcacacaactgagaagccattcacttccatgtctttatcctgcacattctcatgccacaaacagcctccttcccctctcctataaatgaatcttgatctccccaagctcccactgtcttctcttccggccactcgctttccagacccactgcagtggtgtctgagtgtggggtgagggcacgggtttccttctagcaccatccctccagccaacctgccttcccactttccccttgggggctgttctctcttttcctcagcgtcaggcaggtgtacccagccatcggaaggagggaaggaacaggagcagaagcagctccaggcctgtggttcctgctccgtcctggctctccaccccaagcaggtcgcttggtctttggagtctttgttttcactgtaaactaaggggttttagattcagattcctgaaggtcttattttgggtgagggcagaggctccctgaatgctcctggaagtgtgtgagctgagggagttgacagccttggacacctgttcctgccatatgccagggaatcccagctgcatccagcccttctcccagccacatgtcctgttcctcacctccttccagtcctctccagcacccatcccttgctttccccactcaccatctcgggtctcctggaggacagcaggacccagaagcagcagcagagacagcaggacagacaccattcttaccattgtgtctgcttggaaggttctgggcaggaggcacaggtattatcctgggtcctggggccatgcccaggggaggtgaatctacaggccaatgggagtaccaggccgggctcctcccctgacagtaagaaagaagtatgcacaagccaggctgggcagaggttgtgatcagtgagtctacacacaggatatgcaaatttagagctgagacagttgatctctggactgaggatttgtgtgtgcctggggcggaaggatgccagtgtgtgggaggtgtgtgtgatgggtggcaggtgcctgggatgtgtcgcccttccagtctattatgacaccctctggggtcacttgggtgttgtcagaccacacttcatctctgccttctggaaaaactctcaacatgtccaagacacggacatgggtagacccccgctggggtgggaccctcactctcccacatccgatcctgccagagctgtctggaggacattcccattcccatctctccctctttcctttaggtgcctgtggaatcccagccttccatgatggaagcagaaatagccgcatcctccttttgcagcctccctggcaatagaacgagcaggtgtgcacagggtttatgctcagcaagtcgaagctactgccttggatatcaggtcaagtgttagggaaacaaagaggagggcacagtggacaatgttttctggtggtcttggcaggggttgcaactgccagctcccggggcagtggggctgcagtagctgcggggggcgtcttgagcttcagtcccccgggatgttgtagatcccgtgctgtggcctctgctgccccctgctggcagcttctgtatatttactgggccggttgcaggtgtgattttgactgttgggctcctctggaattctgagcctgggttctccatcctttctgtggattctgagagctaaccaataaatacgtttattttctgcttaaggtcagaactgcattacgtttccaataacaaatactcctggcggatacagagattggtacaaggattgtttccaggcagtatttactcagggaaatggagggctgggaagctgaggttggttactgggccagattggggctgcgcagtgaaaacacaagagtcttgggggattctggcaggcctggtgtgcagtgataacttcaacagttggctgaggtatctgttatggtagattggtgtagggaccagccccacagggtcggagggtttttctccccgtgtgcagagacgagagagtgtagaaataaagacacaagacaaagagataaaagaaaagacagctgggccccggggaccactaccaccaagacgtggagaccggtagtggccccgaatgtctggctgcgctgttatttattggatacaaagcaaaaggggcagggtaaagagtgtgagtcatctccaatgataggtaaggtcacgtgggtcatgtgtccactggacagggggcccttccctgcctggcagccaaggcagagagaaagaggaagagagagagacagcttatgccattatttctgcttatcagagacttagtactttcactaatttgctattgttatctaaaaggcagagccaggtgtacaggatggaacatgaaggcggactaggagcgtgaccactgaagcacagcatcacagggagacggttaggcctctggataactgcgggcgggcctgactgatgtcaggccctccacaagaggtggaggagtagagtcttctctaaactcccccaaggaaagggagactccctttcccggtcagctaagtagcgggtgttttccttgacactgaggctaccgctagaccaccgtccgctcggcaaggggcgtcttcccagacactggcgttactgctagaccaaggagcccttctggtggccctgtctgggcataacagaaggctcgcactcttgtcttctggtcacttctcactatgtcccctcagctcctatctctgtatggcctggtttttc

SEQ ID NO: 1882637 - DNA, 4001 bp, Homo sapiens; identical to SEQ ID NO: 586184

SEQ ID NO: 1882638 - DNA, 4001 bp, Homo sapiens
ggtgtacacttataatcagctactcgggaggctgaggcagaattgcttgaacccgggaagcagaggttgccgtgagccaagatcgcaccattgcactccaacgtgggtgacagagcaagactctgtctcaaaaaaaaagaaatcaaatataggaaatgtcttatgagtccatctaatacaactgtggaaaggtctatgaaggagacttgatctagattgggaatctcaagtggtaaacctaaggaagcaacttttgagctgagctaggagttaactcggcaagagggaggagaggagagaggaagaagaatgccaggcggcaggaagagcagagtgacttcattggtaagacagcgggcatcctgggaaagagccagccaagtgaggcaggaaggagggccttcttcagtatttatcctaaaagcaagaagggaaccactgaagcattactaggggtgctaggataagatgcacattttatatatttttttacagatggggtctcactgtgttgcccaggctggagtgccatggcatgatcatagttcactgcagcctcaactcctgggctccagcgatcctcccaccacagccttccaaataaggctgtgcactttaaaaaggtcactccgctactcggaagagagaaaaataaaatcactcagtgcaaatgaacagactggggaatgagcaagagcagaagcagagagtttacagggaggctggtacagagttccaggtgacaggggatggcccttcagcctagcctgctaggggcgggggggtcaaaaatggggagaagagaaaggtgtacctgttcttaggtttcaccaaaacctcggaggattaaaggtggacgaggaaaaccatgagtatgttaaactaatatttatactgaaacccaactatatatgaagccctcagacataaaaaagagaaggaacttccctcttgtggggaaatggacagataaacacacaaataaagtccaacgtaccaacgaccttaaaggaggtaaagggatgggaggagttaaggaaagcttcctggcgggaggtaacatctacttgaacttttattttctgtagagacggggtctcactatgttgcccaggctggtctcaaactcctggcctcaagcgatccgcccacctcagcctcccaaagtgctgggattacatgcctgagccacctcacctagccagacctgggtttttaaattattagtagtaattggctatacaaaagagctgacgaagttggctgtgaaagtttaatgtgatgactccgatacacaccgatatagtatgtatcggagttccggatactaaacaggggctcaatcggcatcttccatgaacattttagacacggggtctctctccgtagcccaggctggagtgccgtggcacgatcatagctcactgcagcctccaactcctgggtcccagcaatcctcccaccacagcctcccaagtaaggatgtgcactttaaaaagaccactctgctacttggaagtgagaaaaataaaatcacacagtgcaaatgatgaacggactggggaatgaacaagagcagaagcagggaaattagagggaggctggtacatagtttgcaaaggactctcctgacagccgccggggcagcaagagaaaatgcctaccaagctcgcggcgcaggggccggttactgggggaaagggaggggtatccctctggatgacaccaggcttgctcccttgacagatggactaacccagaaactcacccaacttcaacgcctgaatacgcagagcgctcagcctggcgggctgacaccactccagggctactcgctattatcaagaggaagcctggaaacgcaggcggggccactgcccaggaagaggggagggcgggccccgggctgggccgggcgcgggcaccgacgccaggcagctccagtccgggccggaagccggaatcccctcccaggcggcgcgcggcagcagccgcagcaggtgggcgggcccgcgagccgggaggaccgctgattggccgcggccggcgcgccctctgacctcacgccgacgccagcggcgccctcctcccgccttctcccgcacccccctcccccagcgccggccggtcggctcccacctgacccgccagtcccacgctcctcagggcctggatccgcgacccccgccagccccctaagctccggcccctcaccatttccgcactttctcgatggccgccatcaccttcttgatgtcgtccttggcccggctgcgggtctccgcccggaccgaccggcccgacatggcggcggcgggagcggcgggggccggggcactgctcccaagacaccggggatcgcgcgcctcacgcgccgccgcccgcccgccgccgccgcagcgtcacagcggccgtcgccccctccgtgcgcgcgtgcgcgagaaagcgcgcgcacccgcccgccccttggggctcacggcctcagcgcgcctgcgcgccccgcccggggcgtccctcctgagtgccccgggagtcccctgagccccctacccgggccggggtgcgaggcgggttgggcgcacgtgcttgtggtcagggcgaggtgcgaggtgccgccggtgggcaacctggttctcttccctgagagtttggaggtcggctccctgctctggccagcgtgttaggaacctgaccctgtggaaccgcactcctgcgccatctctgtcctcccgcctctcctgcccagcacctttgccctctggctcctacgctgtgctccaaccacgcctttcttaaggatggcttccggtctttgcacacacctgttcctcacctggaatcccctcctctctttaccagatgaactgctttcccagcattcagaccacattcttgccttttctcgagtatctagtagtcccaagtatttgggaggctgaagcgggaggatcacttgaccccaggaatttgaggctgccgtcagctatgatatgatcgcacctgtgaatagccactgcactccagcctgggcaacatatggagaccccatgtctaaacgagaccccgtctctaaagtaaataaataaaaagatgtctattttgtgcaagactctgtacctaaagctgaagacatacgtggttttggtttcaaagagcttccagtttgtttatttattgagacggagtctcgctctgtgactcaggctggagtgcagtggtgtgatctccgctcactgcaacctccgcctcccgggttcaagcggttcttctgcctcagcctcctgagtagctgggattacaggcgggtgccaccacgcccagctaatttttgtaattttagtagagacggggttttatcatgttggtcaggctggtctggaactcctgacctcgtgatctgcccgccttggcctctcaaagtgctgggattacaggcgtgagccaccacgcctggcctttttttttttgagacggagtctcgctcttttgcccaggctggagtacagtggtgtgatctcggctcactacaatctccgcctcccgggttcaagcaattttctgtctcagccttccgagtagctgggattatagtcgtccgccatcacacccagctaatttttttatttttagtggagatggggtttcaccatgttggtcaggctggtcttgaactcctgacctcgtgatccacctgcctcggcctcccaaagtactgggattacaggcgtgagccaccgcacccggcccagtttatttattcatgtggagaggggatctcactatgttgtccaggctggtcttgaactcctggtctcaagggatcctcacaaagtgctgggattacaggcatgagccactgtgactggctgagcttccagtttagtagaacattcagacgaaaaaaaaatatttattttttacttttacttattttttggtacagggccttgctcaagtgatccttctgcctcagcctcctgtgtagctgagaccacaggcga

SEQ ID NO: 1882639 - DNA, 4001 bp, Homo sapiens
gtggttagggacctgatggttgatcctttaatccttttttttttttttttttttttttttagttttgtataaattatgtttcatatctttttatttcagaaataatcattgctggaaatgctgttaaattttttggaactcttctttttttttttttttttttttttattgatcattcttgggtgtttcttgcagaaggggatttggcagggtcataggacaatagtggagggaaggtcagcagataaacaagtgaacaaaggtctctggttttcctaggcagaggaccctgtggccttccgcagtgtttgtgtccctgggtacttaagattagggagtggtgatgactcttaacgagcatgctgccttcaagcatctgtttaacaaagcacatcttgcaccgcccttaatccatttaaccctgagtggacacagcacatgtttcagagagcatggggttgggggtaaggtcatagatcaacaggatcccaaggcagaagaatttttcttagtacagaacaaaatgaaaagtctcccatgtctacttctatccacacagacccggcaaccatccgatttctcaattttttccccacccttcccgcctttctattccacaaagccgccattgtcatcatggcccatccccaatgagccgctgggcacacctcccagacggggtcgtggccgggcagaggggctcctcacttcccagtaggggcggccgggcagaagcgcccctcacctcccggacggggcggctggccgggcggggggctgacccccgccacctccctcccggacggggcggctggccgggcagaggggctcctcacttcccagtaggggcggccgggcagaggcgcccctcacctcccggacggggcggctggccgggcggggggctgacccccccacctccctcccggacggggcggctggccgggcagaggggctcctcacttcccagtaggggcggccgggcagaggcgcccctcacctcccggacggggcggctggccgggcggggggctgacccccccacctccctcccggacggggcggctggccgggcagaggggctcctcacttcccagtaggggcggccgggcagaggcgcccctcacctcccggacggggcggctggccgggcggggggctgatccccccacctccctcccggacggggcggctggccgggcggggggctgaccccccacctccctcccggacggggcggctggccgggcagaggggctcctcacttcccagtaggggcggccgggcagaggcgcccctcacctcccggacggggtggctggccgggcggggggctgatccccccacctccctcccggacggggcggctggccgggcggggggctgaccccccacctccctcccggacgaggcggctggccgggcagaggggctcctcacttcccagtaggggcagccgggcagaggcgcccctcacctcccggacggggcggctggccaggcggggggctgatccccccacctccctcccggacggggcggctggccgggcggggggctgaccccccacctccctcccggacggggcggctggccgggcagaggagtcctcacttcccagtaggggcggccgggtagaggcgcccctcacctcccggacggggcggctggccaggcggggggctgatccccccacctccctcccggacggggcggctggccgggcagggggctgacccccctcccccctcccggactgggtggctggccgggcggggggctgacccccccacctccctcctggacggggcgactggccgggcagaggggctcctcacttcccagtaggggcggccgggcagaggagcccctcacctcccggacggggcggctggccgggcggggggctgaccccccccacctcccccccggacggggtggctgccgggcggagacgctcctcacttcccagacggggtggctgctggacggaggggctcctcacttctcagacggggtggttgccaggcagaggtgctccccacctctcagacgatgggcggccaggcagagacgctcctcactttccagacggggtggcggccgggcagaggctgcaatctcggctctttgggaggccaaggcaggcggctgggaggtgtaggttgtagtgagccgagatcacgccgctgcactccagcctgggcaccattgagcactgagtgaacgagactccgtctgcaatcccagcacctcggaaggccgaggctggcggatcactcgcggttaggagctggagaccagcccggccaacacagcgaaaccccgtctccaccaaaaaaaaacgaaaaccagtcaggcgtggcggcgcgtgcctgcaatcacaggcactcggcaggctgaggcaggagaatcaggcagggaggttgcagtgagccgagatcgcagcagtacagtccagcttcggctcggcatcagagggagaccgtggaaggagaccgtggggagaggtagaggtagaggtagaggtagaggttagaggttagaggttagaggttagaggtagaggtagaggtagaggtagaggtagaggtagaggtagaggtagacgtagaggtatcctttaatctttctaggacaggtacagtggctcatgcctgtaatcccagcactttgggaggccgaggtgggaggatcactggaggcaggcggatcactggagccaaggagttcaagaccaaccagggcaacatagtgagaccttgtctctacaagaagtttaaaaaattagccaagcatggcggcgcatgcctgtagtcccagctacttgggaggatgaagctagaggattgcttgagcccagaaggcagaggctgcagtgagcagtgatcacaccactgcactccagcctgggcgacagagcaagctcctatctcaaaaaaaaaaaaaaaaacagataatctttctaggacttgatttcccaggctccataatggcaatctgcgcaggcagcttctggctctgagtcttcctgtttctgtggtgccactgccagcacagggaggtcattctgtatcatgtcacttgcttggtgttttacacccatggatgatgaaacagcaactgcagcctggagtgctgggaggcagagagagtctcgcttcccaggccatctggcttactgtgaaggccagaagcagcacagcctctcttggtcaccagggatcaggactcaggtggagagggtggggcaggggctggcagtggagacaggtccacactgggaaccagctgtgccaggcagtgtggccctgaagcccctaaggtgtgtcaagaggggtctttcaggaaatggttagagagtgcaggtgttgtgtttctctctgacatgtaaacatatgtctttctagacaggcaggtctccctatacctgccttacgtgggaagcacgtccgcaggagaggtgccacccagtgcctccagcactgatcaggcctttctcaggtgttgggcagggagaggcagagcccaagagaagcctcagcagaacactaacagtggaaaggaggcagtgaggtggaagcagcttctttggtacatgcagaaagttctagaaaggccttttggcttagaatcctagctctattcacgtgaagcagcacttcggcatgaggtggtgcttgagggccccttgtctgagtaaaacgtggatgttgtagctggttttgggggctgtgggactcccccatctgcacaccccctactcagccgatgtggtaagcatttagccacagcaagtgcttacttagtatttgttggttcctgatacacagaaatctctgtgatccaagcagtgtttctcccataggactctaccctgccaaccctcagctcggctcagctcagcagctcgctaactgtgaaactcggacggacatcctgtgatcactccaacgctttaaaattcatcaaagcgcagagcgctgcctggccgcagccca

SEQ ID NO: 1882640 - DNA, 4001 bp, Homo sapiens; identical to SEQ ID NO: 586195

SEQ ID NO: 1882641 - DNA, 4001 bp, Homo sapiens
cagaccccatctggctgaagccagtaagagaaaagactaacaggagggccagcctcaggactcaaatacgtcaccaggacatgggttgcgtcccagtctcagctctgccagttcctgtagaaccctccttccaaggttcacagggtggctaccatagcttcaggccctcacctcatgataagacagcaatacaactgccatttcatgtctgttgctgtttctacattcagttagaattaaataaattttccagtagcacccacaaaaatactgagtccacctggttggcctacctagatatatcgccagccctgatcaagtcactggtcacgggcctggattttctggttcgcttaggctaatcatacgtcccatcccaggactgaagaagtaccagggctgttgctggagagtggctaatgtcccctttacaaataaggagctcatggtttaggaagatgagcttgccaaaaatcacacacttgtaaaataagtcaaaatttgaacttaagtctacttatctgagcccaaagtcttacaaccatttatggctgttatcctaacacctacgtcgcggaacggaagagtcctaagactgcaaagacccttccttttcttctagatccagtctaagttggttggtaatttctttagaccctgctttcagggaagtttaaaaaaaattacttgcatttgtatattttccttgtattttcggccaaatttcttctaattaaagtacaacataagttgaaccaacacaataattgtcatattaagaaaagataaaacaaactttactcatttctgcttctgggcatggagtgtgagggaccagacttaagttctcaaacaactacaaaatcagaccaaaaaatacaatggtttccaggcaccggacgacaggcagtgcagggctgtgatccttaagagaagggaagcagcgagccagagtatccaggccacaacccaaatggaggccaagagaggaacagcagaggatacagagggagggttccaggggccaagacgcaatccgaggggaagcccttccggggagagctggagtcctggggtggccttctcgagtcttcccgagcaggtctgtgcagcgaggaaacatccgaggctggagtgagccacgcggaggaggaagaacagcccgagctcacaggggcggggaagagttctagctcgcgacagcccctgggaggaaccctgcactatttgtggcgtcgagtaaagcaccggaaggctctgctcaggagcgtgaacgacaccgcccgctgcaagcctggaaaggaacgcgttgcctcaattcactccgatgtgtcacacacgcggctcagtcacctagggagcaggaaaaggccagcgggccacgcagggctcacccgggcctgcatccaaacgcaaacggccaggcccacgaagcaggaaacacaacccgcaacgagaagcaaagggatccacagagaagggccaggagtcacggacgacgccaggcagtcggcgcctgcgcttccgcgagccaagacgcctgagcggcgcggggggatcgggggatcccccagaaaactgccctcgactaacagcgcagcgaaggggcggtgcgctcgagaccctggaacgggaacgaccacagccaccgcagggaaacaaccggggcccaggcccaggtgggcgggcggctgaggagcgtggctgcgcccacaaagccgccgggggctgcggactacagcgaagccggcgcggggctcggccctcactacacgaggcctgggcgcctgcacgcccccgtgcttcagcccgcggctcccgaacacccccgccaggcgatccccaaaaacgcccgctgcgcgagcctcgacgggaacgcacctgcgtctagacgctgacgccgtgcgcggggcgggggccggcgagcatgcgcagtgtggtgtggacagggcgtggttggcaagcatgcgcaatgtgggccgggcggggctggcgagcatgcgcagtatggggcggggcggggcagggctggtgagcaagcccgcggggagcgagcgcggaggcgggcgttgctacggcaacggtgggcggccagggagttgcctgagggaaaaggggcagacgtccctgggttccggtgttcgcggaggagtcgaggcacggagaggcttcgggggagggacggaaagaagggtggcccgccaggcgggcggggtccatggattcggggtgagggccgtccgcggcctcgctttcgcctcctccgagccgggccggcgatggccgcagctgtgaggcgaggtcgggtcccgtagcggcgcgcagcctccttgggggactcggggtcctggttagtttccacagctccttctatctgaggggtacgaatttacggctgcctaaagccttagaacagtgatcccacgtcggtaattttagaacccggtaggaccggctgccatcaggggccccaggtgcagggtggtgtcagctttgagaggaattggagcctcgtcaccgcgcgcttcctgcatgagtggaacctcagaaaacggtcagcggggttcagaaggcaggagataacaccaagaccctacgtaggattgcatctttacgtcgtaggcttggtctcgtgtatttttattgagcgtgtttaattagctgaggttactcgctttggcaccccagtgatcgtttttgccaccaagctctgcctcttgagcgtttaatactgggatttacaaagcaacgggttcctgttaatcttagctttcaatactgggcaagggttacgtttctaaccctaccagtgccgcaggctcattatatattgaaggactcacctggtatttggttttctcatttataaagtggagttggagtaggtacttgaagggttttcaatacctttaaattctgaattttaaactctaaaacttaatgataccgtaggactttaagagagtataggttttaaaagctcttaccttgatattaatgacagtggtctactgtgtagaaacttgagattaaattgcagactgcagctatgaccggaccatttttagtgtgatgcaaactgtatcttctgcaggttataggcattttggaagcaggaactgagaaaattctggcagtgatctttcagtattttaaattccaccatttctccaagttcagttgtcttgatgagatacagggtggaacttatttcaaacatctcttgatgccagaattgaacgggaacagaaaagggctgtagtaagaaccatcatcaaagcctccaggacttgagcagcgactgacgtttttacttctaaccctggatatctcagagatttggttccactgtgcttttctatctctccactcacgccttagtgagtttgttctttcggttggagtaatttaatacaagtgttagtccttagaaatacattttggattaatttctttctatttttagagttaggccctcaacacagtaagtcttcacttaacatcatccataggttcttagaaactggagctttaagccatgcagtgtacaaggaaaccagtttcaccataggttaattgatataaataagaggaaagttcccacagcacattcctggtcacaaaaacatcgccaaacttctaaataaagaccaaagcacttctaatatgaaacactgaagtacatatgagctctacatttaagaaatatcattacccaatttctggtgaatccatgagtgaccgggttgtggaggggctgtgttaaagataatgttggccaagccaaagctctgaagcacctccccctaccatgcagtttcaaaacaaacaggagccacttctcagcccgctgggcctttcttactgcatcgggtattgtcctgcatctctgtgtgaataccgtatgctttacgagtttttatttgacaataatttgtatcctttcattttccaacctgcttattccagttcagggtggcagggggctgagcccatccagg

SEQ ID NO: 1882642 - DNA, 4001 bp, Homo sapiens
ttagggctaaaccactctcaactggcaatttttctccccttgggctttcaattgtgtagcttttaaacctggaccctaaccccaatttacttgctaactccaaattagccttcaggtccctgattaatttcctccggaaaaccttccctaactaccccttctttataccccagcccctgttgtctacaccttgagcacttatttatcctcagtactttactgtatggctccttaggtgggcagcaagtgtcttaaggacaggacacatgtgcatctgattcttcctgtttagaccaggttcctagcacagaccctaacgttgccaccttttaaaaactaggtgaatttgagttctaagattttacattctgacgtccgtggctcagaaattcgacagttgatcgttctccctttccccacattgctcaagggcagcaagtttccttccctaaagcccagttgttcttttccgcctcaaaaagaaatgcttcttagaataacttttctaggggacgggtgaggaaattgttggccagatgctgtggctttaagtctagcaacagtacacccttcaactccatcttcattgttttatccccagcattgaatcctccattccactttcctgactgccctccgcagaggcaacagaccagccaatgaaatccttcgggacgggtccgcccctctgcaggacaggctgacgtccccagagcgactctgcgcccccccccgctggtcctttggtccccgagtttatgccagagcatggagcctagggcctgggttggtttggtcagaaccagggctccgtgggagggttggcctcagaaatgcaggaattaaacaccgtgctccccaccctagcccagacccggctcttcctccctccccagcacgtagagcacccgggacatggctcccgtacccgatgtgcacggaaagccttcacaaggtaccgataggccgcggtgtcgcgatagggtcggccggtggccgcgctcaggtagcgcaactcccgcagaagtcctcgaaaagtgtgcgacggggaccctaaggccgccattgtcctgtccttctccgagcgtggtgcccaacggcgtcctacgaccctgaaaacccctcctccggcccaggcgcctaatggtacggtcggacagactaccgactccccctatcgactgacgagcagtggaaccgctcacttgtccgttgaccgaaccttattaatcgaaggcccaggggcgccgtaacaaaatcaaacgaaacccgactgttaactgaaggtaccaggacctctaacccagaacaagggtttggggaaacaggggcttttcttcactgcgtcattgaagatgcccgttagccgaccaaccgctgagtctcaggagaagcgggcccggcggggggtgtgggtgtggatttgatatggaacacgctgagaagacatttttaaatgatttataaaagggatatcaaaattcaacgtattgacgtctccccaaatcccaggggacctgcggctcagacaaaggacatgggtgtgtgcagattctcgaaaattgcagcccaccagctagtaaaaacacacacacacttcccatttaaaaaaaaaaaaagtaaagttggcatatttcgctttgtttagaaaggggaaaaaaggacaaaagtcacaggccaccccagatgggactcgaacccacaatccctggcttaggaggccaatgccttatccattaggccactggggcttctgcaaacgacgcgctcacacaacatattcaactattttcctctttggtacgtcatcgtcacttcattttcgccttaccctatcccacgaaaccacacctagcgcccacgtgaggggtgacgtatgctgggagttgtagttagagaacaaaagtccacatcaccgcgccaaaggctttaccctcgaaactgcaccgatgctccggacgttgaacgggcgcgcgcacgcttctgcgtacgcgcttgcctgcgcaatagtctccgcgcctgcgccgtagtccccgcgcctgcgcaaaagcgggcatgcgccgtcgcggagcacagcgcgctgggcaaattggccggatcttcgagactcgccctctgaacgtcagctctggtgggtttttaccggaagcagccggaccttttccggtgttgcgaatttccaggaggagctttgctccagcggccgttagatggcgcctgccgcggtcaatttctgcttccggttgaagcgttgaggccatttccgcaggccgggcgtggtggcgcacgcctgtaataccagtactttgggaggccgaggcgggcggatcatcttaggtcgggggtttgaaaccagcctgaccaacacagagaaaccctgtctctactaaaaatacagaattagccgggcgtggtggcgcatgcctgtaatcccagctactccggaggctgaggcaggagaattgcttgaaccctggagtcggaggttgtagtgagccgagatcgcgccattgctctctagcctgggcaacaggagcgaaactccatctcaaaaaaaaaaagaaacatgtgccgtgtcctttgaattggtgcgtcagcgataaacatgggacagcggggaagtaatagtacattgattaggaattaattttaaaaattagcagttcattttttggttctgttcctaattgtataacgaacaaatcacttcggagtcccagtaaacttacccttatagtatcacaggggcttcccattgtccctaagataaagctcagacgacataaattgatcctcgcttgtaccttaatcttcatctctcacttttcgcttatcaccctctgctccaggtatctccactttcattgtctcttccccaccacacaccttacctgatattccctctgcctgaaacttaaccatttgtattaatatgcctctttaccctttgggcttcagcttactccagaagtctaggttagacgcttctccaggcccttgaagtcaatacggcaaggtgaaaattattcatttcacctcctctggtcccctgttgctccctttatttactcatcgtaaataactcttaatgtaggtacatggccactactccatactgtagttgtcagtctcttccatcagactgggaaattgttcagctccgaaagccctgtgcctaacagaaaagcctgtttcttcaccaggcttattccttggtagcatagtcataacagcttagtctgaagctcctaaagggattggcactgtctggccccagtggctaggagacataagctactgagcaggaatgacaaacaaatggaacatcaattgttcattaatgagtaaagctggcttggttggaaacctggtgaactggacagcaactagcccacctgtccagggggcagccattactcacctccactgattgttgccattttaggaaagcaaatcctttaaaaacctttttttttttcaggaaactctggaaatctgttttaatgctatagatttccttctaaatattggccactaatgaatactttaaaagtactgcatgccaaacagcccacagacttctagtctgtaaagaaagaagaaaaaaagggcgataggatttgaagttaagaaaaggtaaaaaacatgtggcgtgcctagttcgtgggaaaaaaagctggtttgatgatcctgcctttttattttttctttttagaaaaatttttacaactatattgtctttttaagtttttaaatgatttttttctttcctatcatctccttagcctgataccctgccttatctttaggaaaaaaatgctcctgataataaatacaaaatataataaactcatttgtattaacatgtgagattctgttcaaaacccagcctcattataggtcactcttcagcaccctcagctgattaccacactggctaaattaaggaacttacacatcttaaacagccttctcaagattaccattttaaatgttcccca

SEQ ID NO: 1882643 - DNA, 4001 bp, Homo sapiens; identical to SEQ ID NO: 586229

SEQ ID NO: 1882644 - DNA, 4001 bp, Homo sapiens; identical to SEQ ID NO: 586242

SEQ ID NO: 1882645 - DNA, 4001 bp, Homo sapiens
aattttagtgtttaaatttaatgagtattcatgatgagaaacgcctgtctgagctatgtgcccctcctccaagctcaaccaataccctgtgctaacttcaatcattataccttaccaaccattctatacacgtatgttatttctctatcttccttcctggataatgatcttcttgagaacaagaaatatctcattttgcatcactaccatgttgtgtaggacctggcgtcttgagcatttggggtacctgcagagcacgctgcaggatacaatctcggacaagtcactgccacagttttctcatatgtacaatgagaaatttgggctactgtcatctctggggatttttctagatctaagattcaaggttctttgcctgttacaatgaattagggaaaacgtcacaaaataggaatctcagggagattatgtgacttgcccaacttcttttgcatcttctggaatctgatagaagattaagattcaggaaatgtctgctctgtgggaattggtttagaagactttttctgtaggttttaaataatttatttgctgttaaatttgtccttgcaaatttacaaaagcctgaacatatgagattggctaaaatacagaagaataaaatacaaggataattatttcctgagaccttgttagaattgttttttagatttttctacaatacacagaaaatacccgtgcgataaagtgagtatattgctacatgtgtttcattctaattataccgctttttccttggacctgagattaaggaagaatgatggaaaatcataattcatggtttatgcacttcaaggtcaaactcaaagggccttccaacatcattgactctgccatctctcactcagcaacattctccagctatccaattcctattccccgtggaccctgatcacttgaaacatcgagttcacctagaagagcctattatagtttatatgtgtttccttgtgctggtataacaaattatcacaaacagtagttttaggcaacacacatttattaccttacggtcctggaagtcagaagtctaaaaattagtctcactgggctaaaacgtatctgttagcaggcctgcactccttcctggaagctctaaaggaaatccatctccttgcctttcagaggctgtctccattccatagctcgtggcttcttcatcttcaaagttagcagtgtagcatcaactctcctgactctgcttctctgctcctatcatgatggctcctcctctgaccctgactcttctgcctctttcttatctggacctttttatgacattggccccacccaaaaaacccaggataatcttttcttctcaagatcttcaacttactcacacctacaaagtcccttttaacacacacagtaacatgttgacatctttgttgtggggaggcactattctgtctaccatacacccatctttctcccataactcagaacagtggagacctcttattctgagttccagtattgagaggtgacaatgtgctagcagccctcgctgtctctcggcacctccttagcctcggcgtctgctctggccacgctcgaggagcccttcagcccgccgctgtgctgtgggggcctgtctctggggctggctgaggccggagccggctccctctgctaacggtgaggtgtggagggagaagcgcaggcggcagccggggctgcgcacggacctcgctggccggcgcggttccgggtgggcgtgggctctgcctcccagcacaggcgcacccggcgcctgctgggcttgatcggaggctgggtcccgtgcgtggaccgctattccctcttcgtggggtcgttggccacaatgatgggtctccatctctttcttgtttcccttcttttcctcttggttgtctgggacgagctccctctgggctgtgggaatgcccaggctaggtgctggaaagtcccgcagccactgttggtgagaggtgaagccggctgggtttctgggaggatggggacttggagaacttttccgtctagctaaaggtttgtaaacgcaccaatcagcactctgccaaaacagaccaatcagctctctgtaaaatggactaatcagcgctgtgtaaaatggaccaatcagctctctgtaaaatggaccaatcagctctctgcaaaatggaccaatcaggaggatgtgggtggggccacataagggaataaaagcaggccacccgaaccaaaacctgaaatctgctaggtttgctttgttctctgggaatggtggtttctttcgctctttgcaataaatcttgttgctgcttattccttgggttcataccagttttaagagctgtaacacggtagaggtctgtagtttcactcctaaagtcagccagaccacgaagtgagaccacaaacccaccagcaggaagaaactccggacaggtccgaacgtcagaagggacaaactctggacacaccatttttaagaactgtgacacttaacacgagggtctgtggcttcattcttgaagtcagcgagaccgagaacccaccacttctggccacaatatcacagcaacttctgagaaagacatttctggtaccagtcacatcttgtcacagagaagtcactactttggaggttctgttaaaaacttctgttgtagaaagtgcaaatggacacataggctctaattgagtttatctaagcatgtactatttgtattcagacaattttttttttaagtttataagctttggcaagacagacttacattcaaatctgggtgctgccaactattatctgtgtctgttagagcaagccgtttctcttcctgagctatggcatctctaactcagccacattgtctactaccctccctgggatttctctgagatttgcgggatatcaagggtgttttaaattagacagtaagagtcataattgaattttgtacatgtagttgaaataataaacaagattgtataatttgggtcagctttttatagagtctaaggtttgatatattagttcttttctctgaaaatattttccatatttcccagaaccaatagtacacacatacatacatacacatgcacacacacgcagaaaccttcaacaaacctaaatgtgcaataagacatccaggtgattatgcacattatatactgtgttttacaaagagggtttattattaatcttctagccttattctctttcctttcctcacccaatcctatgtgtctctgtgattcactgaaattcgtccaagttgggcattaataccatatttatttattaaccattaatgtggttaataccatatttaatttgctgcaaggtcaatgtttaataacctaatattttgttggcaaaaaaaaactattatgaaaggtacaaatatctagcctgtttcttctcctaacacagtacttttatcatcttatatgaaacagaagctcagcctcgttaaaacttcacaacattttggagagctgcttgttccctgctcccttcattctcttgttctcattctctcttcacattccctccttccatcattctttctgtagataagaaatatatcattttggctcattgcaaacattttaaacaatacaatgtgtataaaattaagtgaaaattcatatccctacgttttcaatcttacaatgtaataatcacatcaagttgttgccaatccttgtcctctgggctttttcacgtactggacatcatggtatgtccaagtagatacatttgactcttttttgttttgttttgttttgttttttgagacggagttttgctcttgttgtccaggctggaatgcaatggtgatatctcagctcactgcaaactctgcctctcaggttcaagcgattctcctgtctcagcctcctgagtagctgtgattacaggcatgcaccaccacacccagctaattttgtatttttagtagagatggggtttctccatgttggtcaggctggtctccatttgactt

SEQ ID NO: 1882646 - DNA, 4001 bp, Homo sapiens
tttcatgtttctaccaaagctgatagacagctctagaaaaaaaaatcactcaattccatccttgcctatcacacacaggtagatgggccaggtactcctgtaagcggtgcacaatgaggtcatcagtccttagcgcgctcttggatcccggcattccacagagcacatggctcactttccgcaaagctcagcatcatccacactcgggcctgatggtccctactaagcagccaccgggttagcacctctcctttccagctaactccttttacactgcttggctcctccctcttctgtgcgcagcacgcatctctaatctaacacctgcaggctgaatcactatcttgagctattttccagacttaaaacatctttgtagataaccgcaaattatactgcacctaaattagacatgcatggtgctaacatgaaacaatgagttgagaaagtagagaaccagcaccacaggactccctgaaggccacctggctacattctatttcaaacaggacttttaaatggggcactctgtcaaacaaggtggtgagtagctgtcaattaaaggacacttccctgcagagttcagggtagtaaaatcatagttaggaattatcgaggtctgctttaaacttgtggataaaagtgcgcacacacacatcaaaaagaaaatgatagccaagacgtgaagattataaagcatttatttgaaaaagatacattttattaaaatccattttccactttaatggtagttcaatccacatcgtttttccagtcttaaaatgtttctttatcgactactataaccctttactgtaattaaagccacattttgtaaaactacataaactggggtttgactatgaactatgtcctaaatcccactgccaaatgtagctagcgtcactaaaatcaatcaatggttttaggtctgagtgatagtggacgagtgagctggccataaggtgaaggccacccttgcttttactggatatccaaaaacgaagtccagtgagcagcaaacgtctccacgttaaccacacagcccactagctccagttccagccctggacagctttctggcccctcgccgggcccacttcctctgcagccccaggtcccgacgcgcagggaaggccgtctggggccgaggtcggggcgagccgctgcccgggccagaggaaaggcgcggcgcttcctgcccgcccggccgcgaaagcccacctgaccattgtccggggtctcgccctgccccgccccgccccgccagctggcccactgcccccccccccgggccccaaggaacacccgcccaccccaccctggcccctcaacccagccgcccgccgaccacagcagtaggacgcccccgcgcacgctcaccttcttgcccttcttgccctcctcttccatatcgccgcgtgcggctcccgcggcccgcccggcccgccccgggagccccgccgccagcagccgctacatgctcgacccgggcccgccgcccccgcgctcccggcgccgcccgccagccgggcccgaagtctccgccccggccgcgccccacacccgcacttccgggcccgagccccctccgccccgcccaggccccaccttccccagcgcaggccccgcccacggttgtcgctcatcctcactttcaggcccaagggaatccgacccgcagcgatcagaccccgccccttcagggagaacacggcccgttggccccgctcacggcgagagcaccgcccacaggctgaagatcctgccccttcaggacggccgagaacgcgcctgccttgcaccacccccaccccgccccgcgtccttcaggagagccggaaacgctcctacccctacttcgcttctgcacggccgcgagaacgcacctgtccagccccctgttcgctccgcccactcagcgcgcgcgggagcgcgcgcgggagcagctccaactttttcaatttgccgccatctttacggcggccgacttcccagcctgcctcgcgtccagggaggcggagctcaggtctctgaaaaggggacggggggcgggggacgggggacgggggccggcgggaggggacgcggccggcagatggcgaaggaggggcgcgaggaggcggccactgttgaggggcggggcgtcccgccgagagtctgggtgcggtgcggttttcttttttcttgtgtcccactttattccctgagccacagggaatccgttttctagtacttctctgttataaagtctgcctgccttagacaaacacatttggaaaatagaagtgcaaccacaaggatgtgcagaccctatcagaataaaatcgtagaaccttaccagtcatccggtataatttccacattttccagatgaggtccggggaatgaggtgattcgcccaaaagcacactacaaattggagtcaccagcaggtctgctattttgccactaaaccaatctgccggtaagaactttgtagcacagctagaatgtaaactgtgtttttttggtggtttttttttttttttgagacggagccttgctctgtcgcccaggctggagtgccagtggcgtggatctcggctcactgcaagctctgcctcgcgggttcacgccgttctcctgcctcagcctcccgagtagctgggactacaggcgccagccaccacacctggctaatttttgtatttttagtagagacggggtttcaccatggtctggatctcctgacctggtgatccgcccacctcggcctcccaaagtgctgggattacaggcgtgagccaccgcgcccggcctaataattctttatattaaacttttctttactgtgtttctgtctcctgactgggcctatgttatactgatattcaaaagaaatacttggtctctagacctctccaaaggcataagtattccattctctgcaagataaagcagagatagtggaaacaccctttcaatctgccttctgcaataatccagcttgccacatttacacacgcaaatgatgtagcgcatctggttgtcattattttcccaccattcacagaacaaaggcctgatatttaaagtcttccaccgtcttccacaaatgcatatttatcactccataatacagtaaacaacactactaaaacttctcttagcctaactctggatgtgctgacttcctcaggctgttcttatccatcagaatacctttgccctgtctttgcatacacaggttcatgcttcaagcaaaagtccactggctaatgatcagatggtgataactgggaataaagacaataaaatgagaaaagcaaaaaggctgttagcttgctataacaagggagtcagccaccatcatttgtatttggatgagactcaatgtcaggcagaggagtgggtaagctttatagtgaaaaaagggaagcctccagggatgtcctcatttgaggctgttggcctggggaagcaaggggcagggcatcccaagtgattggttaggggcacatatttgtctttctctggttgctcctaagctggaagcaggaccgaaaactaggaaagctgccagtttttttttaattgacaaataattttttgtttcttttgtatttttagagataaagtctcactctgtccttcaggttagagtgcagtgatgcagtcatggctcactgaagcttcaacctcctgggctcaagcaatcctcccatctcagcctcccaagtagctgggactacaaggacgcatcaccaagcctggctaattttagtatatttttgttgagacaaggtcacactatgttgcccaggctggtctcaaactcctaggctcaagcaatcctccctcctcagcctcccaaagtgctgggattataggcatgagccatcgcacccagctaacacataataattgtacatatttatgaggtacatgtgatttgtgtgtgtgtgtgaggcagagtctcactctgtcacccaggctggagtgcagtggcatgatttcag

SEQ ID NO: 1882647 - DNA, 4001 bp, Homo sapiens
catttccctttcttggatttgaactgttaagttttgggaatttagggatgagtaaaacgcatactcccttcaataatctcatattctccatccctaagactttaaaaatgttaaagcaaagagatttctctcccctccagttggagatggagatgagacataacagagaaattgctgttttaaaaagagaaaaaccggccagatgctgtggctcacgcctggtaatcccagcactttgggaggctgactcaggcggatcacctgaagtcatgagttcaagaccggcctggccaacatggtgaaataccatctctacaaaaaatacaaaaattagctgggcatggtggagcaagcctgtaatcccagctacttgggaggctgagacaggagaatcacttgaacccaggaggcggaggttgcagtgaaccactggactccaggctgggcgacagagtgagattctgtcttaaaaaaaaaaaaaaaaaaaacccataaagagaaaaaccatcctcatgcattttgcccatgtgattgtgtcaaccacccttaatttttcaaattttattataattaatgtacaattacagtcctttagcccagactgtgaatggcaaaaaagcagggattcaaagacagggctgtcagactccaggcacagtcagtactattactgtcactgttacatgtcacttctgaatgttctcctaccttgagaatggacattgcaaatctttctacaaagcaaaagttctacggaaaatcaagacatttctgacctagcagagcacctctcaccatttcgtgaagcagcgcactgtgcaggaccgtgcccggctaatttttgtatttttagtagagactgagtttcaccatgttggccagggctgatcgtcaactcctgtgtctttagtaagcttgatgtctccagcgccagaaacaagactgtttaagggacagaaatcaatcaaattgtgacaaaaacgaaattaaaacgaaaactaaattaaaaagtcccattagaaaatgggcttttccagccgggtgcggtggctcacgcctgtaatcccagcactttgggaggccgaggcgggtggatctcgaggtcaggatatcgagaccatcctggctaacacggtgaaaccccatctctactaaaaatacaaaataaataaataaataaataaataaagcaagctgggcgtggtgacgggcgcctgtagtcccagctactcgtgagactgaggcaggagaaagacatgaacccgggaggcggagcttgcagtgagccgagatcgcgccactgcactctagcctgggtgacagagcgagactctgtctcaaaaaaaaaaacaacaaaaaaccaaaacaaacaacaaaaaaggacttttcccagatctcagggagccagggatatggagctagttatcaacgaaaactaaattaaaaagtcccattagaaaacgggcttttccccgatcttagggagccgagaatatggagctagttatctcccgcaggctggaggacaagtgtagtgcccaccccgtccccgcagagattgtgcagagtcctcagggtgtctggaagcccaagaaggcggggaacgccgcacactagagccgcttttttctccatggagacggcatcgacgcaggaagaaatggacgcaacggtggggcttagcagggaacaggaccggcccgggaggacgcgaggaagggtggctgcggagccccgaggcagcgggctcccatctgcggtcttgggcccgccaggtgcgcagcggcgcgcggtgcccacccagccctcccgccagccccaccttacatctttatggtccctttgggccccaggttggtcctcagcacgtcctgcagaccccgcgccccgctaatgttgaacgccagcgccgcctgcgctccggccaccttggccttggggttcagggtcttcgccgccgccataactgctccagaggaagaaaagaaagcgacgcggcacgcggagagcccagagcaggcgcgccgtggccgggatgcactatccggatcttccggaaaagtcggcgcgcccagcccgcccctagcgtgcccgcgccgccgctattgggccacgggctgtccggcccccgctcattggtccgcggctgcacggtgcctgcagtcccacccctcgcccagcggccgcgacgctatggcgcactggagtaccctgttcctggcagtaagtgcttctgggttctggcgttgctgctcagtggggcccaagtttgcggacccgggatctcaggatgcaggcagggcttatgccccgcgccggacagggcgtagggtgggcctcctcctgcccctactcgcgcggtttgctcctcagtctccttcccttgctgctttcacgactttcattggagctttctggaccctgtgcttgacggtgctgtaggtgccgtggggacacacaggctagtctgataagcaccctccgccggaatcatgcggtgctgtaaggactaacgaagatgaagatagaatgcaaggtagaaagtgctggatgcctttagaaagctgcaggactggtgcgatgggagttgagtcataacctgtccgtcattaggactcaggatgctgctgaggccctaggcttctatggtagatttgaaaactcacccttgtagagtgatggtgtccagcctttgagaggactcccttttaaggtaaatttccaaagagctccacaattgtttacagtatccggtgcccgccaaattccagggattcagttacacgtgatattttacttcattttttctttttatagacacacggcctcaccatgttgcccagggtggtctcaaattcctgagctcaagtgatactgctgagctcaagtgatcctcccgtctcggcctcccaaagtgctgggattacaggcatgagccaccgtgcccggccagtattttatttttaatagataacggaaattgttctgaattcaaaaggcaccaaagggcatgtggtggaaattaaatcttcctcccgccactagttcaacactagagacaagcacagttaccccggatactcgatgaattttcggaatgctttctgaatttataaacttatatgtaaatataatcatttccccacacaaatggcaattcctaatacacactgtagggtgtgttatactttaaatgtcttggagagtgtgccatatcaagactaatgggaagtcctcattaacagctgcgtgatgttcttcgtaagaattacacaactaggagccggggcacggtggctcacgactgtaatcccgacactttgggaggccgaggcaggtggatcacttgtgcctaggagttcaagaccagcctgggcaatgtagtgagaccccatctatacagaaagtacaaaaattagccgggcgtggtggtgcatgcccatggtcccagctactcgagaggctgaggtgggaggatcgccagaatctaggaggcggaggttgcagtcagctatgtcagctatgatattgccactgcactgcagcctgtctcaaaaagaatgatacaactaaccagtcacctactgactgatgtttaagttgttcccaatctgctattcaggctgcagtgaatatcggtatatgatgcttttaggaggatttgtgtatttgagaatcacaaaaacatctatatatgtgactagaagcactgcacaatagaagactagttattagttccataggcattacatggtgtgcatgcagatttattataactgctgttaaaaatgttatgaggagaccagtcgtggtggcccacacttgtaatcccagcacttggggaggccaaggccggcggatcacttgaggtcaggaggtcaagatcatcctggccaacatggtgaaaccctgtctctgtaaaaatacaaacattagcaagaccaacaaggtgaaacactgtctctgtaaaaatacaaaaattagcctggcatggtggtgtg

SEQ ID NO: 1882648 - DNA, 4001 bp, Homo sapiens
tattatagactacttgtttcaaaaaaaaaaaaatctaaaattggtaataattctgcttaaattccatattaaactaggatcaaaagtcatttttagttcttcttgtttcttaaaatacttgaaatgtgctgctgcataatgttttccttaaatatttattcattcaactaactttgggtggaaggtacttgtaagtttaaaagtcctttctgaaagtggaaataacataacaatgtttgcataaaagacactcaatggttctcaaagcgtatctgagagtctaatcagcctattaactttgttctgaataaccaacaacaaatgtgagctttttgtcacatctatgcattttcccctgtaaactgatacctacattttaaatgcatttttaaaatgttccatttggccctatgataattatttcccctctaaaaagcgaaaggattttggtttaagagcaaatgagacagagtatctggtccatgaaaaaggctaagtggaaagatcagttccctgaagtttgtaaccaataacaagagaaactccaatgctaccttgttcatgtaatcaacaatatatgagttgaaataaactagtgagctatacatttctgatatataccaatttaccaatcaacaggaggggaagaaatcgctcaaatgtgactactgttaacaaacatctaaatatcagacatagtctctattaaaatcgtaacctatccattttgaaatcattccttcgacttttatgtttttaatcgccccattaaaaaaaaagcagccacttttaaaagtaaattcccccctttttcaaagtaacttgcctaggaaaatgtaatgcattaaaataaaacataacagacaaaccaattacaacattaaagaaaaaactaaaatgatgagtaacacaaaccaatcgctccagtttagcaaagggtgtgtttttaatctgttgtgggtatcctattatactaataggcaacaacgtttaaaagtcatcccaatgcctaaaacaccgccatatacataacatacttgtcctttactccaatgaagcttaaactagacccaaactcagaccatttccttctcctggcacactgaaacatacgagagggaatccaagaaatcagatatgttaagtgctggtatcttcttccacagtagggtcaaatttgtgtttgccagctaatgtcaccgtcccagtaagtctgcaaattctcactagcgctggagtgcaaagaggcctgaccacggaaacacctgtcctagcaccaggaaaacagtgggaaaggcaaccccgtctccgcgccggccccaaagcctcggctgcagcgatcgggggaacaagaggcccgctgccgctggtctcacgggtgcggcggacaaggtcccacacccccggcccgcctcccgagaaccaggaaacctgtcaagccagcctgcacccaccctccgcagccccctcgcgctcctgcccagcccggccccggcccacccgaccgctccgcgtccgccccggcctcccggctgcactctgccacctcatccctccccggctgcctcgcggccccgccacctccgccccgcggcctgggctcatgccgccccccgggcaggagcgccccgccgccaccccccacccggccccgacccgaccccgtaagttccccagcggcccggtccccgccgcccccaggcctgagctcccgccgcgcgctccccaccccgagactccgcccttgccccgctcggccgctcccggcccactccccaaagccggctacctggaggcaagggcgacggagcacttcacccagggccccaggtcgcagagggcccggtgctcggggtcccgctccttctgcctctccacatggtaggcgtagatggagagcaggattccggcagcgcacactgcataccgggccacccgctcccaccgcggcaccgacacgctcagcaggacggccgtcgccatcctgccgccgccgccaccgcctccctccgcctccaccgcctccctccgcctccacctcagccgccgccgcccgtcgggacccgacccagctgccgcggccgccgccgcgccccattggctcggtcgcctgctccgggccccgcccccacaggcgcgcggcccaaccgccccgaaaggagtgagctggacggggcggggaaagagcgggcgggcgcggagggtgggggcggagtgcgcaaccgccggggaggccggatctgcgggcggagattgaggcgacgcgcgcgaggggtggagcccgggggagaaaggggtggggcaggggcggggcagggtaggggcggggccgagcgcgccagtgcgggagggacttagaggagcggtgcaactagcaccttgcaaggatgccactgtgggtgactgggcgaaccctcggcccctccctctggggatggcaatcaattgccatcctttttccttttttcgttgtatttttctgacccaatccaaatcaaccctggccagtgcttggagctccagagacacacacctatgacctgatcttcccaccaccacctccggggacactctgttcgacctgtgcaaaacttttttttttaatgtgcaaaactatgttttaaatttaaaaactatttttaaaaaatgattcatggaccgggtacagtggctcacgccaaatcccaacactttgggatgccgaggcaggtggatcacttgaggtcaggagttcaagaccagcctggcctacatggtgtaacctcgtctctactaaaaatacaaaaaacaaaccaaaaacaattagcccggtgtcgtggtgggcgcctctaatcccagctactcgggagactgaggcatgagaattgctggaacccgggaggtggaggttgcagtgagccaagatcgtgccactgcactccagcctgggcgatagagtaagagtctcagaaaaaaaaaaaaaaaaaaaaaaaaaagatttacgaatgccttgcttctccgtaagctgaatttgaagttgcttaccataactcatataatatagaaaaataaagatgagctaatacaatcaggatgaagaaaaagaaaagtcagaataaaatgaaaggccaggaataagaacacagataagcaggccataggggcttacatagttattaaaattgcatcataaatttggctctgagcttcctggtggccaacactaaaaggaaaacagatgtatgtgctttttctcactgtctttaagaagaaacacagtgttcttggagattttcagtgtttccctggttgcagctttcaatttttcaggggctttatatagtgattttgagtaataagcaatatccttgtattcgttatctattcttgggtaaaaatcaccccaaatttagcagttaataaacaataaacttttttttccctcacagtttccatgggctaggaatctgggtgaggttagctgtgtcctctggctcaggctctcatgaggatacaatcaagctgtcagccagggctgcagctctctcaaggcttcagaatcctctttcaaactcacttccactgctgctggcaggcctgaggtcctctctggctgttggctggagacatcatttcctgtccacttccacctcttggtaagaagcagcaggcttaccccggggagagggaggagaaagaggaagagacagaaaaagaaaatgagagtgagatcacagtccttttttgaaacctaatcccagaagtgacatcccatcacttttacgtagtctattgctacttagaaaatagtctctaggtccagccagtcatggtggctcacacctgtaatcccagaattttgggaggccgaggtgggtagagcacctgaggtcaggagttcgagaccagctgaccagcatggtgaaaccccgtctctactaaaaataccacaattagctggatgtggtggcacatgcctgtaaactcagctacttgggaagctgaggcatgagactcacttg

SEQ ID NO: 1882649 - DNA, 4001 bp, Homo sapiens; identical to SEQ ID NO: 586266

SEQ ID NO: 1882650 - DNA, 4001 bp, Homo sapiens
ttaactagcccaacctatgcctttaattaggcccatcccttcgtttcccataagggatacttttagttaatttaatatctatagaaacaatgctaatgacttgtttgctgttaatcaatatgtgggtaaatctctgttcggggctctcagctctgaaggctgtgagacccctgatttcccactttacacctctgtatttctgtgtgtgtgtctttaattcctctagcaccactggggtagggtctccctgactgagctggtcttggtacatttgcttgcacccaaactcaaaagttcattactgaaaccccgtggacattttccccattgattagcttcttaggtggaaagcaactaagtcttttgcaattttgttttgttttcaaattgtgctaatttctgttgcagttttcagttcctagagtcttccttcagttctggtcacaggtttttacttaatgcaaaaccattttagtccttgaaatggagagaagcagctatctgtcagggggtcctgatggctactatgttctgaaatctttgagtcagaatagcaggatgggaagaatgtagtcacaaacaatccaccagatgacaacactacacagtgtaaaggtcagcacagccaggggagatgggagaagaatatcgtttgtttttgattgtcttcgccttttcagggcccgacttctatcaccttgtgtcactccattgatttcgtcgtcatcactgtaaggtttgggttcttgctggtcttgattctcgaccccatttatggaaatgtcatcaacaccagagagaagtttggagaaggctgctctgtgttgtccattctcctgcccctttaacctctgacgaaaatagtccccttccagccagaggcttgtttgcttcatcaccaaaaactgctgctgaggcccgatcaccaagccaggtctgcagatccttacccacgcaatggtctcggctgctgtcatcctgtaatgcttcatgatgtagcaggctatcagagtgcctgtgcgaccaaggccagctttacaatgtactgcaatggcaccctcagcattttcacagatatccagaaatcttttgacaatggcatcagtaggggtgctgccatccgcaaagaaaagatcatggtgatcgaagccagcatccgtaaagcgtttggcatcatacatccttttattcagacgaataatggtagtaacattgtgattcttaaaatattgaatataagtctcgggagaatgttggtggtaaccactttcaagtctggctcttgaatgaggtccacagaaggcaataaatcggtctggtattatccaatttaaatctccgttttctgctttttcatagtgttcatattcatcaaggttaaatgagttgaaattaaggaagccatactgcattgccttctttactgcatgaaaacagtcaagaagtgtaatgtagaaattgcagcttccataggcagcatctctgaaaggaatatagggtgtatctccaaagattaatattctatatgctgcttctggggttctccccaagtatataaccatgtagcatccaacaaggaaggcagcatttgcttgttttctctgatcagagccagtaaaatgaacaattttcttccttaacattgtaatggactttaatttcttatttatcttgcaacaatatctgtaaaccattgccagattgagtggtccaaagtcttcggagaagttctcatattcgagttcattatctatgctgaaataatgtacatttgatgcactctttggtctgctgtagagaatggcaaaacgaaggcgatcggtgatgtccacgtacacgtcgtcctgggggtcccggcggcgcgggtcctgcagcgtggagctgcgcatcttcttcacaccctgcgaggtcaaagagcagcgcggcgagcagtggggcgcggcggcccagctcgaccgccccttgcttttccgcttcctggaggccgccgcggccagtcagggagcaacgaccacggccccgcgcgcgccgccaaggctggcgccagtgccgcgcgggctctcaggacggcgggcacagagcggcattgcagggacggcgggagccggcggagcccgaaaagaggcggtggtgcaggagccagaggaggggcctggcccacagcgcctgccccgctccctcccgcaaccgccctccctttgcttttttaaaccatgaactgaagggctatatcatactgacatcaacaaagtgttggatgaataagtcatcatgctcttgtcatagcaaccacctggatcttaaccttctctccagtctctggaaattcagccaaataagtgttacttcgagtatgactttattaccaaatgacagtatttttgaagcactcatttaggatccattaaaagttggaggttgtgaccatttgatattgaaagtcatgcctgcttggagacaagttaatgttgacatattgctctttcaccaactctcccaataccccaaccttggaaacatggggccacaagatagttaaatagatagtttaaaagatggcatttcttttttctgttctatgtgggctttccaaagaaaagtcttggagaagctaaacaatgtgtgtagaagatcacacagggatatcacaagtgataaattttatacccaatgtcatcccaaagccaatgtgcagctttgcactccttggcaacggaacaggcctctctccttcacaaaagagagcttcgtgaagcttcatccctaagttttggtttgggggtaaaataaagaagaggactgatgggttgttcttgagcttactactcattcatacatcttcttgccctttctgtttggtgggatttcccctaatcatttatatccttctggtgtccacaaggagtgagacctaaattcccaattagataggctttatgaaattttaaaagtaaatgtatatattagagttagtttaggagaaaggagagaagagtaaaagaagatgggtaaagattcatatttgtccttaaagattcaagcttctggatgccacaaatattttgattaatggggacctcaagaataattttgctcaccactgtcccaatgcttgccccccgtccacaatatttctgtccagtgaatgcattgtattttcttttctccagtttctgttggaatacccgtatctgataggaaacacacgtctgaaggcatgcagtgaggatgttgatttcccttgccttttcttatcatttattaatagattcagaaacaatttactgaatgtttgctctttgctagagacctggttcttgctaagaaatgcgacttttcatatgagacagtcttgctcttggaatttgcttgtatagtcaccacactatccatgaacacttagacccctgtttataataattttaaaaatcctaaagacaactgattagaaaagtcacttcatccaggttgggccactcagatcccttcttctatgaggtaaacttgagtcccagagcccctccttattctctttgcggtccccgagtgaaatgctcatgtaaaatttaatctgggtagccatatctgaaataagtgaaaggtaggctgagaaggccatgcttctaagaaaaagtaataaagcagactcctagagagaaacaacaatgattgaccacgtggcaccagagacgatggagactgttatctaccctttcagcctgaggtggtttccctctagttattggcatttgcttctcaagagatcttctccttaagttccggagatactatcttattcttccttccccagtcctcctgcaattgtctggctagtctgagagtgtttgtatctacaactcaatgatttctgcctaggtctttgttattcaggtagccacaggaacagactcttttgacacatctgaaaagatatgtccatggccgcttctctgtgggaggaaagtaaagggctctacttttctcagagaggttatttattt

SEQ ID NO: 1882651 - DNA, 4001 bp, Homo sapiens; identical to SEQ ID NO: 586277

SEQ ID NO: 1882652 - DNA, 4001 bp, Homo sapiens; identical to SEQ ID NO: 586282

SEQ ID NO: 1882653 - DNA, 4001 bp, Homo sapiens; identical to SEQ ID NO: 586294

SEQ ID NO: 1882654 - DNA, 4001 bp, Homo sapiens
ttttttttttttttttttaaatttttgagacagggtctcgctctatcacccaggctagtgtgcagtggcataatcttggctcactgtaacctctgcctcccaggctcaagcaatctttttgtgtaagcttcctgaggagctggaaccacaggtgtgcaccactacgcccaactaattttttggggggcgggtcaaatgaagcatgttatttcatttcacaaagactgtacaaaattccttataaaacatggggtagatgccacctggttacctcactcggcccccatccaactctgtatgagggggcaggtgagggtggaaagtgtgtagatggaatagcattatgtacaacgcaggggttgaagtgataggtacaagttctttcatatttactgtttcacatattcacaggtatatagagaagcagcaggaaggagtgaactctggctctgttctcttttataaaaaagcaccaatgtcctggactggacactcactgctataaaagatgcagggaggcccagggcctggtggtcacggactgatatcctgactggagtcccacaacttgttgggtggctcagcccaaaggcgggagaagaaaggatgctgaagggcttcacccaaggtcagccgctgagctggttcatactctagcatgctttcaatcagatcgaagagctggtggtcttcctctgcctctgaggtcagatactgccgcagcggtttgcagttctcacgaacatagcgtccagctgatgtgttctcatcccaatccaggcgaccccggtaaaaatatttctgttttcttgtctttcggatcatccgggaagggataggacccaagatcctttccatcgtggctagatgctgtctgttgtcatgggtctggaagagggtgaagcccacatagtactcaaagatgatgcagcctatactccacacatcacaaggctgtgaccaacccaactcaaggatgacttctggtgctcggtaatggcgagtggagacaatggtgctatggtgctcatggtcaaaggtggcactgccaaagtctcccacccgcacagctgtgctcttcacactgcgctcatgtcgcttcttctctaggttgtaggtgagctcatagtctgaattcacaaacagaatattttcaggcttgaggtctgtatgtgtcagcttgttatcatggaggaacttgacagcctggcacagctgggaggccatgtggtgcacttggtggatggggtagggcaggtggttgttgtctttgaggaaatcgaaggtgctaaggcccagaagctccaaggagatacacatgtggccatggtagtcgaaccagtcaaacatctggacacagaggttcttgccagggtctttctcgttgattttctccagcactttgatctcaagtcgagctgcttccttatacttctccacattcttaatgatcttcagggcaactcgagccccacgcctgcgatggtcaacacattgtacaactcggccgaaggtcccctttcctaaggtgctgacgatttcatatcgctcttgtagccagtccccgacatggtagatgaggtggccctcagtgtcgtcctctacactcttggctttccggctgctgtgctgcgaagacgagcggctaaatgtccggctgcacctcctccggacatggtagctgtcctctcgccggcgccgtcgtgtccggtcactactacttgaccaggaacggcttcttcgttgcttgttttcggctccgatagtgttcacagtaactcccccggctgcctcgctctgaggaatggtaccttcgaggatgaggcatctttctggcggccaggcccgtgcgcttgtcccacaggaagtccatgatggcggcggcactgcggccggagtcccagcacccccgcggcgatgaagtgctgctccacccccaccaacccgggaccctgggacctccagccccgttctcgggctctgcttcagtcccgcccgcctctccttaactgtcggcctgtttccagtattggcgttttcaaaaactctgatgtaacaatcagtagtcctgggtatctggattcactttgggggttgctaaagcaacatgttcttcaaaggaaccgaataactgatttaaggtgaagcaagtaaaaacaatttaggtgaagttttttttttttttttaacttttggaaacactctgcaaaatatatttagaagctgaattaccatgcgattggtaatttggccataatttgacttagcacattgtggaaaagaataggaaatcgtcaggcgaagtcattaaattctgaagctcccaggggatcagctttagtgccctctgtaaattatctgggagggagaatatgcaaacaataagaaaaatattaaacttcagtacagtactttagtttcaaagtacttttctacatatttcaggtccaaaaaacattatgtaaacaaattgtttgggtaccacccccctcccttctcagtgctctttcaacaaaccccaccctctccccaaagtcttcctcctgttcagaggcattcttgacagtcagataaatgaatgatcctgaaatcggattcaaattttaggagactgatctcagctcagtattctctcctatcacacctgtggtttgctgctgtccattttacttcttccccccgacaccgcctagatgtagtcttgctctgtcgccaaagctggagtgcagtggctgaatctcgactcactgcaacctctgccttctaggttcaagcaattctcctgcctcagcctcctgagtagctgggattacaggcatgagccaccacgcccggctattttttttttttttttcagtagagacggggtttcaccatgttggccaggctggtctcgatctcctgacctcgtgatttgcctgccttggcctcccaaagtgctggaattacaggcgtgagccaccgcgtccagccccattgtacctccatgagagcctagtcttgcttttaggcagcaactaaactaacaactaatttttgtattattatttttttttgagatggagtctcactctgtcttccaggctggagtgcagtggcgccatcttggctcactgcaatctcttcctcctgggttcaagcaattctctgccttagcctcttgagtagctgggattacaggcacccaccaccactcctggattttttttttttttttgtatttttagtagagatggggtttcaccatcttggcctggctggtcttgagctcctgactttgtgatccacccacctcagcttctcaaagtgctgggattacaggcttgagccactgtgcctggcctaattttggtatttttagtagagatgagatttcaccatattgtccaggctggtctcgaacttctggcctcaagtgatcctcctgcctgggtctcccaaagtatgaggattaaaagcgtgagtcaccatgcccagcccttatttatttatttatttattttgagacagagtcttgctccatcacccagtctagagtgcactggcatgattctcagctcactgcaacctctgcctcccaggttcaaatgattctcctgcctcagcctcctgagtagctggggattacaggtatctgacagcatgcccagctaattttttgtatttttaatggaaacggggtttcaccatgttggccaggctggccttgaactcctgacctcaggtgatcagcccacctcccttacttaacttcttacttgtccttgtctctctttcctactgttctgctccaaacttcaaattctcagaaaagagcctcctctgccttcagtaaagagccactgtttccccacgaggttagtccggagttcttttcatgggctcaggaaatctgaggaatacttcaggactgagctgtgtcatattctgccttataaataagaatgtaggctgaacatggtggctcacgtgtgtaatcccagaactttcagaggctgagg

SEQ ID NO: 1882655 - DNA, 4001 bp, Homo sapiens; identical to SEQ ID NO: 586308

SEQ ID NO: 1882656 - DNA, 4001 bp, Homo sapiens
aattttacctgtcacctcaaggtcttaaacatcaatatgtctcatttcagaaaaataatatttttccttataatcgcagtgaaaaaacagaaattcttggtttgatttccttcaacttgaaaacagtatagcataatagaagggaatatgggtttgatagacagatgaggatttgaatgctggccctgctacatactgactgtgtaatcgtggacaaattatttgatctcttaggactgttataggatgaaatgaaatgaaatgaaatgaaatgaaatgaaataataggtaagttgcttcacatggtgccagacacatagaaccttttggtgtttaattctagaattatccactttcttcctttatcctctctaaaatcaagtcttccagagttcaaaagacacataccctctaatctcttccagaaagttgttccatcaattattcctttctttgatctatctttaatctttcctactcccctttactttataaatgtataaaaatctaccctatctgaaaaaatttgctttaacccaacatcaatatattaccataacaccttctcgcaaaggttgggcaatttcttgaaagactatggacatcctaagtctctatgtaactagtcctacttattatctttcgtcctcccagaatttgtcctttacctaaaaagttttagaaaagcctttaaggcaacattccttctaagcattcattctctttcagcagctctgtttcccctgaatatttattgcacccgtaacaatatatattatatacacaacattctaccaattattccccatgtttgacctttttaatgcaactaccaacttaactttttattccactacctattcaaaaccattctaatctttatattgcttttatttatcaggttttattgcatcatatttcttgttatctggaaccatttcaacaaatattaataacttattttaaaacagtctttaatagaaaatattcatactaagatcagctgtaacagtacatgtatgtgagtttattttctctgattttcattggaaatattgcctgccatataatgattcataattattttaatttcttgactttctgcctacacttccttaaagtgccatcttaagctactgtagttgcccttccattattttttgttcagtattaaccatattaacttggcattctgtactaaaaacacaacttcagttaagtaagatttgcctcagagttttttactttaactcacctccactcacccactgggatccatattattaggctcagtgaagctttgcattcttctaagccaagcatttaatctgaattttaactcaaatactaaaaaaagcagtattggtagaacatttgattcagccaccctttccccttcctttatcactagaatttgcttcagtctggctttaaaatcaatattcctgcagtctaacccattgaaagatctgccaggattctcagtctgagatttccttatttacccactcatttgtcacatacccagtctgccattcctcaaactcactgaaatttccctcatttcctttcaagccatctttctaacctatttgataccccttttctaccccatcatcttcaatgtctctaatttttgttgctgacttgacttaaatgatcctatctctacagaatgcaacttaatcatggtgtacccactcatttctgccttttgccttaggggaaaaacaaaacaaaaccctgctctattggtaacgcccagtctttgttcatctgtccttgaaattgattcacaatgtgaatatgtataagcttcctcatgacccacctccagtgttcaaaacacttccttcctgttctcttggtgtccaacatacttacctgcatccttagctagtagaactgacattctgaggattgctgatgaagctcatccttcagactccgcttcataaacctatctctatatgggaccgtttattctcctgactctaagcattcatcaagtgtttccctcaaggagctttaaggaagccaccaaattccctaatgacaagttctttctatatagttttcctctttgccattattccatactgtggatcaaggggcaacaatacccaccctaccaactctgacattcctaaatcccaaagtggtttaaactgtatactgtccccttaatttcaatcttgttaaacagagtaatacttccttctcattttggctctgctaattttgttggagaccacattaaacacatagtaacctatgtccaacccccacacttgcaaattttacattgttaattgtttgctttcaaaatcctgaccttcagtgattgccaacactgccttccatatcagttggggttgctttaccatcaccctctataaggtttcttctttttctgttttcctattcaatgaagtagttaccatgacaggtaaagtgttgttaccccactcgcttgtcgtctaggatttaacttctattccctaaaatgctcctacactcagccatgataccgaacataccactgacttgcccctgagatttgccagtgcccccactttgggaactctgcattccaccttcccctattccatgtcagcccttttactgatgctaagccctgcacaaattcataaggttatctcccctcctacctgcctcctgtcccttcttttaccataaacttccgtcatcaaatttacatcccaataactgccttagaatggctgccagactctctcattccatgtggtatgccagtgtaaatttgcacagtctacacacagtgttgcctcccactgtcatcttccagaaactccttttcatcttcaacatccagtcctgcatgccctgccacctccaagtcaatccacagactcaggaatctgtcctgaactctgaccccttcctgccctgccccccactgatgacaccactgccagcttccatgtcctcaacctgctgtactgagtccatctgctgtctcagttcacccctaaccgtcctgtattctcagttctgcctctaaggaacagtggtttcctctctctgttgtgtcctctggccttccatcgtctcgccatgccctttattgacacacggtcctcaatgtttccaaggtgccaacacctctacaccctgtttctgtggcctcatctcacctctccttcattccttccgtgtcttacccacaccatgctttctcctccatgacctgcatcaaacacttcacccctttggggcaaaaaggaggattctctacgttcacacccacactcttgctcttggcatgcctcccttgctgcagtacattccctgatcctctcaacaagctcacctccgtaagctgctggcctccataacctgctccaactcattcttcttgcccattggggaacacctctcctctgtcctgctctcccatatgctgcaaactcaccctctgctctcccagctcccagctcctgggcccaggttggtcgtttctcctgctttcctcctctactgcatagcacggtactgtcccacctgcaccatgctgcgttctctcagcaccacctgcgattctgccactggcctaattcgtgttctcaggtgtgtcctcccttcttgacctggccccgcacccactgctccaccagatgcagtcctctctgtgtcacacgtactgcactgaatccacacgctctgctgtccaagctcacgtcccagtggcccaggctatgagtcctttccagggccccacaaccctgactcccctaaaccttcctgattcttttctcatcctttctttcacactgtgtaaaaacactctggggaacatctgcctctgaatctcctaccttgttcctatcaccatagcaattttgtctttgtcactcactcgtgtctcgctctctgcccgtcctcatctcccaccccatacacacccagtctcaacctgactctcctgccctgcctgagactcagctcctctgctcctc

SEQ ID NO: 1882657 - DNA, 4001 bp, Homo sapiens; identical to SEQ ID NO: 586325

SEQ ID NO: 1882658 - DNA, 4001 bp, Homo sapiens; identical to SEQ ID NO: 586349

SEQ ID NO: 1882659 - DNA, 4001 bp, Homo sapiens; identical to SEQ ID NO: 586350

SEQ ID NO: 1882660 - DNA, 4001 bp, Homo sapiens
ttccatatataaatatataaatatatatttatatatatcacagtttctttcttttttttttttttttttttgagacagagttttgctcttgttgcccaggctggagtacagtgacgcaatctcggctcactgcaacctttgcctcccaggttcaagtgattctcctgcctcagcctcccgagtagctgggattaaaggcgtctgccaccacgtccggctaatattttgtatttttagtagagacgaggtttcatcatgttggtgaggctggtctcgaactcttgacctcaggtgatcctcccgcctcggcctcccaaagtgcagggattacaggcgtgagccaccgcgactggacggaagaaacggtgaaacttttaaggtggtagaattataggatctgatgactgattagatgaagcatggagagggcaacagtgtgcacagtgatgccttttcttcacaggcattataggagggacaggttggtaggaggaggcaacgggtttagttttggatttactgaccggggatgagtgttagctctctaggtagaggtgttccgcaggcaactggtgttgcgggacaaatcatagacgggagagaccgagcagagttcaggagagcctttattattaaggtgatcaccggctcagtcggactagggtccagaaagtctgagccccgaacaaagggatcaatcaccttttaagcagtttgtgttgggagttacgtgttgcatgaagtgtacttgcagaagcaagaacaaaggcagtaaattactcttacatttgttacaccatatgtcttacgtccttgggaatacatgcttttgtaacacttgctaatcagttttgtgactttacagcagcgctagggagggaagcaagaactcgctgtgcctcaaggaatgtgaaacgatggaacacagataagcctctccacgcataggggagaaataagcagttaatatactcttaacccaggccttgggtaggggaggtgctatattacattctacctcaaaggaaaagaatatacttcttgattagtatacttataaaattcattaatttccctttcactggatattcctactaattcccccagggccttgcagttttgtctcattcgctgctctatcccctagcttagcacaaaacctagttcttaacattgattaaataaatgaatccggtcaggtgctcccgtgggtgatctggaaggagttaaatttggtagtcatgggagacgcttctgtgaagccataggagcgaagattgattgtggcggcaggactgaactcagcttctgaatctttctagccgctaaacctacagactaagtggcgtccttggggaatgctgcctcaaacggctcgcgacgtcctaaaacatgtacatttattttggaaaatctgttttcgtaaaacctagcatacttaatcaccaacatttgttaacttcatggtggcatattaatacctgtcaggttgattttagttggagtgggacggggctgacctcaccgtcctacccttcggtatgaggccggcgtcttcacgacctcgcttttcacaaccccagtccccgagggcttatttggggctgtcggagtccccaagacgtggccccggagaagggtgaggtgccacagttcgaggtgccccagtaccctgcgtccggacagggggcggtgctcacgcccaaggccccgctgacgcgatgtaggccgagatcacctcaggcgctcgcggtgcaatcacagagcgcgccgtcgccgctcgagctcgccctgagatccctccgctcagcgccttcaacgccgtgtcccggcaccccgcacccgggcacacaaaaaacgggtcgcccgcgattctcagggattgatcgcctcttcaggtaagttatcttccggccccgtaccactgtgccacaggcgcagcccgcttcctcaggtgccctatcccgcgcaagaagaccacggcttcacagagtgttatttaaggggcgtggccagcggaacatcccgccccattctgtgacgcacggggtggcgcgcgtgggacccgaggggtggggctgggtttagtaggagacctggggcaaggccccctgtggacgaccatctgccagcttctctcgttccgtcgattgggaggagcggtggcgacctcggccttcagtgtttccgacggagtgaatggcggcggcggctgggatgctgctgctgggcttgctgcaggcgggtgggtcggtgctgggccaggcgatggagaaggtgacaggcggcaacctcttgtccatgctgctgatcgcctgcgccttcaccctcagcctggtctacctgatccgtctggccgccggccacctggtccagctgcccgcaggggtggtacgtacattctttagggtctgagtggggcgcgcgccgcagctgaggcggccgaagggctggcgtgggcggctccgtggccccgaccggctcagtggatggcaagggcgggggcgactgcggccatgcttggcgtggctttggtggcaggcgcgctgggggctggagtagtggctgcggcggcggcactgctgctggtggcgctggctgtagcacccgccattgccttgtgttggggggcggtgctggcctccccggctgtgtatctgatcctagacggggtcgtggttgcggcatttgtggttgtagcggtctgtactgaccgcagcagtggtgcccctagtggcggtggctggattggcggctgtgggtttgaacgacccggtggtcgttggggcccttggtgggggtcctgacggagatgctgttggcagctggcccgtcatcctggaggctgccctgtgtggttcagtgttctgtgggctgtagcagtgcccctaatggtggtttatacccatattaaggaggatgtgtagagtgtggtaatggtagtgactggagtgtggtaagggccttcctctgatgctaataatgtaacagtttctcggccgggagcagtggctcacgcctgtaatcccagcacttcgggaggccgaagcgggcggatcacctgaggtcaggagttccagaccagcctgaacaacatggagaaaccccatctctactaaaatacaacaaaacaaaacaaaaattagctggatgtggtggcacacgcctgtagtcccagctgcttgggaagctgaggcccgagaatcacttgaacctaggaggcggaggttgcagtaaaccgagattgcgccactggactccagtctgggcgacagaatgagactccgtctcaaaaaaaaaaaaaatcattttcttcaatttaacagccttattaacctagctttcaatctcccaaatgttatttgattgtgccttttacagtcagcaataagtagcttttgaaaactacccttttactgacaatgcaatgtacaaacttttgaccaagtagcttttaaaataatttttgtttgaaccataccaggcataagaaagagttatttatttatttatttttttcctacacatgggatctttaaggaaatgatatttgtctctgggaagacaaagttacttttagtgtttaaagatagttctattagctgaggtgtactgtgaggttgtggtgctcctttctatttgagaccaccagagaattgaggagtattaccctttttcattattttgtttgattttcaggatacttaatgttgtaatctgcaggtctcattttgtggcatctaaagaaacttttatgaagaatgctagagttcttgctagagctgatctactctcttaaaaactctaaaatcagtggctctagttcacttgcagtgagagaagcatgagattgattgtttactgagaagtaaatatagcttcttaaacatttcccttctttctatactacaagttactgcttgtctttttctataccttctttaagcaagtatctgggactaaaattgtgagtagtagtagtagtaagtagtgaagaaaca

SEQ ID NO: 1882661 - DNA, 4001 bp, Homo sapiens
gttagttattgtgggccacgtcactctttttcagggacttcaattttccacagattgggtacctcttccatgatttctctcttcctttcgatatttcccttttttgttatcttctatattttaggaagcttttcatggttttctccacatgattatgtgattatggacctggtgtggtggctcacgcctgtaatcccaacactttgggaggccaaggcgggtggatcatttgaggtaggagtttaagaccagcctggccaacatggtgaaatcccatctctactaaaaatacaaaacttagctggacatggtggcatgtgcctgtaatcccagctactcaggaggttgaggcaggagaatcatttgaacccaggaggtggatgttgaggtgagctgagatcatgccactgcactccagtcggggtgacagagtgagaccctgtctcaaaaaaaaaaaaaaaagtcccctttccacctagatactggacattcatggtaaaaatgaaaagacacaggagctttcttgtcatattccctgtgttatttcagtatctacatgtgaatatatgtatacagacaaaattgaaatgatactacgcatatggattttctgcatggtgctttccttatcattttattgtgagcatttcccactatttaaatattgtttgaaaaaagtattactccatgattttctatgatgcatcacaatctatataaatatataaataatacctaagatatttgtgttgcatcaaattttccattcttataaaaaaaattttggaggacaccctttaggatgaagtgcaacaatcttccaagatgatcaccttcctcctaggactctcctggctgtattcatgtttaacattcatgctccccactaaatccaaatggaacaaaacaaaaattgaagcatttctaggtcattgcatcttataacaaaaacaatttcatattcaattttttcagcagatgattcctctaattatatactcctcaaaaaaatcttatcaatccctcataatataagctgtgtctattataataagagctacttttcattgaatagcaattatgagcttggctatgttttagcctatgtcttgtgctttgtgttattgtcttcatcctcaaagtatttatgaagattgattggattatggacaatctttttcatggatgaggatattgagtcccagaaagttagtagaacatgcatagcagcaaaagtgaattaaagccaaggctagtaggaaagacaaccagagttatgactgttacaccagctcatccctgaccataggcttgggttggtgtccagagatgtgcatgctactatgggctgcattttcgtttcattaaagacaacctcatttttgagagaccatacaagtctttagcatttgggtaggaatattcctggcatctctcagcccccgctttaacacaatcttcctgtgagcccaatccactcagtttttttctggatgaaaggaagaaatgggatctgtgtttgccaccggaagctcacccttctcagcagacaaggctgattgtctgtaattggtgaggccccaaagagcacaggagcctggtgacagcctgtgagccagcctgcattattgatcccctcagagctgtaatcacagctgtgggcgtcagcgcagtgatgcgtgtctgagtcaaatggcaaactgttgttgtgaggctggacaaatgtggtctgggaaaatggtctcttaattgggttttaaagttcttgtggaagaaaagacaattttttgcttcgaaaaaaactgaagatgaaaggacatttctgctcacggcatcagcagccagaagcgtcagaccttaccagcatcccctcctacctcctgagcaggcttgccatggcaacctttgtctgctgctatcgcacagagccatcgttcctgctctgtaccacatgtcaccctccccgtgcttctctccgcgaagatctgctgccagcaaagtgcagagagctccacctgacatcatgcttgaggccaccaggccaccctggtggcatcggggtggtgtggttctagatgtgctactgacgatttgctccttcaggcttttaaaacatcattttgttgacttaagaaggtgaattttctcttaggacatgaactaagctcccccatccccccccagagaaaagccataatgagttgtcatggtgattcaggtgattcatggtgactcatttcattagaatgttcagagaatgaacacctgcgttccaacgcttcaagcagagggtagaatttagccggggaagctgcagtcacgcctgcttgtcaagcatcagaacagggaattgtgccttccaccaggcttttcatgttacatttccaatgagaatgggtgggacatgacaaacaaaatgtgtgtgggggcagatagggggacaggaggaaatcagggacaggaatgatggggtacataggagaagtgtaagtaaggtacaatgcctgctctcagggagcctgggtttcctgggatggctgatttagctttgccagccaaaattggtttctccccttctctctcctctggccaaggtttgtaaacctggcctaaaacaatgtctaaaatcattgctcatgaaaatatagcctgaaggaaataaagtacccattttagatgctgaattaagagacgcatatatctgtatatttgaacccatccattagtgctacagaaacatgaataaatgtatttatctttcaatattactgtcccaccaaaggatgtgggttggctcaaaagaataagtaaaagtagtgtcaaggcaaagtcaaaatgagaaatcagggtcaatgaagagagcatcaaatgttaagaagagaggttagcatttctacttaattattttattatatatttctctgtaaaaacctatcatgttataaactttttcagagtcaacaagaacctaccttcttttatttgccctttctaatgtcctttcatactggtcggtagatgggtttcttctacgacttacttaagagggaaggtgctcgctgcccctacctttctaggcccatggcaccctaaaaagcgcaggcgtgggctcactcctaaccgtgccctacctagctgctgatttggggcaagttagtgaacctctctgcacatctgtttccccacctgaagatgataaaacacaaaaatgggattatttttacaacttaaatgggataacatagcaggccctgaatccattagtttgccaggggttccctaacaaaataccactgactgggtggatcgaagaagaatttcttttctcacagtcccgaaggctgcaagtccaaaatcaaagtgtccacagggttggttctcctggggcctctctcctgggcttgcagatggccaccttctccctgtgtcctcacatggtcttccctctgtgcacccacatgtctgggggccacatttccccttctttttatttatttatttttttgagactgggtctcactctgtcgcccaggctggagtgcagtgttgtaattgcggctcactgcaacctccgcctcccaggctcaagtcatcctcccacctcagcctctcgagtagctgggactaccaggcacgccaccatgcctggctaatttttgtatttttatagatacagggtttcggtatgttgcccaggctggtctcgaactccggggctcaagtgatcgaccctcctctgcctcccaaagtgctgggattataggcaaatttcatattatcagaaacatgtcagattggattagagcccagccatgtgaccccattttcttttaattacctctctaaaaagcctatctccaaatatggtcacatctgaggtcctgggggttagggcttcaacacatgaatttttggggacacaattcagcccgtgtcattaggaatcaaaagaaaccctttaaggcatctcttagtctcaaggaaaatgcacccctatttta

SEQ ID NO: 1882662 - DNA, 4001 bp, Homo sapiens
tcaagaaacattgcttataggatttctgcctttgtgaagttaaagacactaatttagatttaaaaccttgcaatattaaatgattttcttggtattagaaaattttgtccatcctgtgtttagtgctccaaaatgctgatcacttttccacttgattaactttctaataaagtttcgaactttatttgtttgtttatttatttatttatttatttatttatttatttatttattttgagacaaagtctagctctgtcaccaggctggagtgcagtggtgcaatcttggctcactgcaacctctgcctcccaggttcaagcaattctcctgcctcagcctcccgagtatctaagactacaggcacgcaccaccatgcccagctaatttttgtatttttagtagagactgggtttcgctatgttggccaggatggtctcgatcttccgacctcatgatctgcctgcctcggcctcccaaattgctgggattacaggcataagtcatcgcccctggctttttttttttttttttagtttcaaactttctaataattacttaacactccttattttttctataccagacagttgatttctgtgatcattttaaaatcgattaatatcattgtaaatgtatcaatttttcatttaattaatctctgtgtacacagtgaactctttggtattaaatctacatgtatatgtcttgaaattatacctaacacatcattaattatatctaagaattaaccactctgattaatcagattttcatctctttccaccattttgcatttactgcatcattttgtgtgtattaaaatttataattccttttctgtaaacatatttccaatatatgaaatttatgtgatgtacaaatattaatacttaggaggtaccttcagtttgtcatttaggcaaaatcaagtctaatgacacagttttccagttaactttattctttgtcacctatttataatatttaaatttaatgagcccataattatattcatatatacatatacatgtaaatgattactacagtaaagcaatttaacacatgcatgaactcatgtagttttcttttggtgtcaaaacacctaaagtttaccctattcaaaaattactagtatatcatataaaaatagtaactataacctttaaactgtacgttagtactccagtttcatttattttatgtaactgaggtgcatcctcagtgtactgggcacttctcagccttcctggaactgagcctggtgatgtggtcacttttggggagactgttgtcagggcccagccacacacccctgggcagcactgtcccatctcaggattggactttctcagctcccataggggatgctgcctgcagcccaggaagggcagcccccttgtgcaccctgagctcccatggatcctcagcagcccctgcctggccctgcgctccctctgctctcttgccccagcccctcctgagtgtcagccagtaaggaggccctgtctgtcctttcttccctatgcaggctcctgggctaagacctaggtcagatgggaatggggctggtccttccctgaggcctgctcgggaaaggggatggcccctagcctggtctgggccctcaactctcctcattgccttacagtgagacagagctccccctgtctgtgccctggaggtggaggtaagagcctgaccctgccgtatgggagctgctccatagatgggcaacttggtggggggtttgtgatgtggaggccgtggcctgtgggcatgcgtgctgggagtgggagtgacatactgtcactaggagaggccacagttactgctgaatctcaccccaaactctagccctgcaggttttttaccacagccaccaccaagaatcacagtagtgtctcaggagttgctgcccgctgcccaacagggccctacctggaggccaagacccaaccaaagcccagggtgtctgtgccctgggaacagtgtgtcctgtggtcatgaggccaggccaccagtgcccactaatcaggggcttggttctgtcctattctggttccttccagttcagtcccatcagggcccctaaccacgtgacccagcatccaagaatcactccaggaagcctggcagctcagctcactccatcacttcttacctacagcaaaaacgtcagggcatcagacacacagataaatgcctataaatgcttaactggaataaatctaggaacagcaagaaggcacagctgtgagtgagggtcccccatgactgctcttcagggtttaggacaggagcccatttttgcctcctggtgctgcctgcctctcagacagggcaggacacactttcctcactgaaaggacaacaggcctggtccctagccctcctgcccatccctgcaagcatcaccttgctgggaggaatctgatgccttggcatggtctgcttctaagccaggaacaggaacaccttctggacatcccataggaaggaataaatccagatcagagttcacaacctgagctcttgcccactcttcgtgaaaagggaggcccagtcctaggcagactgaacctctcctgaggaactgtggagccaaagactggaaacttccagaatccttaggctcagatcccctttagagtcaccctaaggtctgtctcaccagagcatcttctgtccacaaatgtctcattgggtctaaaaaggaatcctcacagaggtctggggcccagcacggtcactcctactgaatgtcgagaagacaaaggccaagaacccagggaaacaccaggtctggcccttccactcccagctagagcaggatgcataggccagactgtgtcagaagcccagctacccagatggagggaaagtcaaccccaaaggggcggaaggggtcagtcacacatcctgggcagacagtggcatgggcaacacaggtgagctgtgtgctgatgactttcctggctttggaaatgaagtatctgcagaaaaagactccttcccttccagaatgtctgttttatgacagcagttttgacagtgactcttgtgtctgttctgaggcttggccctgctctatagaaaatggagcaggccaagatgtcctctgaacatgcaccagaatgacctagatgtgagccacaccttcacaagccatgccatgttcagagagcgctgcagcatcaagtaaggcgtgtggggcatggagggtgccaggggaggtgggcaatccgcagggatggggcatctgaggggcagtggggaggtctcaggacaggggtagggtctcagagaagagggtgacagcccagcctactgcctagagatctggccttgggaagggtctgcagaggggcctggaagagtgaggttttcagggcagtccaggggattctgaacacctctgctccttccttgaagacaagcaaatgttgtgcacccagattgccaccttaaactgactcctacagtgcttgcttgatgggacaagtgtgcacaggagacccagtccagggaccctgcccaggagtctggctcctccagaaggacccagctcccctcctctgcacaggaggcagaggcagatccctgcagggcacacaaaccatgccctgcctgagagggggcatcacacggctggggctgggactcagggccagcatcctgggcagactgggccaggactcatcttgggagagcactcagggagccccctctttcaggggtcacatttgatggatatgagaacacccccataaggagctgcaggaccttatctgatccagcctcctgggggaggtctcatcccatgcagagggggcccccagcaccacagactgaggccccagtaggccctgctcaggccaccagccctccaccgtgaagggccaggtcctcccatgcctgctgttcccacaaacccctacgtcaagctcatcacaagctcatcctcaggctctggtacatctgccttctgcagggcaagtgca

SEQ ID NO: 1882663 - DNA, 4001 bp, Homo sapiens
tgcctatccagtctaccaatcatttcataagctgaatctggtactttcttcaccatcatcagtgacaccaatgagtccaccttgttgggtaggatcttgtgcaaagtgtagctgtcatttcttagaaccaccaaggaactgggtgtcacatcactgatgctgatatttttgtccacatctatgacaaacttgtccttgagatgcaccttgaccaacactttcttcttacccatggcctggactacttccctgacacaggagtcctattcctgcagcagctgtagctcctcctgtaataggcacactttaacatttagttcattcccgtgcacctgccgcctccagaggttttgggtcttatcattcaaaatcagctgcaaatgcacctggagttcagaactgttccttgtggctttcccccatccaatttatattgcagttgaccctggagttcttcaatcttggacagataatactggcagagtccactgcctgccttttcctcctccagctccatctgctgtggtccgtcaagcgccatcttgtcttttcagcagagaacgctggcatctgcttccctccccaaaacttaacagctgtccaatcatatttaaattacaatatttacatataggttttacatcagaaatgtcaaagtacatcttttactaacggttaatgtaacaaagaaagacttctttacccattactaatacaagcattattacttaatatagaattttcattaataatcttaaattcaattttgtgggaatggatatacaaaaataaagaagccataacattaattcatggtatttttcagcattcagttatttcttagttttattgcaattcattgtcaacttctagatagaagggagaatatgacaaatttccttgaaagcactcttctcttattttctacttctaaatagtgggataatttagcaagatcatttgggagttttatttattaaaatatgaataatgagtttttccatttcagtttagaatatactaatacaagtttttcctaatacgttttctctgtcttgtgattgatgcttttgatatcttatttaacaggaaaatacctaagagagaaaattaaggtgttacaaaaagagttgtggaaaccatgaataaagcaatagagccacgattttcaatgaaactcacataaacagttattataaagaaagaaaatgtaataggctagtgtaataaacaacagtatcaccagattccaaaatctcttttgactctgtaagggtctgctaactgtattatatgcacctaggtactcaaaatgctactaataatcaaaccgtttgaaattttggtaccagaattaccagtaacaggatatcagcagaacttaagtttatcaaacataaatcattagtacctaccaatttcaatctactaagtcagaaaaggaaggcatgagaatttagtaataggagaactttgtcatttccagtgccaagactaggggtcctgacaggtacctcactgtacaggtcagagctaagaaacacaatgttggttcatgtacaacactggttcatagaaaacacaattttatcacttaaaacttttcatttatttctgggatgtttgtttatgccatgctgttctttgtctctccataaatgagcaaccaaaaatctctcttattattagccattggtctaaaattaatgatagcttaaatatctaaaaataaaccaagccccttctaagtacagtaatgttgcactttcaaccaaaactaagtattaatgtatctggtttccttcaatgcctttcattttccacagagaatcaggtgactttggagactgtgtgtttcacatttaatacaggaattatatgatttaaaaagaatattcagtttcccagtttaagcaagtcattcacaaaatatgatactcaaagtattgtttggataagttactacctagaaagatttaccagctatttttttaatatgaatcactactacaagtataccatgtagcaatttcctctaaagaaaaccaagcaatttaattttagaatgaaatgatctgggaagaaaagaaaagtagatagtaaaacagagaatttagctactgttatttacaacatagcaaagaaaaaatcagaagttacacacttcagaaaaaaaggaataggccaaagacaaatgttggcatgctagaattttttttttaaactaagaaaatacctgtacaagaacaagggacactgaacaagggcacttcacatttaaccacccattgccaacagatattgagttcacctcagggtaagaaaatggtccaaatgaactagaagacttccagcaagtaacaaactatactcatatttaataagcaccatttacctctatgtagttttatatagttctcagcaatgtgatttatatgagcgcttcctctatggaagaataagatgatttggatattactatcaatgcacagtacggatgccaattagatggtaaattcaattattcttaaattttaaaacaacaagtttcatgctttgttcaaatacagcttattttttgaaaaattcccctcttccactctcctaacttggtacataaagttaggtaatatttacattgaatttacagtctttttcatttaaaacagtatcagtatatcttgctgtaagatattaatttaagtgattgttgttaacttcactatacccaaacttagcaatatggctgtgagtcaaataaactttgaaaaggaacctgccattttcattaactcattctgactgtaatctttgaaatacatatggcagatacgctgaggctggcccgtcattttggggctacattttagtaaagtagctagtgagtgaaaactgaaataattatacaacatttaagagaaatataagtcttgcactaagaaaccaaaacctacatattatgtaacataacctttttaatgttgtttttgctaacacaaaaaaagttataccattatttatatttcaatcacaacattgctctaaaacacaatctataatccgtcttgtaaccagatctgaaaaacacatattcagactattcttagtttgtatctctggcaaaaagccaaagtaaaacggaataattttactttctcctaaacattctggcaagggggggaaaaaaaagccagatcaaagtaagatgaggattcaaaattggcaataaatccattatggacaaacagtggcactaaagtgaaatttcagaacatattgctttctatatatgcacgtgtgatcttatttgaacgtgagtatttacaaagattctagaaagctaaaaccaacttggtaacctaggctttcaatctttattgtgtcccccataataattagttgtcagaagtttcagcttagtatttaaatatctattgtgattttatatcttacttatactattcagtgtttgcaaaatagatttacgaatattttaagtgacattatatagaacattacttgtattttccagaataacgactttgactttgaataaaaactggagcatttgggctttaaaaacatttttcccccaatttctaagttgctctttttaggaagtcactgatagagatggaatttaaagtaaaaatgccaactttgtaaattttgtcaaaaaagggattgctataaacagacttaagtgaatactgttccagacaaatataatcatcaagtagcacttgacactgacaaaacactgaactttctttaaaaccataggagcttctattgtagcaaatgcagcacagaaccttatgacaaagaggggctaaaaagtgaatttaagccaatataggttaaaaagtaaacaagtgaactattaaattggcgcaaaagtaatagcagtttttgcaatgacttttgcattaacctatcagaaaatcaacttccaggagaatacagttaatccccacagctgtaataaatctcttccttta

SEQ ID NO: 1882664 - DNA, 4001 bp, Homo sapiens
ttaaggtttttatccacaagaaggtttttttccattctcttaaatgcagccataattagagtaatttttcatgtagcccgctgattacagcgtttttaccgtcaaagataattacctgtaattttcttccacttttaatactaaaaagccatctttatttagattcaggaacaggaaaggcgaaacaaaagagggaaattattctgttattcatacacaaattgcagagacgtaggacctaaaattgaaaattaaccaaaattataatgctgaaaagaatggaagaggctgcagaagtacagctggtagtggggctttgctgaattattcaaattacgttagggagaatgctaccatacatcgaaaccaacactaatttttcgttaaaaaaaattcaccagatgcatgccaaaccactgtgagtgcataacattctgaaacccggcaaatgcatgttgacatattcgaggtgttgtcatgatgcatttgtatctatctctttatctcttaacaggagtttaattaaacaagaaattctgccaagtagtcccccccaccccagactgcccttggaactgggctttctctggatcctctgaaccttaagggttaatatttttactctttagaatgtattgaccctatggtaagcggattcccgagggagggattggtaggaggggcgtgggcgaaaggcatcgcccagtggtggtgcctacgacgcctccccacgttcggacttctccagaggttgcagagttcgagctgtggagcctagttctgaccgtatttcctatttaaaaagagataaagtgggggagagagagaacaatagctgggggtggggtagaggagggaggggatgaagagaacgatttctctttggcaccaataaacatctcattatcttttgacacaacttagtcaaaaggtttctgccgccggagaaaggcctttttgcactggaatggaaaaccaaagatttctcaggcacttaacatctctagttgcttacaatgtctacacggtcaggaaacagagtcatctatagatagaacagcaccgcttcttgctggagacttccttggtgcgtccctaaatctgggttttctagctccctagcttggttctgcgtctcagccaatcatgcccctccaaccccaaggtcgcagcgtttgttctcggagggcagtaactccaagatccgcatagcctccccctcccccccgccccaacacaccagcttgaggcaaagaccctgaaaagcagccttgaaggggttcagaggccagttattccggaaaccttcccccaagtggaggaaagatgtcgaaggggcttcaccgtccagagattcatcagactacacctgcctttgcaaatgtccgcatacctgtggttctaaaggagccccgtcgcgagctccgtttgatatcttgtcgcctcaaaatctaaaatcatggccacgtgtaaagacctctctggatttacctaggattagctgtgaataataattttcaaatagattttagcttggaatctccagcagagtctctccacaccttatagaaacatggtacttttcgcaggctccagtcacaagctgcaccaaatacatcaacaacatagaaaacaagaaagacaaatcgaatacttaaggatcccattctcactcgaatcctttcactcaacagaacaacaaccctttttactgttagaggggataaaaggtcagcatagagaaatctataaagcaaagttgtagcccatgataaattacaacggcaacatgtatcttggaaagtgtgagaagagaaataagaactgttccttgaagtatgcaagaaataaaaacttaccctcagtgaatatctcttaagcaatgatcagggtttagaaatctatactgaaccaaagcacaggagaatatttttctgagtctcagggcagaagctctttctctatattcttggttgagtgagcacatccaggtgtgaaattgtttgcacaccccagcacctcttatattgccagcaaaattagctgttattactgtcactgtttagtgatggttagcgtggtacaaaaaaaaaaaaaaaaaaaaaaaaaactgctgtaatcaagacctggcgcatctttgcaaattacagataattgtaaacgtccagattatgataatagcatcctaatccagcctgcaatataattattacagagtgttacatctgaaactgtccagtagggctaattcagccattatttagaccctatttttgcactgcaaatgggttgctgagctgaaaatgtacgattgtaatttcacagggcactcaatgagtaatggtataggaagaggaaaatacaaaagtgaaatgtgaacagtagcgatcaaatcaaaccctgaaggacaaaagactgtttgattcatatggaaaaagaagagcgagaattaagaaaatagcaaatcagtggtctgaagcatttcatgtccaaatcttcaatagtgcagggctgatgtgtttgcaagggctgctgcatctgctgcttgtctggagtctaaaataatttttctttttctttcttttttccaaccccctgtctttttttcccccttctctctccagaaacattttcctgttttaaaaatgtgtccctcccccaaagcaaagaacatttgtcagtttcaccattgtttccacaaaatcgcctgagagtgtgcctgtcacttgtttatgaacattttcttaaatgaatttgctgtctctcttgttatccaagcaaaatgcccttgggcacttgtgtttctgccctctgtcttcattctctttcagcaggaactaagtcatagaatcctaaaggatattagcagaaaacgtattaattgctgctaattaaatatagccggctgggaagctgtcttctccagttggcttggctggctattggttttaatcctatcattaacttttattaattaacattcccccccccccatataaaccagtccagctgctgcttttgctacctgtcaccaatgtgctaaaatgagcaaggtcaatcttattaaaatataggaggaccaaagaaggagggagttagagcaagagagggagagttagagcaagagaggctggagacaggctgggggactatgctggtcccagagtcaaagagctctaggggttcaagctgtttcttccaggaggatgaaccctgccctggtggagggttctggagtctagttctggttcctggtggggacctcctagtcaaagatacctaaagcccatttatccccaggagctcaattttcccaccatgaatacagagaatttcctaggcatcttttctagcctctgggccaatgtgtgtcgactctccctcctcccaccacttcacagacccgggagctgcccaaccagggccaccctgcaggatggcaagcaggtttcctagctcttgtgaatttaagggcaataatgaaatgtcccctgtttagtgacccctgtttatagatgaaagttgagtccatatcctgctcttcctccgcccctcttccctgaccttgcaaatggcaagtggcagaaatagtcctggataacaataagcttccattggcaggtttctgtcttcttggttagcgagagaaaaaaaaagcctttaaaataaatcatagcttgggaactgtttaccacccttcaccctcacccacttcttaaaaaaaaaaaaaacactagactgcatggtgaagatcccacagagaatccttaccgaagctaggagagagggagggtatgtgtgtagaatgatgttataaagccatttttttcccttcctgtggtgaaaggtcgtaatgtgtggtatttcacggttttatataaatcttggtttaggatgtggaacagactcaataatacatgtgcttttggcaaagagactccttcggatcccataaatcagaagtaaataagaagtccaagtgaacaaaagagcaggaacat

SEQ ID NO: 1882665 - DNA, 4001 bp, Homo sapiens; identical to SEQ ID NO: 586370

SEQ ID NO: 1882666 - DNA, 4001 bp, Homo sapiens; identical to SEQ ID NO: 586372

SEQ ID NO: 1882667 - DNA, 4001 bp, Homo sapiens
tcatatttttgtgaattgtctattcttgacttttttttttcttttttttgttttgagacagaatctccctctgtcgcccagtctggagtgcagtggcgcaatctcggctcactgcaacctctgccccccaggttgaagcaattcttctgcctcagcctactgagtagctgggaccacaggagcgcaccaccacacctggctaatttttgtattcttaggatagacggggtttcaccatattggccaggctggtctcgaactcctgaccttgtgatccacccgcctcggcctcccaaagtgctgggattacaggcatgagccaccgcacctggactgttcttgacttttattcattattttacttagggttttattatattcttttttatttgtaagagctatttacgtataacagatactgattctgtgtcatatgtctcctggtttgttatgtctttaattttacatggtgtcagtggagaagtgtgttccttccattatgtccttttttttttttgctaagtttatttcagggaactttattcagatctctttctgattctgttttttggtataagaaaacttaaaagatttgcctgggcagggaatttttatataatgtctgaatttaaagcaattagcatatctgaagaagtgtatgcattttttacaagttctacgttaaaaggagttccaaaaatgaactcacacaggaataaagaaatccatcttatacctcatcctcttggagatactcagacatattacaagagaaaccacgcatctgtcttttagcatataccaaaaagctcgtgaaacctggaatacagctttggagcaatatacacctagataataatagtacttatttatttagttacttcttcactttagaaaattttaagcatatgtacaagtagagagaatagtataatgaacccccatgaggtacccatatccagcttcaactattatcaactcatggtcagtcttacttcaactataccctcaaccacttttgaagcaaatccaaaatactatgtcacttcacctgtcaatatgcttgtaacaccatagtattgatatatcttgttcttgttttagatctgggattcctacttttacctcgcagtcatttttataaaccagttgtgtctgcagttggagatgttcacaccttccaagaagaaaaaggtgttagaaaagtaagtatcagtgtataatcaggtgagaaatgttgcctcttaaagagtatttagttcaaatgattcataaatcagaatgcgcataactggaaatcacacagtgaagaaccagtgaccaaggggtcaagaagcagtcttttctggatgttttgatatttcaaacatgtttgcacattgttttgacctggctctttcaggattcaaaatttctatagatgcaaaaaattatgaaacagatctcttttactaaaaggtttacaccagaatttgacttagaggcatcgtgacatgtatattaaatgtctttaattaaaaactccttgccttgtaattcagaatgatagattgtatcctaaagacacacaaatacttccttgttctggaggcattgtatcaggtttggttttttgttctatttcaggtatggtgacatgcgggtaacaatgggttgtgaaattttcagcatgtggcaaaacctaggtaagtgaggaaaagagaagccacatctactatacagctcctcgctgtaccttgaagtgtacaaatgaagaaaggcaatttaccagtgacaccatgtgaaaccaaatgtctaaatcaataaacatctatagaaagtaattgacactttggcattgaatgaggttacaacaaattctttaaattggtctctaagaaaagtcaccttacctttgtgtgtttcattattaattaacgataaattttataatctagcattgctccaacattacacatatttccagcgatgaggcaacctttcagaatttggaactgtaacaactcaaaatttctagaactctgagttgaagctatgaatcataataaatttaggttaaacttcatgaaacattgacttgaacgtcactactcttaaaaacttgagaccattgtcctatatcataaagagtatagccaaaggattttaaaagcatctgcagttgctaagaaactgttggatccaattttgttaatctgctatagcagatagagtatattattccagaaaattgatggtacagatctggttgcatagaaaacagtaatatttggaaaacaaattgttttaaaattcattggcatagggtccctttctagagatttataagttatttcatttggtatgttaactatgcaggtttttagtattcatttactattactgcatcttaatgctcctctttgatttattaaaatgattgacctatttgagttgaatacgtaatgacctgaaaatatcttttctcttgggcttatccaagtacaacttggagattggaaggatttattttctgtgaatgaaaatagaaccattattgttttacttccactcatgttaacagactgatttttgaccaggatcattacagggtgatttttttttaatagggtatgtatattcctcaaatatacataacaacttgagggagccttggtatatataattaagcccagtgttcaatgcttgctggtgatttcagaaaaaataaaaaataaaaaaaaataatgaagctgggagcaatggctcatgcctgtaatcccagcactttgggagcctggagcgggcagatcacttgaggtcaggagtttgagactagcctggccaacatggtgaaaccctgtctttactaaaaatacaaaaattagccaggcgtggtgggggggtgcctgtaatctcagctacttgggaggctgaggcaggagaatcacttgaacctgggaggtggaggttgcagtgaaccaagatcgctccattgcactccatcagcctgggtgacagagtgagactctgactcaaaaaaaaaaaaaaaagagttatcatcttgaaaacaaccttcaactatgtaaggccagccagaagatatcatggtctgtctttagttgcagctcaaaaatagttttcttatttggagactgctcttcttagtcttcagtgttttcaggtttcattgattctttgtgtccttgtttttcctaaagaagatcaaggcccttgtagtgtccatattgcattcgacattaatttagcaagatgtttttgaaagaatgctgcattgaatctgtttgaatgcacttgtggttgtgtaagctcttttctgggctcaaattatgagagcaggacagattctgttcggttacaagaatgttaaaaaagaatgaccagtttctgttctagatacatctcagcattgccatctatggttatttccacataaacctgtatccaaaccataatagctatgcatttaggcccatgacccttgggctgctaaataaagctgtcacatgtaatctccctaaacatgtcactgtatacttcataaacttttatcctgtattttgtctttcttctaaaatgaaactatttctgcctctctggtttttatgttaaattgcttctctgtttttctcagagatctagagaatatggaaaatttctggagcatatcaatacctataatgcagtattttgttatactgtagcatcagcatccttggaagcttgtaagaaatgcaaaatctctcactccaccttagacctactgaaacacaatctctgggattggggcacagcagtctgttttagcaagttttccaggtgattcttatgtacttagctaaaaactgaaaagcactgctttagtttatcctctttctttgttgttacagccataaagacttagctctagcacaatcctaagacgctgttagaaaaggctcctcctttatactcaacttacagattcccagcatgacgtggttcaagcgtagggtcagcgt

SEQ ID NO: 1882668 - DNA, 4001 bp, Homo sapiens
atatatgcatgccgagacaaacacctaaacaaatgtcacctaggtcattcgcaagcaccatgagagtttctatgtaacaagtatgaacgaatataaatacacactttgaatagctaagattgcctcagattttgtaaaatgtaccttaaaaaagttaagtatatattttaaaaacaactagaagtatttgggaactacaaatgtgatgcatgtaacgaaaagtattaaattttcacgcaaactttaaaattatttctaagacgtatgggtcagagtattagaaaaattttccatcaaaaattctgaaattctagaaagaatgtgaactcttattactttgcaagagtcttagaagttattgctcctcttccaagataccaaaattgtaaatgttggaagaggaattatgatacataaaagtcaacttataccaacagttgtctggcacactcaaagaaaaagctttgtctttaaatcagcacattgttgaatgtcaatgcatttgtttgctttaaaataatatatatggcttttatgtataatttttatgattcctttatctaactgatttttaaaaattaacccaacagcaatggataaaagtacctctaccccggccgggcatggtggctcacacctgtaatccccagtactttgggaggccaaggcgggtggatcacgaggtcaggagttcgagaccagcctggccaacatggtaaaaccccatctccactaaaaatacaaaaatttagctgagcatggtggcacatgcctgtaatcccagctactcaggaggctgaggcaggagaactgcttgaacccacgaggcagaggttgcagtgagccaagatcatgccacggcactccagcctgggcggcagagcaagactccatcttgaaaaaaaaatacttctaccctatgaaacctgtgtcataacttattaaatattttgctcccaagagctaggagtcagaatctctctctttttcattgccatatcctcagcatctaacagagtatggacatggtatataccaatattttgttgaatgtatccatcgtatttgaaataagcttctatgagctcttttttaggtggactatgtttcattgggctgaattagtaagttaatgtctattttgaattcagcattttgcattactgaacagacagcatgacgtaacacaaagaagtgagggagcaggtggcagtgtcttaaccgtgtccctgctgtcaggcctgaggcctctttcattgttgttaaggggagtgcaatgcatacaaagtttcagttaggcaagataaataagttctagagatctgctatacaacattctgttaacactgtattgtacacttacaaatctgttaagagggcagatctcatgttacttattcttaccacaataaaaaagttgaatatatatgttatacatataaaatatataaaagtttttataaaatataactataattttataattaataaaatataaattaatatatatgtgaggttttaaatggcagaccagacatagaatgggaaatccagcttcatcatgtagtaaatgtggaatgtggataagtaacttaattttctctaaatttaaatttcataacttgtatggtgaggctaccaccacccacaaaaaaagtttagtgggaataaatcagataatgtgcatgacgtgattcaactcaacaagtacagtatttccttttctctacagaatatatgtatatgtatatatttactaaaaataaggcaagagatttcatgtttgaaattctagctatttaaacattttgatcagcatgattaaaatatcaacttataacacaagggtctttaaaatattgtgaagtcataagtagtatacaattatatattgtttcgatgagtatatttctttgttcctctataaccccttctatttcttaaaaattgctttctagaaaacaaacctctccatggttgaaaaagcagcacagtactgtaataagacctcctagttgagtcccactgtaaaaaataataataataacagagtatacaatcaaaattcatgtaaaatacagtgagtttttcacaaaattacctcagaattttaaaccatagtttaaatcatatttaaaacataatagtactaaaccatacccatgtggttgatgcttaaatcctgaatgtacaatcgtaaaaagtgtacatataaattaatctcaattttataatttatcatagctaaaatactttctaaataaaatacataaggtgtgaacataaattttttttgagatggggtcttgctctgtcgcacaggctggagtgcagtggcgaaatctcgactcactgcaacctccacctcctgggttccaaatattctcctgcctcaggttcccaaggagctgggattacaagcgtgtgccactatgcccggctaatttttttacttttagtagagatggggattcaccatgttggccaagctggtctcaaactcctgacctcgtgatccactcgcctcggcctcccaaagtgctgggattacaggcatgagccaccgcgccccaccgcataaagtaatttttaagaaacaggctagcactttagagtctagatcacatcctttgaataacctgaataaaggcaaattcttatttttgaaattggctttaagggattgagaaatgaagacaagattcaaacagtttcatgtagcattaacttagaactgtctaaactactgcaaatattctttacttgagtcccagacaagcaataatgccgaatacaaaaatcagatgaaagataaaaaccatttcttttgttgttgtctttttgtttttttgtttgtttgagaaggagtctcgctctgtcacgcaggctggagtgcagtggagcgatctcagctaactgcaacctctgcctccccagttcaagccgactcttctgcctcagcctcccgagtagctgggattacaggcgcctgccaccatgcccggctaatttttttttttttttgtatttttagtagagacggggtttcaccatgttagccaggatggtctcgatctcctgacctcatgatccgcccgcctcggcctcccaaagtgctgggattacaggcgtgagccactgcgcctggcccaaaaacagaactttttttaaaaaaatagaatatttttaaacctgcccaaacaatctcaaagcaatccttttccctcaaagtactttaatgagcttatatttttctacacggcatatagaaaagtgcataaaatttctagattatagaactgtaaagggaacgtccatgtagtcaccatataattaattgaaatagagaaatgattatactgtcttcacttgccagcctccaagataagaatcagctactgacctgatttttgagattatcaacataactctttctatacacatatcaaactatgatttactttaatctgtttttaaacaacatacaaatggaagaatgcagcatttttttaaattttgtacctggattcactcattcaaaattatatttgtaagattcaaccatgttgtgtgtagctgcatagttcattcattctcattattgtatactgttccaccatgttaataaaccaaaatgtattcatttctctgttaatggatatttgggttctttccagtttgaagctattgcaaataatgctaccatattattgtatgtacttcctagtacacatgtgcaatacttttttgggaatatgtatgttaaattacaattgctgagttataaggtatccataccttcaactttaccagataatatacactgtttaccaaaatagttgtaccaatttatatgtccacctgtggtggacgaaagctcctttatcaatctattagatgtgagttggtatttcactatggtttgaatttatattttctttataacaaatgatggtggtcaactttacatatgtttattgaccatgtggtgttcttctggg

SEQ ID NO: 1882669 - DNA, 4001 bp, Homo sapiens
agcttttacaggagctgcaaacgcagcctgtgcccctgtttggttggggaattgcttgttttcaattcccctggagagagaagagtggggaatagaacaagttaaaacaccacaaactctgctgttcttatagaggttcagcagcttttcttgaattaatgccctttagattgttgtaaacctttggttaatttccaaagtttgaagaaaatgattttgataattttccaagtattttcattgtcgtcatggaggagtgcattttcttggctattccagaagtcctacctcccttctgagattttataatagtatttcttatggttatcccaaatatacttggcaagtcatcttataaaccaccaataatagcctcttaaaaattcaaaaattacttcacttggctaacaaaataaatgcaaattaattcaataattattgaagaaattaaatttttaaaaattaaaaaattgcaatgttgaaattctcaaccatgcttacccagatcttttcctatattactaactgtcctgggcttatcttaaacacttcccggaagatttacttgttttataccaggataagcaaagtatggcccatggtgtatttttggactgtctgcaagcacggttgctataatttttaaaaggttgaaaactttaaatggttgtaaagatgctcataactgtttattaggcttcattaattttaaaatatacagagactatcctgttcaactatatttgtatcctatttctaattctcctaacaattatatacactgaaaaaactcttcagatgatatataaggaaaaggtcaaatatagtaccaaattcatctagctttccaaagatgctcaaaatctttctgtgtctctcactccctcccttaacccacataccacatctgaaaaaaatgatatggtgtaacgatgccagtattctaaatgcttgaagggcttatcacatgccctttccaagctgtgacagaagcatgtcccccggaccccggcatcctatcaatctcacctctgaaggtgacccagcctcatacttcactgaaacaaagaccattagacgccagcactcccaacttcttttatctccactttaacatttctccatatagtaattctcgcttttctactccctgccatctcagaaaaggaagtctctctcctcttttccacagttagcttatcaaatttgtgcccttaactctacccctccaaatattccaagacttgctccactaattatttcctctcttggaatcttaatctcatcctcttcccttgatccttgcccccagcctttaaaactcctagaccttaaaacactctctgcgatctgacagcccttcaaaccaatatactccctatctctctctctcctctggttcaatgacaagatttttggccaacttctttctactcagaccttgctattatttcctactaggcacccacaaacccttgcttgttaaactgatctccttcaagactcaagaaaagcgccatgcggctccctcctagggctctcctgccctctccttaccgatgctgagagtggttctgctggggaaccaccgcgcctgcagttcgtgcacctcttcccggagctgcgccagggaattacggacgaactggaaggggtcgagaagggtcttggccaccacctttagctccaagccttttcgctttttcagatttgggatcctccccggggaggacctcctggcgccccctggcagtttcccgccgcctagggccgacttttccacctccagctcccgggcgggggaggccccgtacggccgcttagacgggctggggcgggaagattgcagcggctttgggtttactccttgtttcttcataatccctagtggagctgggtcaatttcaggcacagcccatccgagtcaggcgaggtccagaaaggcctgactcgcctggcagcctcaacggacttgtccccgcagccgttgactagccgttgacgagcggacctcccggtcgtcatggcgactgtgaaatgtagggtggagcgcatgcgttcgaagccattcgcgcgggcagtccctgcgtgtccccctgcgtgtccccccacgtgctccccagcgcgcgcagcaccccgcctctgcgcttccccgagcgtgcagcttccggtgagggcagccccacgcacagcccccaacaccctccccagcgcctgcagccttcggtgcgcgcagtccccaagcccacatgcgcagttctcaccttgcgcgcagccccacgtacagcccccaacacgctcccagccccactggcgcagaacccatcaccgcttgcccttcacgcgcttcattgggagtgcagctcccaccccgagcgcgcagctccacgcagcctctccacactctccccagcgcttgcagcaccccccagtgcgcacagctctgccagtagcttcccggcgcgccgcccctgcaccgcttcgggccataaccttgctggcgactaagtctgaagaacttcctgtggtttcattcttttcttcaggtttagtcttagctctgacattttaaccaaaaggttacacgttaattaacgaggtattaaaggggaagatctcagctgaaagaaatgactgtaggaagtgtgtcagggaagccaacggaaccgctggcccgccggtggtgcgcccggcattaggaaagtctctacgatcgctgaggtatcgggcagtcagtgcccgttgccaacgcggagggaacgggcggagactgcgggcaacacgtggcagagccggcgtgagtccggtgggtctgatcccagagcctcaggttgacgccacttccttggcacggaacagcgtttactgaatcttagagcaaaatgcttttccaatgaggttcctcagaagtcatcggccctaggagcggtgtgctcaagcgctttcagcaccagccaggaccaactaagaggggagcgcttacctcccagtcaccgcgcagccctacaagaggccaaagcggctggcacagatgcactggggccactgacattttccatgtcctctgtcacgggccacatgctggagcccacaccgcttcacttgccatctgtttgatgatggatcacattgaactcccatatcctaactcaccagtctaaagcatggctcattgtggccaggttaatttttcctgatgcaacacagcacaaaaatgttcgtggcccacaaatcaagtcctaggcttgctcaccaatgccttcaatatttgcccaatataccttttcaactttaatttcccacttcctcgggcacaaaatcttccatctcagtcatttcaggtgaagtccacagcctgagacatcataactgctgaattcctttattcatgtggaaaagccatcccttggcttttacatccttttctccctgcccatctgaaagctgtcaccttccaagccccagcccatttctccagcccatattaattatgctttttctgaaggtctagagcacttaaccgacagtactatttatcttgtcactcagttaaattcagtaagtgctactactgctcattttttgttttgggagatttttttcaaggagcatttctacattcctggcattgtgtttggtgctcaaaatgttttctcaattcatgcaataactgtatgcaaattttaaatcaagcatcaggatgtagttatttgcccaagttttaacagctaataaattctatctgtccaatactgcatttaaaatacaaagtatttactgtggttgatgagaatatattcttgaatggctaggcaaactcaaaataaagcaccttattttaaaatatgactgttttaatgttttttggaacaataagtgaagtggagctattgtttttctttttggtcagtttgttttttctggagtttccaattgccttttgcatcacttggtgtcctggtgggatacaaaatgctcttacccatggtctagcccatgaa

SEQ ID NO: 1882670 - DNA, 4001 bp, Homo sapiens
tgtttggttggggaattccttgttttcaattcccctggagagagaagagtggggaatagaacaagttaaaacaccacaaactttgctgttcttatagaggttcagcagcttttcttgaattaatgccctttacattgttgtaaacctttggttaatttccaaagttttgaaggaaatgattttgataattttccaagtattttcattgtcgtcatggaggagtgcatttccttggctattccagaagtcctacttcccttctgagattttataatggtatttcttatggttatcccaaatatacttggcaagtcatcttataaaccaccaataatagcctcttaaaaattcaaaaattacttcacttggctaacaaaataaatgcaaattaattcaataattattgaagaaattaaatttttaaaaattaaaaaattgcaatgttgaaattctcaaccatgcttacccagatcttttcctatattactaactgtcctgggcttatcttaaacacttctcggaagatttacttgttttataccaggataggcaaagtatggcccatggtgtatttttggactgtctgcaagcacggttgctataatttttaaaaggttgaaaactttaaatggttgtaaagatgctcattaattgtttattaggcttcattaattttaaaatatacagactatcctgttcaactatatttgtatcctatttctaattctcctaacaattatatacactggcaaaaactcttcagatgatacataaggaaaaggtcaaatatagtaccaaattcatccagctttccaaagatgctcaaaatctttctgtctctcactccctcccttaacccacataccacatatgaaaaaaatgataaggtgtaatgatgccagtattctaaatgcttgaagggcttatcacatgccctttccaagctgtgacagaagcatgtcccctggaccccagcatcctatcaatctcacctctgaaggtgacccagcctcatacttcactgaaacaaagaccattagacgccagcactcccagcttctttcatctccactttaacatttctccatatagtaattcttgcttttctactccctgccatctcagaaaaggaattctctctcctcttttccacagttagcttctcacatttgtgcctttaattctacccttccaaatattccaagacttgctccactaattatttcctctcttggaatcttaatctcatcctcttcccttgatccttcccctcagcctttaaaactcctagaccttaaaacactctctgcgatctgacagcccttcaaaccaatatactccctatctctctctctcccctggttcaatgacaagatttttggccaacttctgtctactcggaccttgctattatttcctactagggacccacaaacccttgcttgttaaactgatctccttcaagactgaagaaaagcgcgatgcgcctccctcctagggctctcctgacctctccttaccgatgcagagtggttctgctggggaaccaccgcgcctgcagttcgtgcacctcttcccggagctgcgccagggaattacagacgaactggaaggggccgagaagggccttggccaccacctttagctccaagccttttcgctttttcagatttgggatcctccccggggaggacctcctggcgccccccggcagtttcccgccgcctagggccgacttttccacctcccgctcccgggcgggggaggccccgcagggccgcttagacgggctggggcgggaagattgcagcggctttgggcttactccttgtttcttcataattcctagtggagctgggtcaatttcaggcacagcccagccgagtcaggcgaggtccagaaaggcctgactcgcctggcagcctcaacggacttgtccccgcagccgttgacgagccgttgactagcggacctcctggtcgtcatggcgactgtgaaatgtagggtggggcgcatgcgttggaagccattcgcgcgggcagtccctgcgtgtccccccacgtgctccccagcgcgcgcagcacccccgcctccgcgcttccccgagcgtgcagcttccggtgagggcagccccacgcacagccccccacaccctccccagcgcctgcagacttcggtgcgcgcagttcctaagcccacatgcgcagttctcaccttgcgcgcagcctcacgtacagcccccgacaggctcccagccccactggcgcagaacccatcaccgcttgcccttcacgcgcttcattgggagtgcagcccccaccccgagcgcacagctccacgcagcctctccacactctccccagcgcctgcagcacccgcagtgcgcacagctccgccagtagcttccccgcgcgccgcccctgcaccgcttcgggccataaccttgctggcgactaagtctgaagaacttcccgtggtttcattcttttcttcgcgtttagtcttagctctgacattttaaccaaaaggttacacgttaattaacgaggtattgaaggggaagatctcagctgaaagaaatgactgtaggaagtgtgtcagggaagccaacggaaccgccggcccgccggtggtgctccgggcattaggaacgtctctgctctcctacgatcgctgaggtatcggacagtcagtgcccgttgccaacacggagggaacgggccgagactgcgggcaacacgtggcagagccggcgtgagtctggtgggtctgatcccagagcctcaggttgacgccccttccttggcacgggacagcgtttactgaatcttaggggaaaatgcttttccaataaggttcctcagaagtcatcagccctaggagcggtgtgctcaagcgctttcagcaccagccaggaccaactaagaggggagcgcttagctcccagtcaccgcacagccctacaagaggccaaagcggctggcacagatgcactggggccactgacattttccatgtcctctgtcacgggccacatgctggagcccacaccgcttcactttccatctgtttgatgatggatcaaattgaactcccatatcctaactgaccagtctaaagcatggctcattgtggccaggttaatttttcctgatgcaacacagcacaaaaatgttcgtggcccacaagtcaagtcctaggcttgctcaccaatgccttcaatatttgcccaatataccttttcaactttaatttcccacttcctcgggcacaaaatcttccatctcagtcatttcaggtgaagtccacagcctgagacatcataactgctgaattcctttattcatgtggaaaagccatcccttggcttttacatccttttctccctgcccatctgaatgctgtcaccttccaagccccagcccatttctccagcccatattaattatgctttttctccagcccatataattatgcaatatattcttgcattatcttatcatctttgaaacagagatgcctcatgatttagcttttatatatatatgtttttattatactttaagttctagggtacacgtgcacaacgtgcaggtttgttacatatgtatacatgtgccatgttggtgtgctgcacccattaactcaacatttacattaggtatatctcctaatgctatccctccccgctccccccaccccacgacaggccccggtgtgtgatgttccccttcctgtgtccaagtgttctcattgttcaattcccacctgtgagtgagaacatgcggtgtttgattttttgtccttgtgacactttgctgagaatgctggtttccagcttcatccatgtccctacaaaggacatgaactcatcattttttatggctgcagagtattccatggtgtatatgtgccacattttcttaatccagtctatcattgatggacatttgggttggttccaagtctttgctattgtgaattgtgccgcaataaacata

SEQ ID NO: 1882671 - DNA, 4001 bp, Homo sapiens
atttccaaagttttgaaggaaatgattttgataattttccaagtattttcattgtcgtcatggaggagtgcatttccttggctattccagaagtcctacttcccttctgagattttataatggtatttcttatggttatcccaaatatacttggcaagtcatcttataaaccaccaataatagcctcttaaaaattcaaaaattacttcacttggctaacaaaataaatgcaaattaattcaataattattgaagaaattaaatttttaaaaattaaaaaattgcaatgttgaaattctcaaccatgcttacccagatcttttcctatattactaactgtcctgggcttatcttaaacacttctcggaagatttacttgttttataccaggataggcaaagtatggcccatggtgtatttttggactgtctgcaagcacggttgctataatttttaaaaggttgaaaactttaaatggttgtaaagatgctcattaattgtttattaggcttcattaattttaaaatatacagactatcctgttcaactatatttgtatcctatttctaattctcctaacaattatatacactggcaaaaactcttcagatgatacataaggaaaaggtcaaatatagtaccaaattcatccagctttccaaagatgctcaaaatctttctgtctctcactccctcccttaacccacataccacatatgaaaaaaatgataaggtgtaatgatgccagtattctaaatgcttgaagggcttatcacatgccctttccaagctgtgacagaagcatgtcccctggaccccagcatcctatcaatctcacctctgaaggtgacccagcctcatacttcactgaaacaaagaccattagacgccagcactcccagcttctttcatctccactttaacatttctccatatagtaattcttgcttttctactccctgccatctcagaaaaggaattctctctcctcttttccacagttagcttctcacatttgtgcctttaattctacccttccaaatattccaagacttgctccactaattatttcctctcttggaatcttaatctcatcctcttcccttgatccttcccctcagcctttaaaactcctagaccttaaaacactctctgcgatctgacagcccttcaaaccaatatactccctatctctctctctcccctggttcaatgacaagatttttggccaacttctgtctactcggaccttgctattatttcctactagggacccacaaacccttgcttgttaaactgatctccttcaagactgaagaaaagcgcgatgcgcctccctcctagggctctcctgacctctccttaccgatgcagagtggttctgctggggaaccaccgcgcctgcagttcgtgcacctcttcccggagctgcgccagggaattacagacgaactggaaggggccgagaagggccttggccaccacctttagctccaagccttttcgctttttcagatttgggatcctccccggggaggacctcctggcgccccccggcagtttcccgccgcctagggccgacttttccacctcccgctcccgggcgggggaggccccgcagggccgcttagacgggctggggcgggaagattgcagcggctttgggcttactccttgtttcttcataattcctagtggagctgggtcaatttcaggcacagcccagccgagtcaggcgaggtccagaaaggcctgactcgcctggcagcctcaacggacttgtccccgcagccgttgacgagccgttgactagcggacctcctggtcgtcatggcgactgtgaaatgtagggtggggcgcatgcgttggaagccattcgcgcgggcagtccctgcgtgtccccccacgtgctccccagcgcgcgcagcacccccgcctccgcgcttccccgagcgtgcagcttccggtgagggcagccccacgcacagccccccacaccctccccagcgcctgcagacttcggtgcgcgcagttcctaagcccacatgcgcagttctcaccttgcgcgcagcctcacgtacagcccccgacaggctcccagccccactggcgcagaacccatcaccgcttgcccttcacgcgcttcattgggagtgcagcccccaccccgagcgcacagctccacgcagcctctccacactctccccagcgcctgcagcacccgcagtgcgcacagctccgccagtagcttccccgcgcgccgcccctgcaccgcttcgggccataaccttgctggcgactaagtctgaagaacttcccgtggtttcattcttttcttcgcgtttagtcttagctctgacattttaaccaaaaggttacacgttaattaacgaggtattgaaggggaagatctcagctgaaagaaatgactgtaggaagtgtgtcagggaagccaacggaaccgccggcccgccggtggtgctccgggcattaggaacgtctctgctctcctacgatcgctgaggtatcggacagtcagtgcccgttgccaacacggagggaacgggccgagactgcgggcaacacgtggcagagccggcgtgagtctggtgggtctgatcccagagcctcaggttgacgccccttccttggcacgggacagcgtttactgaatcttaggggaaaatgcttttccaataaggttcctcagaagtcatcagccctaggagcggtgtgctcaagcgctttcagcaccagccaggaccaactaagaggggagcgcttagctcccagtcaccgcacagccctacaagaggccaaagcggctggcacagatgcactggggccactgacattttccatgtcctctgtcacgggccacatgctggagcccacaccgcttcactttccatctgtttgatgatggatcaaattgaactcccatatcctaactgaccagtctaaagcatggctcattgtggccaggttaatttttcctgatgcaacacagcacaaaaatgttcgtggcccacaagtcaagtcctaggcttgctcaccaatgccttcaatatttgcccaatataccttttcaactttaatttcccacttcctcgggcacaaaatcttccatctcagtcatttcaggtgaagtccacagcctgagacatcataactgctgaattcctttattcatgtggaaaagccatcccttggcttttacatccttttctccctgcccatctgaatgctgtcaccttccaagccccagcccatttctccagcccatattaattatgctttttctccagcccatataattatgcaatatattcttgcattatcttatcatctttgaaacagagatgcctcatgatttagcttttatatatatatgtttttattatactttaagttctagggtacacgtgcacaacgtgcaggtttgttacatatgtatacatgtgccatgttggtgtgctgcacccattaactcaacatttacattaggtatatctcctaatgctatccctccccgctccccccaccccacgacaggccccggtgtgtgatgttccccttcctgtgtccaagtgttctcattgttcaattcccacctgtgagtgagaacatgcggtgtttgattttttgtccttgtgacactttgctgagaatgctggtttccagcttcatccatgtccctacaaaggacatgaactcatcattttttatggctgcagagtattccatggtgtatatgtgccacattttcttaatccagtctatcattgatggacatttgggttggttccaagtctttgctattgtgaattgtgccgcaataaacatatgtgtgcatgtgtctttatagcagcatgatttataatcctttgggcatatacccagtaatgggatggctgggtcaaatggtatttctacttctagatccctgaggaatcgccacactgacttccacaatggttgaactagtttacagtcccacc

SEQ ID NO: 1882672 - DNA, 4001 bp, Homo sapiens
gatcatttcacttaggaatcagtcacttcaaaattatacattatgcctctatatagaaaaatattatatatgtgatacccaattctgtaatataaataatagtaagtcaatataaaagtatataattaaaatatggtgataatagaaaaatacaaagatttatagaaacatttcataattcacttcatttagatccttgaatttattccttcataaaatatataaaatatattataaaaactggaacagaatggaataatagcacctgtacccattacaattttaaccaagcagaagatttaattgaccaattgtttccaaactgcaagctatttttaaaagttcaaagacaaagaaaaaataacaacagaaaaaaatttccaacagaatgttcatgtctcagaggttttttaaaaataacactatacattctgggaaactaatgtgaaatcactggggggaaaatgtcaaaaaataaagagttgaaaagagaaagcaagcacctcttagagctaaccatttttaatattttggtaattggtgcggtggctcacacctgtaatcccagcactttgggaggccaaggcgggcggatcatgaggtcaggagttcgagaccagcctggccaacatagtgaaaccccatctctactaaaaatacaaaagttagctgggcgtggtggcaggcgcctgtgatgccagctactcaggaggttgaggcaggagaatcacttgaaatcggaaggcagaggctggaaatcggaaggcagaggctgcagtgagccaagatcacaggactgcactctggcctgggcgacaagagcaaaactccatctcaaaaaaaaaaaaaaaaaagttggtgattatctttccagtcctccccctaggcatttaaagcatgaaattagagttactcaatactacctaatgagatcatattatcaatgttaatgtaatatacatcactaaacatcaaaaacatcttgcctcgtctcagaagtgtagttttattatgcaggttgacacagtaggaaaagcatagctttgatgtcagaattgaactcaaattctgactctgcaagttatagtttccatggtctcaagtaatccttcaacggctgtcaatcacttcacctctcaaataagtttaataataaccattctacaagagaagtgagataagcgctcacatatacagtcgtatatgtcctatatgtcctaagtatagtgctggcatatagtatgcagtgaatgcttttaccttgttaaaacattctgttctaaacttacatttttatttgtaaatgagaaattaatcccctgtgaaattaatctcgcagggggagggaagcgacggttgccgggaagcgcgggccacccctccctccctcccattcttcgtcctcccctcgcgcgccacccgtttttcctctttctccgttaataacggctgggtggctgggggaggagggaaggtggctccggcggagtctgggcgggcgcctcccactcagccgccagccgccgtgggagccggaggatggcggcggtagcagcggccgccggagactaggcggtgcggaggcccggggcgccaagcgcggcggcagaaagcggcagcggcccgtcatggcgcaccagaaccgaaaccagcggcagtcgcaccgccacctgagtcgccccttcctgctggagacagcgaggggtgcctgcagccgggacaccttcttctccgcgtctcctcgtctcccgcgcccgcgtcaggccgccagccttgcccaccgccccgagaagagcgcgccgggcgccgactgcccctcggggcgccgggcggcggccctggacgtgcgggggcctctctgggccggccgcagcgcctcggccctgccctctagctcccgcgttcgctcctgccttcttggctctcggggcacagcgcgcggcccggtccggagcagggcggacatgagcgccaagcagagcggcctggccgccgctcacggcgcacgcgcgcgtactcggctcggatctaccttccagtagcagcggagtggccaatgggaccgggaccagagccgggggccggaggccgccgccgcggggaggttcccggcccaggtgcccagcgctcaccagcccggcggcgccgcggcggccccgcagctgtttcctcgggggggcgtggcgtcgggggccttcgcggcgcagtcctctttcagcatcccgaacagcagcagcggcccgtaggactcgcaggactcggtgcacagcagccctgaggatggcggcggcggccggcaccggccggtgggctggagccccggcgggccgctcctggtgatcggctccttaccagctcacctctcaccgcgcatgtttggaggtacggacccctctccacgcgcccgcgctcggtcctcccgcggctgcacgtgggccgtggccgccggctatttttacccttctccttttctccttcggccggggcgccgggggctgcttcccggcccagcccgcgccggtctccatcctgggaagaaacccggcacgtaacacctgcggtgtcgctgccgcgtagacacgtggttttgtttttaaacatcgtgagcacccacacctcagcgggtactcagtagagatagtctattttccagtgagttgactggagcaaatgttgttttacagcaaacccacgaaatagcccttgtggttgtggcttttagtaccaggaagtcaggaggagacggttgctaaatgtagttctatctggtactcgagtggggcacaatttttaaaagccaaaagtcaaagggtctcaaatgaactctgagttaccatctttggactgacttttaatataaagctgtaatccttaaatctgtgtcagtagtcccacctactatgtcactttaattggatgaatgcgttaatgaaaagtttgttttcaaacctcactaaactgctacttaagatcacagttaatgtgagtcctgcttaatttggaaagcatttaaaaaatggaaaagtttcttagggaagcaaaaattttgcaactctgcctacaaggtacagtaattggctaggttcttttgaagagcagtgttgactagagttaaggaaaagtcagttgtgaaaaatggacatttttaatagcaaaatgatgtgctttactgtagaaacaggaggaagggtgcattttcctggggaaaatgaattcttcttcagttatattttatgctgctctactttattgcaaaacgctaatattaaatgaatcaagaccacctccccttcccgctttatgaaaataaatagaagtatagaagataagcattcccatttcatcgcattatgtatctgatattagaagaattcgcaactgagcacagatgagcaacgaaaacaccatcccctacatttttgtgcctcttttacttacatatttgtaaacgtaggaactttgagtggagacttagtaaagtggaatacgtagtaatttatctgttgtgatgttctgtgctatcagcacacacgccagcataaattaaaaataggaatgtcatgtttagtttttcccatctttttagtaacgctttgtacattcaatatggaacgacgcttgacttttaattagcaaccttgttttaaagtaatttttgcttcttaaaaatattcatccctcttaaaattgggccatttttaaaagtcatttgcttttgagtaaaagaactccactggtgtctttaaagtgatttgatcacaactaacccagcagttgaagttgctgtagtccacactgaagaatataaaaggcagtttctgagaattggtgattagtgcgaaaatgaagggcaaactggtttttaatatttatctttatctttttaaagtgaaaatttgcatttagcagttatcaaaagatgaatatttgtttgctaaagaagggtcaataggaaaagccttgtcaagttaatatttatttaatatgctgatttttaaaaa

SEQ ID NO: 1882673 - DNA, 4001 bp, Homo sapiens
gcctgtgcccctgtttggttggggaattgcttgttttcaattcccctggagagagaagagtggggaatagaacaagttaaaacaccacaaactttgctattcttatagaggttcagcagcttttcttgaattaatgccctttagattgttgtaaacctttggttaatttccaaagttttgaagaaaatgattttgataattttccaagtattttcattgtcgtcatggaggagtgcatttccttggctattccagaagtcctacctcccttctgagattttataatggtatttcttatggttatcccaaatatacttggcaagtcatcttacaaaccaccaataatagcctcttaaaaattcaaaaattacttcacttggctaacaaaataaatgcaaattaattcaataattattgaagaaattaaatttttaaaaattaaaaaattgcaatgttgaaattgtcaaccatgcttacccagatcttttcctatattactaactgtcctgggcttatcttaaatacttcttggaagatttacttgttttataccaggataggcaaagtatggcccatggtgtatttttggactgtctgcaagcacggttgctataatttttaaaaggttgaaaactttaaatggttgtaaagatgctcattaactgtttattaggcttcattaattttaaaatatacagagactatcctgttcaactatatttgtatcctatttctaattctcctaacaattatatacactggcaaaaactcttcagatgatatataaggaaaaggtcaaatatactaccaaattcatccagctttccaaagatgctcaaaatctttctgtgtctctcactccctcccttaacccacataccacatctgaaaaaaatgatatgttgcaacgatgccagtattctaaatgcttgaagggcttatcacatgccctttccaagctgtgacagaagcatgtcccctggaccccggcatcctatcagtctcacctctgaaggtgacccagcctcatacttcactgaaacaaagaccattagacgccagcactcccaacttcttttatctccactttaacatttctccatatagtaatcctcgcttttctactccctgccatctcagaaaaggaattctctctcctcttttccacagttagcttctcaaatttgtgcctttaattctacccctccaaatattccaagacttgctccactaattatttcctctcttggaatcttaatctgatcctcttcccttgatccttcccctcagcctttaaaactcctagaccttaaaacactctctgcgatctgacagcccttcagaccaatatactccctatctctctctctcccctggttcaatgacaagatttttggccaacttctttctattcggaccttgcttttatttcctactaggcacccacaaacccttgcttgttaaactgatctccttcaagactcaagaaaagcgccatgcggctacctcctggagctctcctgccctctccttaccgaagtccaaagtggttctgctggggaaccaccacgcctgcagttcgtgcacctcttcccggagctgcgccagggaattacggaccaacaggaaggggccgagaagaagggtcttggccaccacctttagctccaagccttttcgattttccacatttcggatcctccgccggaaggacctcccgccgcctagggccgacttttccacctcctctacctccggctccggggcggaggcgggggggaagggggaggcccgcaccgccgcttagactggctggggcgggaagactgcagcggcttcgggcttactccttgttttttcataatccctgatagagctgggtcaatttcaggcacagcccagccgagtcaggcgaggtccagaaaggcctgactcgcctggcagcctcaacggtcttgtccccgcagccgttgcggacctaccggtcgtcatggcgactgtgaaatgtcgggtggggcgcatgcgttcgaagccattcgcgccggcagtccctgcgtgttcccccacgtgctcccaagcgcgcagcacccccgcctccgcgcttccccgagcgtgcagcttccggtgagagcagccccacgcacagcccccccaccctccccagcgcctgcaagcctttggtgcgcgcagtccccaagcctagatgcgcagttctcaccttgcgcgcagccccacgtacagcccccgacacgctcccagccccactggcgcagaacccatcaccgcttgcccttcacgcgcttcattgggagtgcagcccccaccccgagcgcgcagctccacgcagcctctccacactctccccagcgcctgcagcacccccagtgcgcacagctctgccagtagcttccccgcgcgccgcctctgcacggcttcgggccataaccttgctgacgactgagtctgaagaacttacggtggtttcattcttttcttcagatttagtcttagctctgacattttaaccaaaaggttacacgttaattaacgaggtattaaaggggaagatctcagctgaaagaaatgactgtaggaagtatgtcagggaagccaacggaaccgccggcccgccggtggtgcgcccggcatgagggacgtctctgctctcctacgatcgctgaggtatcggacagtcagtgcccgttaccaaagcggagggaacgggccgagactgcgggcaacacgtggcagagcccgcgtgagtccggtgggtctgatcccagagcctcaggttgacgcgacttccttggcacgggacagcgtttactgaatcttagagcaaaatgcttttccaataaggttcctcagaagtcatcagccctaggagcggtgtgctcaagcgctttcagcaccagccaagaccaactaagaggggagcgcttagctcccagtcaccgcgcagccctacaagaggccaaagcggctgtcacagatgcactggggccactgacattttccatgtcctctgtcacgggccacatgctggagcccacaccgctttacttcccatctgtttgatgatggatcaaattgaactcccatatcctaactgaccagtctaaagcatggctcattgtggccaggttaatttttcctgatgcaacacagcacaaaaatgttcgtggcccacaaatcaagtcctaggcttgctcaccaatgccttcaatatttgcccaatataccttttcaactttaatttcccacttcctcgggcacaaaatcttccatctcagtcatttcaggtgaagtccacagcctgagacatcataaccgctgaattcctttattcatgtggaaaagccatcccttggcttttacattcttttctccctgcccatctgaatgctgtcaccttccaagccccagcccatttctccagcccatattaattatgctttttctgaaggtctaaagcacttaactgacagtactatttatcttgtcacttagttaaattcagtaagtgctactactgctcattttttgttttgggagatttttttcaaggagcatttctacattcctggcattgtgtttggtgctcaaaatgttttctcacttaattcttgcaataactgtatgcaaattttaaaatcaagcatcaggatgtagttatttgcccaagttttaacagctaataaattctatctgtccaatactgcatttaaaatacaaagtatttacggtggttgataagaatatattcttgaatggctaggcaaactcaaaataaagcaccttattttaaaatatgactgttttaatgttttttggaacaataagtgaagtggagcgattgtttttctttttggtcagtttgttttttctggagtttccaattgccttttgcatcacttggtgtcctggtgggatacaaaatgctcttaccatggtctagcccttgaaagtacaaatctggtcatttttatcatttaaaaaat

SEQ ID NO: 1882674 - DNA, 4001 bp, Homo sapiens
ccctgtgaagtttcagcccttgatgtggctgcggtgggcaggggtgggccggtgagcagggaggcagcaggatgccgaccagggccagtgcggagaaaggagatgatttcctccctgggaccagggcggccccaggcccacccactccctcaccacccgcaccagggcactctcagaaagccctgtcccagctaccactctgaattctcaaaatgtgctccaagcccaacattctcaataatgaatgacgaagccccaagtcacccagacagtcagagggctacggccagcccattcaccttggccaaatccagggaaatcctgggggggttcctcattttatcttttttatttttttcccccgagatggagtttcgctctttgttgcccaggctggaacgcagtggcacgatcttggctcactgcaacctccacctcctgggttcaagggattcttttgcctcagccttccaagtagctgggattacaggcgctggccaccatgcctggctaatttttgtatttttagtagagatggggtttcaccatgttggccaggctggtcttgaactcctgacctcaggtgatccgcccacctcggcctcccaaagtgctggaactacaggcgtgagccactgggcccagctttaagacagggtctcgctctgtcacctagggggctgaagcgcagtggcgcgatcacagctcactgctgccttgacctcctggtctccagcaatcctcctgcctcagtctcccaagtagctgggattacaggtgtgtaccactatgcctggctaattaaaaaaatttttttttgtggagatggggtctcgctatgttgctcaggctggtctctgactgctgggttcaaatgatcttcctgccttggcctcccaaagtgctgggattaaaggtgtcagcctctgtgcctgaccaatctcctcattttaaatgccacccgctctggtctgcactgggcccgtggtatcattctctctctctctcaaggagctgagcgctctaccaggcactctgggctgggctgcatcatcacgggggccaggtcacccgtgccacctgcagccactgccacgtgctccacattctgccctccctcacaccgcgctgacagccccttgcactagactagggctcaggggtaagggctgatactctggtctctgggtccttagggcctggcacaaggcgggagtcagtgtacaggcagtgacccagtgttctcgggcacaatgctcgccatgcagcccgcaagcagaggccacaggcctttaactgctccatgtggaggcccttaatcatcgtgagtgaaaggactgtagattctaacccgtgtggtgactgccaggactcaggtacaaggggtcaggtaggctctggacggccacggcacctcggcacccacatgccacatgcaaatgagatgccacggcaggaccacctagggggcaggagccgcatctgcaggaattggggtgagtcttcccagctaagagcagaaacacagggcagacaaaacgagcggccgttgcccacgatacctgactgcaccggaggtggaggatcctgggggcaggtgctgcggtcccaggtgggagaggctggagcggtagaggggctggctccccagggaaggaggagctgcgtcccaggcgttcgtggtgttcagcctgggcgcagaccgggccccggagagtgagggtttgttgtatggtgcaaaggcctggtgggtcccaaacacagaagcggtcctgtggggggggtgctggggggcggggtatgcagggaggttggtcatggagtggcggtagcggcctgatacagggccagttctgctgccactgaggcactggtggcaagagcaggcgacgcctgtgtggcccggcggagcgatgatggtggtcactgggtaaggcggccctgcttggcgccgcacgctgcagcagaagctggaagtcttgttggtctgcgtgtgggtggtgtagttgacagtgtagttgtaccccaggggggccaagtccacgagctggttgcccctggccacctgctgctccagatcgtcacagacgccggcttcataggcggtccaggagccatcgtcgctcagccactcccagacgacacctcggccaggggctgagtgctgggggaacaggtgtctccgcacagtccgcatggtgcctgttttcaaaggaaaaccaaaggttagtctgctagcatccccaagatacagggaacgttcaaattcttttttcaaccgccaaaataaacaaataggaacacagtaggtacacagtcatgctgctatttgtttatttatttattgttagaggcagggtacccctttgtcacccaggctgcagtgcagtgatgtgatcatagttcactgccaccctgacctcctgggctcaagcgatcctcctgccttagcctcctaaataactgggactacaggcacatgacaccacacccacctaacttcaaatcgacctctacaacacctgccactttcattccccgattaacacttcctgctctctgccacgatatgcaatttccatgttattatttatcctgtctgctatctttgtcagttgacttcacacactgtgaaggcaatgacttgggagctgactgacagccacagttttcacagactctacgacactcctggaaacacagtttccagggctgggcatgacggctcaagcctgtaatcccaacactttcggaggccaaggcaggaggatcacttgagctcaggagttgaagaccagcctgggcaacacagggcgatggagacccagtctttacaaaaaacaaacaaacaaacaaacaaacacgataaaaaaaacccatactttttaaaataaaactaaaattaaaattgaaaaaaaaaaggaaaaaccagtttctcaagtttcctcactggtgacactgtgggccaataattccttactgcagggccagcccagtgcactgccggatggcgagcagcatccctggcctccacccaccagatgccaggagcacccccacctcccacccactcagctgtaacaaccaacagtgtctccaaacattgtcagatggccccggggacaaaatcacccccagtgacaaccaccagattagagtaagggatggctccgagaggaaactggtgcctcattctcaataatactgatcaaaacacactgcaggtccaggtgcggtggctcatgcttgtaatcccagcactttgggaggccgaggcaggcagatcacctgaggtcaggagctcgacaccagcctggccaacgtggcaaaaccccgtctctactaaaaatacaaaaattagccaggtgtggtggcggatgtctataatcccagctactcgggaggctgaggcaggagaatcacttgaacccaggaggcaggggttgcagtgagccgagattgcaccactgcactccagcctgggcaacagagccagactccgtctcaaaaaaaaaaaaaaaaaaaaaaaaaaaagatcaaaacacatcgcagaccaaaaagcagaaacgcacacacgcagaggggcgcagttgcctgcccagggcacacagccactgagtggtgggacagggccctctgaactcctatgacgcaccacctccatgctggcctgccggccaaaggaacccttcaacctctgtggtcggaacaggcatttctgctttgcaagacaaggggaagggcctcccacagtgcctctcccactgtgagctgcactcaacctatgtggatgttcccactcactgcacccacccaccaccacgtgtgctgcagggagagagcagaagctctgtaagtcacgtccatcaccccaacacctggcgcagagcctgtgggaaagcaggtgcggcgcccagatatgtgcgagaggcagacagcgtcttaccggtgtcctggcggaactgggtccagctggggaggtcaataatgtaacgggccag

SEQ ID NO: 1882675 - DNA, 4001 bp, Homo sapiens; identical to SEQ ID NO: 586386

SEQ ID NO: 1882676 - DNA, 4001 bp, Homo sapiens
catactataaggattatagatacttgcctaacaatattaaaaattctgaatactgaggatatcaaaattgtgatctaaatttatctggaagatgggtgtgagtgggaacaggtgtatgaggtgtgtgtttaagaaaggcgcattttcatcttccacagcataaagctagtatctaacctagagggaaaaacattaagcagcagcaatataggcctgttatttagaaatctcaagataaatagcaaagaatattgctaaaagagttgaaattattctgtgcagaagctggggatagcaacaggaatgctgttattataagctttggagtacttttcaatttttaaaccccatacatccacttcaataaaaatgaaatttaaaaataaatgttgacaaatattttatataacgaatgtaacataatatatcccttgttatgatgaagaaaattaacatttgtctttatttttagttttttttttgagaaggtgttttactctgtcacctggcttgagtagcaatctccgctcaatgcaacctccgcctcccaggttcacgtgatcctcccacatcagcctcttgagtagctgggattataggcacgcaccaccacgtgcagctaagtttttttatttttaatagagatggggttttgccatgttgcccaggctggtctatgaactcctgaagtcaagtgatctgcccaccacagcctcccagagcgttggtattataggcgtgagtcaccgcccccaaggagcttcacgaatagctgggattacaggcatgcgctaccacacccggctaattttttgtatttgtagcagacacgaggtttcaccatgttggccaggctggtctcaaactcctgaactcaagtgatccacccgcttcggcctcccaaagtactgggattacaggcctgagccactgctcctggcctattttttatttttatttttatttttgagataggatctcgctttgtcgcccaggctgcagtggcgccatctcgtgcccggcctttttttttctttctaatatttgttttaatactttaaaacaactagcaagaactctgtctcctatacatgatattggttgggtgttttttggcaaaattggaatgtttggtatttccacttccttacacagaagcaaatggacaattttggcatttcggacgctccatatggaggtcggcaaattacaattctgcaccctggggaggacataaaaccattttcacctaaatataacttttaaatgacacaccactcccaaattacaaaacgattcaaattttgtagggggttcagatgtgtaaaaaaagtcaggaaaagcgatcccctctagaacatcttctatcctaccctatcaattgtttagttgccagattaaaaactttggccgtgcgcggtggctcacgcctacaatcccagcactttgaggcgccgaggcgtgcagatcacctgaggtcaggagttcgagaccagcctgaccaacatgacgaaaccctgtcgctactaaaaatacaaaaattagccatgcatggtggcgggcgcctgtaatctcagccactcaggaggctgaggcaggagaatcgcccctgagaatcgccaccaggaggtggaggttgtagtgaaatgagatcacgccattgtactgcagcctgagggacttttattgaaggccgcagagttaatcaacagcagaagggctcacgtggctgggaggcagtggaaagcgaatgtgtaagaggggggtttcgtgtgggaagcgaaccccacatggaggtatggctgtaccggggcatgggggcccttacccggccgaaagaaaaggagggcgctggtgaggtagctaaccacctccttgatctgatgcttttccaaatactccgcggcttggagctccctgctgctggtctccatcgctccgcgtcccgctgttgctaggcgactgcctggcgtctcagccgtgcgactctgtctccctctacccggcgcggtcacgtgacacgcctgactgccctgtggctgcgacccggacctggaatttctagagctcacggttcagggcaagcctggggcatgtagcagggcagagagggcaggtgaggtgtggaccaacgtcactgtccgcgatccaggcttagggctgggcccaggtgcctttttccatctctctctagcacctagctcggtacttgttgatccaatgattaacaaggcttgaagtgctggcatcacaactcagcatgaactaataacagaaggaacttgtgcaattttgagggtgcccagtggagagttctttttattattattatttaagacctttattaacaggtgcttgcagtttgttgacttttttgaaaaaatcaagttgtaaacttttattacaaattaaaaataaagtgcttaaaaatctcatcttgaccagatatgaaacaatttaaaaacctttaaaggcgtattgagaaaaacaaggctttttaaaaaaaacacgtttgttattaccaaaaagagacatatttaggtaaaaataataaaaaccccatgctgcatagataatgcagatagttctatttatctggtcaacgggcaaaaagcaagcacttaaggtcttcagctccaatcttttgttcatttcttattgctggaatttcatatttcttcttgttggatgactaaaccggatgatggtagagatggtaagccggcatttactcagccccgccctgctcagcctcgggagcagacgaattctcagctggtggattggctgattttgtctctttgccatcttgtgatttagggttttctgggcatctgcgttggtaattgaagttgctgcggtaccgacgttgaggtggctgctgaccctgggtctcatctccttgattttatcttcttcattgccgtactctctaggctgtctttggcaaggagggcccctgcggaatcgtggtctatatccccgatacatattctgcctcactggtctaccttgttctcctgcaccctggttgtcagcaccctccatcacttctccctgcacaggagggctggaatactgtggtcgacacccatagggtctccgcatgtagtaaggtgggaacctttgcctgcggtagggccggcattgttgggcctggccttcgggagcattctccgatccctcggtcttttccccactctcactgttctggtaattttgctggtaattgcgtggaggacccctatgacgtggatagcgtctataatggttacgatctgctgcatatttaccgccttgaactcgaacaccaccaggatctgtaacatttgctgcctccgcaccctcttctccttcaacaacatcaaactccacagtctcttcatctcctacactgcgaaggtacttcctggggttattctttatggcagtctggtgtacaaatacatcttccttggtgtcattcctgttgatgaaaccatatccgttccttacattgaaccattttactgttcccaaaaccttcactgcgatgaccttcttgtccacgctggcaggcgccgccgatgtgaggccgcccggaccaccgctccctgcgcagctgcccgtagtgccgggcttggtgtcggcggcgctgagggcgggggcggcggggggacgggaggggggcggtggggggaaaggcgggggcggcgggtggctgctgggtctcggccttgctgctcattggttgcggtgatggagactggggccggctgcggcagctgcggctcctcccgtggtatgacggtaactaggccggcagcggcggggctgctcagggttctctggggtccgctctccggggtccgctctccgctcccgctaccgatcgaactccccagtggagagttctaagtggcatctctggtgtgagcggcctgcaggcatggcgctggccaccagtcaggaaggtcttggcctgttggctcgactgggttgtgggccacagagcagcctgg

SEQ ID NO: 1882677 - DNA, 4001 bp, Homo sapiens
cctcaccctccagagccgtgagtcctgcagaccaaacagcgtgacaggtcctttccctgtccaggaggcctctgtgggtgagagttggctgcggacagggcgtgaaggcacttgagggtggggaagtgactctgactgggagatgctgaggacagggaggaaaccaccagataagggacactggggaggaggggtggacccctcagggccaagcacatggagcctcatcacaaaggcaagatggtggccaaattcaaggtcgctgcaaaaggaatggagaagagagaatagatttggcatttggaggaaatggtgacaatcatgagcacctacccgggactctccatgggtgctatctctacataaactcattccaccctctgattaatccattctacatatggggaaacaaaggcatgcggtgtttacgtcacttgccaagatctcaggatttgatccaggtggcctggttccatggtgcagcctctcagcctgcatggatgccccagctcagagcatgactctcaggacaggggtcccagcagccctccctccctgagcagcagggtgcccgtgctgcaccacttctgtctaggaataggacattctgacactttcctgcctcttccgaggtctagcacttactctatgcctgcctgggaaggtggcaagctggcctgaggaacagactcttccattttttagggagctcaaggccacagatgctctgagatctggagtccagagacaggagcggaggcttctcctggtgaccactctgcttaaaaacttcatcagatccgtagtttcagagcccccctgaaccccatcccttacctctaccagttgcaggtgggtctctggggtggggctgccctccccaccagcaccccaagggctaaaaggttgaggggagaacaccatcatttgtacagggggatcctggaagatgaggcctgagaaagccctgcggggcccctcaccttctccctagctgtggccaagagtgtctggccttgcctgcctcaggaccagcccaaagtggaggtgagaggtgagccccagcccccaggggaagggtgatggtggtcttggtctcagcatggttctggtagaggtgggttattttgaagatgatgaaccttaagcctctttctgatcttgctttaaataaatacttctgaacaacagcaacaacagaatagtgttgataggaaagccctccactccaccagaaccacgcggccttctcgtcctcccctcctccacttccttcctaagtcactgctccatgagctcttccacaggagatttacaaaatagaacacaaacaatccagttcccgcctctcactctgaactcctcccaagactcgtggggtgcggcagcccctgggaacacccagcccttcaaggtcaaacacagcccccgcccctcactctggggtaccctgccagaataagccccgacagccatgtggagcagagccttcttttttgtaagtggaagttccaggctggcttttcaaatccccttttaacctcagtgctgtatttcaaaattcattccagttttcctgtagtaattaacaaaaataaatattttaatttcaattaaagtgagggtctcggagaagaagcaggaactgagtttcctgagaggccccgctgaggctttgttgatatttcttcctgcgacctctgctcggaccctgggagctcacaggccgtatcgcagctcttatctttggggaccagttaaagcataactgcgccaggcacagagttgtcctttcaaatgtgccggcagtgggacggagacccatgcgtcaagtctcctctaagttcacatgggattctctccttgtcccaaagctgtctctgacttaaaaccctccaactgattacctgaattccagaatatgtcctgtgctctctgccctttcccacgcctttggtgaagaccggtgttctgaggaaacagacactgtgtagaaatggctcaggtcctttaaagccctggtgtgaggagtggggaagggctgggccagaggtcagctggatttgttagattgacagagtgacgcggacttccccagaggcacgggaccaaggtgcatgctcacgctgtctcatgctctcacacataatgtgtgtgtgtgtgtgtgtgtatatatatatacacatatacatatatatatatacacacatatgcatatatataaaaccccaagcagcctctggcttagcaggtgcatttcccagcagggcaattaaagccatggtcccagtagtggtcttggggtctcagggtatttggtctgtgcagccacatgcttcagtctctggaccccaggtcatctaacgaggtggtcgtgtggggactgggatagaaaaggtgtctgcacggacgtgtgtgaaagggctggcacatcgccagtgctcagcactgtcagctgctatcaccagtcattcaatcattcattcattcagttgttcattcttcaacaggccgttttaaaaatgtgcccagtataccaaaatctccgctaagcatttaaagaggcagaatgaaagttagcagtggtggtgaaacgaagctgggaatgtgctctgagggcctccttgtgggcttaatgaatatgtagaaaccacgcattttaaatagagagggagaaagggagaggttcctggtcctctgcatggggacttgtgtgtggctctttactgtaggcctgtgccactcctgctcaacagctaccacagaggacgccttcaacaaatgtgaagaacgaacaaaaggtacaaatgtgaagaacgaacagggtagaaagaaaggagaaagcaagggtgagggtgagaaatcaagggacagagaagagagaagaggagatagcctgggagttcacacagccaagaaggtagacactcagttgaaccagcaagaggctgagcctaactctccctttcgaatgggcaggagttcatgatatttaataaacagaggccttgctctgtaagagacagggtaccaggcagagagcaagtcagcatcgcaggagtcaaacgaggcagacagcgggggcagggagcttgcctctgaaggagacccaggctgccagagtagcagggagtctgggccagtcctcttttgggaagcgcttcctcggcttctgccccccctctcctctccctttccacccaccatcctgacataatacttcctaatctggaagtgttgtccagagaagaacctgctcatttcctcttaagtaggcagggaagcactaacgtccagcagcatcggaaacccgtaggagcgctctcggcagtgcagggtgaggggacagtccatgtagtcatgagacgtgggtgtcaggcaagcgtctcttttccaaaagagaaaaacattaaaggcctcacaaacggcgcccaaagactaattctgcatagcatctttgcgagaccctaggttcttatgatgactggttttgcctgagaaagaaaaaattttaattttgctctgacatgccaattcaacaaatcattttcacataatattcatgcaaaaaaaaaacaatttgccagaaaacttgggaatccatccacatctacagcttttccctgcagtcacactacagtgggatccctccatacaggagcggcagagtggagcaggctagagatgcctgtttgtttctgtttgctgcaccgcagcaagcatttctgtcgtgcccactctgtactagaaagtacatgaacatcagccataaagggaactagaaaggtggcccaccctcttggtggagagagaagagagtgtggtagaaacaataataagaagtctgcagaacttgacccctcccagcctctcccacctgccagcctggcccttgcagagagatgcaggctgccattcttaggccaaagcctgggacagttgggctcagcaaggtaggcatccgtcaagcaaggaggagcaggggtcagcagtgaccccag

SEQ ID NO: 1882678 - DNA, 4001 bp, Homo sapiens
gggaagatggtggaagatgctctcatagaactgggttcactggtaacaagggagatcccaaaataatagatgctaagtggctatgcttaaccatcagaaggaatgtgtgcacgattgctgtaataagcagcaaaatcaaagtggaagccaggagactctggcccgcagaaagctattcagttcctaggggtaggaaaacaaagattgtttctcaattgtaataataaaatatattaaggatgagtgacctggagcatgggggcaggtatctcaataaaatgtcacaatagtttccggacctgagcgaaatctcagatctggaaaccagattttgattggccaaaaaagaagctaggtcttgataaggaagtattctgcaatactatggcaagtgtatatggcaatgaattcctctgttttcttccaaagcaacctatgaccaggacaagcttcatgggcctatcatttgcctctgtactcagaagggttctgtccttggtttaatgctctgctgttattatcctgaaattcttattaattttttctttgactctgttttttttttttttaattaccaaatgtatttatttctcagagttcaaaacattatgtgagaagctttcctggcctagatagagatccagcttcttatgcctaaaactcaaatttgaagtattttattcatgtccctgcaagggacatgaaatcattcacagaaaaccaaacactacatgttctcactcataagtgggagttgaacaatgagaacatatgggcacagggagggaaaaatcacacagcggggcctgtcaggggctgggaggcaaggggaggggtagcgttagaagaaatacctaatgtagatgattggttgatgggtgcagcaaaccaccatggcacatgtatacctatgtaacaaacctgcacgttctgcccatgtatcccagaacttaaatataataaaaaagaaaaagaaaaaaataagaattcataaaaggtagaggttgaaaaaaaaattcaaagtactgtaggttgaagtagtagattatggttgtaaccatcctcactgccactgctgtagctcttgccatcaggatggaaggcaacactgttgataggtccaaagtgccccttgactcttctgaactcttcttcaaaggccaaatggaggaacctggactcaaacttgccaatcctagtgaaggttgtggttacatccatggcttcctgaccaccacccagcacaatatggtcacagttgggggagagggtagctgagctgatggggctttctgttcagaaagtcttctgatgttgaagagtcatagagtcaaaaagcttggctgtgctgtctttggatgcagtgacaaacacgatcatgtccctggataactggatgtcattaatctgctaggagtgctccttaatattcaccaacacctctccaggcttggcactatactggttgagctttccactctcatggcctgcaatgatgcactccccacaggagccccaaatggcactagtgattttagagtcactgcaagggatcttcaggtagcactcattgctgtcaatctggctcagatcctgcaggtcaaagaagctcacaaagcactgatagcttttctgcttctccatggagaacgtgatgatattgcccccaaagtcaaaactgcagatccacacagttgaattggtcttgagtagggccagctgtttccctgtttcacaggcccaaagatggttgtcagctgaatgggtgaggacatgcttggtgtcccagtcagcgtccacataccacacagctctggtatggcccatgtagatgcccagcctctcaccattcacagagtatcatgcattaatgataggttccttggccacggtgaagaggaggtctccttcacagttatacttcacctgcctaatgacctgctcatggccctacagtaggaccagcttcatcccagcagtgatgcaaggaaagctgcaactgattctgtgttttatatgtctgatttaacaaagactatgtatgcaagcagaggagattgagtaggcaccatctgtgtgctctcccattcttgtcattccatttgcacatagcattgctccatgagcgcggaagtctagtggatcaaggaagcacgggaattcattgagactcagagtgagtacaagtgtgttgcacttatgactaggtaatgtggtctcgaaggctacattttccagttgaatcaaaacttgctttaaacacagaaggaaggcagttacattctaagaaaaacaatgtccagggagcccttttatctcccgccttactcttgttacttgcctgcattcgtcaaccacttatgctaaaaatgatgatgcagaagaaaagagagcaatctgtgttcctttcctttagacattcctgactcatagtaacctgaaggtagaaaatgttggtagaacgtgtgcatatcaacaagtaaaattaaaatggttgggttttatgaagcatctccatttctgaaaagaatgaggtatatatacaatgatgagttagaaaatatgaattatgtcattttggcaattcctcatatgaattaaatgttctcatatttgcctttaaaactagcattgcacaatattaaggtgaacagcaaaatatatggtaataatataaagtttttttttttaactttagggtaataaatagcaaataaaaaatgccatgacaaatctcagggtaaagggtacctttcaccatgatgaaggaaggataatacttgctaaggctcctcagataatagacgcagcatattcctcatttgggaatacttcttcaacccatattctaagtaatgtaaaaggcttccagctttaagtaggacccagagcagaaaagaagtctgcatcaggtctaacctgtggaacatacagctggaaagcacacagttatgagttcatgggaagttcccatagaataatcacaacatagacccatagcattcaggattatcaataatgaagaataataaacatttttgaaaaatagctccttgtgagctattgaacctattaaaaaatggagacaccagttagccagaattgtccattaaaagttgtattctatcagacacatcaagtcacagtacaatggaaataatagattagccatgactagaggcaatcaaagggttatgcagacgtaagtaggatgagcaaggggtcaagaccctcatgttttctgactctcttgaaccagcttttccctcagttcatagctatggccaaatgggggatcctttataaccagctgatggaggagagaatagtcaaaattggtttaaggataaaatttggttcagaccaatcctaatgggaagaactgtaagtggttatctcggtaatccactttgtacggaaagaaaagtagtttgaaatagaattgttatcaaccctaagggagtatcaaacaacctaattgcttagtcaggtgcttagaagaagaaacattgataaatcagagctaaaaaggtcagaggcaaagccatgtggagaaatctgtaggcaggggtataaagaactttgcagcagtcagccagttgatgccagtagcctttttcattggccatgaatggagaaagtagcacagtgacagataaaggctaacagcctggggtacactcaacaaagttagtcaagctactactgctaaaaaatgttcaacttgcaaacaacaaagacttaagctcagttctacccatggcaccatcttttgaggggtccaacaagaagtctggtggccagttgcttacattggactattccagcctggaagagacagtgattcatctttactagaatttacacacacatgttcaaggtaaagttttgcctaatgtgctcttagggcctcagtcagcatcactatcccatgggtttacagagtatttgacccactgcacaggatcctatacagtattgcataaaaagcagtctataga

SEQ ID NO: 1882679 - DNA, 4001 bp, Homo sapiens
aaacaccttccttgcagagtgtgatggttaatactgagtgtcaacttgattggattgaaggatacaaagtactgttcctgggtgtgtctgtgagggtattgccaaaggagattagcatttcatttcagtggactgggagaggcagacccaccctcaattgggtgggcatcatctaatcagctgccagtgcaggtaggataacagcaggcagacaaacgtggaaggacttgactggctgagtcttcccgcctccatctttcttccgagctggatgcttcctgccctcaaacactggactccaagttcttcagcttttggactcttgggcttacaccagtagtttgccaggtgctcccgggccttcagccacagactgaagactgcattgttggcttccctacttttgaggtttggggactcagactggcttccttgttccttagcttgcagacagcctattgtgggacttcaccttgtgatcgtgtgagtcaatattccttaataaacttcccttcatatataggtctatcctatcagtgctgtccctctagagaaccctgactaacatagaagagttgtgaaaatgaccgttggtctgccctcaccctttccctcttgtcctttaaccgcatgcgctcagtgttaccttccgtggcacctgctcaccgtcatcccgtggtgactcgtgtgggtaacttcatcagagaagaccctgcctgtcacctcaggtacagcccacgaagtaaggtggctgcaagcgcagatcctgcacctgcccaaggtgaaacaaatcagctcccggagcctgaggtgcaaagggcaggaagctccctgcgcacccctgcggccccagcgcggctctcccagtcccgctgcctcccactccgagcccctgccgtctgggacccgctccacctcccgctcccgggccctcggggcatcctgtctccattcgcagcccagtgccctccactcccacggcctcgggtacagcttccacagggaaatcacccacatctgtgtctctcgcctcgttcccagtcctgaggccgacgcatggccactgagcacacagatccagcacagcgtccctcgcctttcccgcgccccgggcagaggatgagcaccaggccagccctgcagctcacgccggcagccctgggctggctccgcacccgcgcctcgggcttccacggtggacccaggagacaccctctcgcccagcccagcttccctgcgggactgagagggagaagggaggagtcggggagcgaaggcggaggcagagctgggctgcgggaggaggcgcgacggcggcaccggcgggatggagcagcgggatcccgcggtgaccgggcggatggagtggccgagagcgccccctgccggccaagggtcccccctcacacactcccggtgtggccgggaaggcgggagccgggttccctgccgggaaggcgggagccgggttccctgccggtggagccggcggctcagccgggccccgcacgcaccggccccgcagggccaggtccccgcctccaggcccaccttcggcgctcgcaaacgtccgggtggctgcggcctggccaccatccaggcctcgcccaccggcagttgcccgggtccacacagggacaagctcggtctccgccgcgtcccgcctgagcctcgcccgcgcccaggggactccacgctgcacagggagagggccgctccgtgtgacaatgcaagaagggcgagctctcttttccacctgtctcatctcagtgtgaacggcgccctggaaaacagaactgttcagggacttctgaggagctcggccaacgctcttgcctccctacattttcccgaaatctgcctttcaaacaggcttcctcttgtcacagacgaacccatctccacgttagagtgcatcgtggcgtttcctattttcataaaagccagcgccctggaattgtcagtctgttcttacactgtgagtgtaacggccctctgttaaatctcagcaaaccctcgcgcgccagagaggccagccccagagcccgcgccctggaacgcggcggaccgcgggtgccctctgcgggtggcgcgtggcctgcgcagcgatcaggtcctcaagtcccgaagccccagtgccagcctccgaaaagctggcccggcaggaaggagcccagttcctgcccactgccttccgacgtcctgtaagtggaccccgcttcccgggcctcagtggtctggtctggaatgaagagtctgagccaggtggtcccaagcgctgccgggctcccacattttctgacaatgaggtaatcagtcacgtgcacttgccaaggtttgggcaccagactctttgacacctggtgtagactcagcaaaatcccatgagccactatgcccttcagatcaatggactatcacctacttcattcggacttttcgacctcaggtgagactggagagaaacctgggacagaggagacagctggctgagattcccgttcctgcgtctgaaggctggagggtatggagagtccctagacagtggcactcacgcctgctgcgccctgtgctgcaggttgtacgcgatataaaacatgacactgactgcccgtgaggatcttgacaagttgttttgaagatggcattttgctaagtccctgagggtcactggtcctcaaagcggcatggcggcatggcgtggctggttctgccacatgccagctgtgtgacctctgagactccacttcttcagtgctgaaaataaagaaggagttttactaaggaccaaacaagataatgaatgtgaaactgctccacgaaccccaaagaattatgcacatagatgcgatcattaagatgcgaagccatcgagttaccacctggcatgcttaaactgtaaagagtgggtcaaagtaaactgaattggaaaatccaaagttatgcagaaaaacaataaagaggtcttacgtagcaataccgaacttatgtcaggcactatttctcaaaacacaactccactgagatgctccaaggaaagaaaggattttgtgggcaaaagcttgatgcccctctagggcactcacaatgctcgtcagcacacagagctacaaatagttcagattttgccacccaatttgttgccaaaaacattcaatttccagatctgctttggatttcagaattgcagattcaaaacattgtaaaccctggattaaaacccattaaaagtttcctgtctgagttgctcctatgtctctcgtctcttcagaagaatttatctttttctttttgacaatcattctttcataagaattggtctttcaacctacttttagttcacctagttgttggaaatttagtagaaaaaataaccttgccttttagggttgatttaggttaaaatgtctaaggtatataaagtgcttatcatgtaacaaggcacacgagggtttattacgtgtgatacacctgtggtggaaggggtttcttgtggcctcaggtcatgcaggagggattccaccccacaactgctccaaaaaaagcacccatgccaccacctcacaccaatattctgaaccccacgatagtgacctaacaagtgtaaataatagtgaaaatcacaggacagactagttgaactcaggactgacctagaacatatgatatgccagatgacatgagagatgtagatagacgacatgagaaaatgagatcaattgtctaatagttgattgatccttcaatgccagatttttatctgccatataattcttactgattatataggctgaaaggcagaggagggatgatgattctatccaatgaatatggagaatggctccaaattttaactctctaaaacatcaccatgtgctgtgtcttttcctacaaatcaggatcttttttcaaccagtacatacctccttgacctgacaacacttaatataggcaaaaaaaaaaaaaaaaaaaactgttcccaagttgagtataatcatatc

SEQ ID NO: 1882680 - DNA, 4001 bp, Homo sapiens
gagcctctgggtctgaggcagcaagtgtgctgaggaggggaccagggctggagctgggtctgtgaaggacagtaacgcccatgcggggtctccgcacctgccctccgtgccagacagcactcctttctagaaatgttgtttaatgatcggatcgctggacgtggggtgcagcggcaggtgtgagtgcggatcagcgagggcacaggctggcggggcatcgagagtgacttgagtgagcgagcccagctggaaagggctttgggggggcctgtggtctgtccagaaccttcctaggtgattcggcctttccctgtttcctgtgccaggtccgcagcctctgcccttggggactcctggacccgggccaccccccgaacccctcctagcacagcacctgtccagcctctcccccccggcccctgacaggaggctgcacagggctgactcacagtgtgacttcggacaagtccttctgtgtctgtgcctcagtttccccgctgtaaagtgagctgcagaatgaaaacttcggggccccttggctgggcatggtggctcacgcctgtaatcccagcactttgggaggccaaggcaggtggatcacctgaggtcaggagttcgaaaccagcctgaccaatatggtgaaaccctgtctctactaaaagtacaaaaattagccgggcatggtggtgtgtgcctataatcccagctacttgagaggctgaggcaggagaatcacttgaacccaggaggcagaggttgcagtgagctgagattgcaccactgcactccagcctgggtgacagagcaagactctgtctcaaaaaaaaaaaaaaaaaaagaagaaagaaaactttggggtccctccaaagctgggggccatagagggggcaaaatctgtgcctcctaaggggctgtgggcccacccttcctccctggcagggcgctggccacactgggaagtcgtgcccacacgccctaaagatctccctgcccaggagacttggcagcgaggccaggctgggggtggggggaggactccctgagcccctgcaggccaggctgctgctcacctgtactctggggcaggggccgagcaggaaggtgagggctggactctgggctggggacggcctgcctccctcatcacacaggctccccagcctgatggaggagggctcagagctgggtggggaggtgaggctgcgttcccagcaccactcccaaggagtctgatgcacagattcttatactcacaatggggggagtggggcatggtggtacggaaagggctggcaggggatgaaccaggtgagccaggaagggggagagagtgtggcacccagccaggccctggagatgtcagccaccggtgcacacttagagcgtgtttcctgcatgcatgcaacatgccagacatacagacccccgtgcatgtgtgaacatgaggaggaaatctggggggctccgagctgcactaccgaggtgccacccacacctgcctccacccagccccagacgcaccagagccccaggcctcgctgcccagacagggggtcctcagtgacacctgctctgcccagggccccagtgagcatggcctgcgcactcatgtacacaatcacctgccctgtgtacacacctgtgcacacacatctgtacacacacacagacaacctggcacacacatacgagggctcacgtgtacaaacacgtgtgtgggtggacacaggtatacatgtgtccacaaacacacatgcacacacacacacgtgaaccccatgtgcatgcagccctccagccctcagctgcgggcccaggagagccggagcagccccaggcccccaagcctcctccctgtgcctgtggtgagggctcttaggccctgtaatcctccttaccttgactttgggttattttgagcaagagattaaaggtgattacgattgtggctgaggcgccacgcttcctacacgcttcctgtgcggccgctggccagacccgcccttccggaggccgggcacagccggacgccatccgccccatgcccttggcccgcccccggccagcacgcgcctctgcctgagacctgggcccccaggaggcttgggaaagctaaatcccagcattggcacaggttgtctgggcacggtgcagggatggtggggagggatggaggggctggcgtgggtgcgagctggcaggtgcacacggcatgatggtgaccaagacagcgctgactcccgtgatggtggatttcacatccaaccggaccacgtggggaccccattttccctacccaagcagccccctgagccatttttgagtgggcctagccaggtcctgcccggctgggcttggcgtcccctggccactccaggccaagccctgggttagctccccgaggcccgctaggacctcgttgtagcccccatgccgtctgacttctccctctctttaaatcagaaatagactcttctccaggagccggaacaaaattgttctttatgaagtttccaaagggaggaaaaaacccattttacatcattatattttttttctctaatttaaaccgcttcagtgcagactagttgcaaacgtcaatatcagtgaaatacacccagctggctgcccgccaggccacggctcggtgacagaggccgactgtaaatccacatattaacaagcaaacacacccatttctctatcctgcagggaaaacacaggcggccgggaggtgaggtcgcacaccaggggcccccttatctcgagggtagtggtgggggggtccatgggggagcaggagcccagcgggatgcctcgctccccggacgtacctccagccccgtctgcagggtccttcctgcctggggcttccccgcctacagctcggtcgccacatcctctgtgtccaggctcagcagacactaggcagatggaggaggcaccgtcctgcctggagaccctcagggtccagtggaggctgaggaatagagcagaggaccccgtatggtggtggggaggatggcaggagaggcatgcggctcccccagggacctcggagctgtccctctcccagcctgaggaggatgtgtggagcctggaaattctccgcagagcaagcagttcccttccttccagaagggaggtggcccctatccaccaaggtgaggtgcagacagtgccaagtcccagtgccgggtagacgccctcagagaccatccagctggctcatttggggaaactgaggcccagagggggcacagcgtgccagggacacagggcgggcgagctcagaccgagacctggcagacacgagtccccggacaggccagaatacctcccggtgcctccctcccagagggctggagaggagcccgcgccccggaaggattctgtgttgagggctgcggaccctgcggtgagtgcgcagggtagctcctacaggcggctccaggggcgttgtggccgggcctcctgggagcagaagccccaggtgacaggcaccgtgcccagtgagggccttcacacgcacatccctggccgcagccagccggcggaagcccagtcactcctcagccaagcgactttaggtcccagtcccctgcctcagttcccttatccgaccggggttgcgccgagagtgaaatgggcttcagggacctcgattctgggctgtcagtaccttggaacatggccaagcaggcagtgccccgtccattttgcagatgaggaaactgaggccgagagccgaggagacccctccacgggagggtgaagcatttcctccgctatcctgacctgtctcaggaccccccaggggcttctgaggaaggagcttctgttttttctgtgttttacagaagagattcagggggctcagcggagcagggactcaggccacattgggatgccgccgctgtgagatgccggccgtcccctgaccgctgtcttctctcttgtcccctgaccgctgtcttctctcttgtcttgcagcaggaacg

SEQ ID NO: 1882681 - DNA, 4001 bp, Homo sapiens; identical to SEQ ID NO: 586398

SEQ ID NO: 1882682 - DNA, 4001 bp, Homo sapiens
agattcaaacacacacacacacacaaagatgacatggagccatatgcaactgccagtattggactgtttttgtctgacaaatacagcaatttcaaatggctcaaccaaaaattattgtacattcgtggaatcagttgtatttacccataagcatttactgttggtttctgacacagtcttcttctattattcacagtacctatttctctttctttattctgtgatcatttaactcaccataataagttgtagtaaagtctaagtcaggagcattggccctggacccaaggagtgggattcacaccctagctccttcgtttccttgctgggtgagcttgagcaggttaattgccctgccctgtatcccggtctcttcgtctagagactgatcgtcatggagttgttttgaggatgaaatgaaccaagattaggtggaaccacatgaaatggccaatattggaccacgtctgaatggcaaaatttgtagttctgttctgctcatcttaatcaatgaaaagcatttggggccattcccatgagggaaatgacacgaagatcacacagcacacatggcgctccagatgaggcatggagaggcatggattctagtccagctctgcctgtgacctcctgcgtgacccggggcttttctcctatcctgcactcaccaccctccctcctagacaatgctgtggccccggggatggcctccttctgtgctttgaatttcatcccctctcacctgctctggggctctgtccgttatcatttctaatctttgcatcattagtctcttcctctcacatgctgtcttctcaccagaatataaacacacacaaatctcccacattcttaataataaataaatgattttctcaaccccctattcacctgtgcccctgcagctcggtttctgaagtcattgcctcagtttcccagctcgccttttcatgtattaatccactgcagcctgccttctgcccacaccgagaatataactgagcaaaagaagagaaataggactctaaaaagcactaaaatatagtgtcagtccttgaaaacctctttagccacaaaagtcactgattttgacaaagaatggcctccggtggacagttttaaatctcaatcttgtttgccacctttgtagcccttgaccctgtgaaccactctctccttaaaaattttttttactgtgactttggaaatgaacatacatgcaagatagatatagatatacagatatagatacagacatatatatatttatatatgtatacaatgcacctaagatatatgtacaaatggcacattgaatatacgtggaagaaataaaataactattattgttccagttactagcaacatttttagaaaaaaaattaaaggataactaaaaatataactgagctcaagagaagaaatacgactccaaagtgcattaatatatattttgaatacttgaaaacctctgtagccacaaaagacatgatttctaagaggcaagtgggaattgagaggagtcgttgagttgttctaaatttaagactggaaagaagtcacattgttctgaatccctgctctgatgaagaagagagacatcaaaaaatttataaaaatacatcttttatcccttacaccttcatgctattcgcatcctcccccacccccatctcttctcttcagcctaaaaatataccaaaatcattcctttccttaaacaatattttccaaccctgttcctctttcaagttcttatccaatctctgtccgtctctgcactgccaaattttccgggagagaatgacatctccactttcccacctcctcacctcgacgtggtctgatgttcacccacacccacctgctgcaattgcttcatttagctcaaggtcatcttctgattgttcttgttcatcctgttccctggctctgaggcattgacttgtgttgcctcctgtgcttcctgggatcctctccattcctcattcccatggcactgacccctttagcacaggcattccctgaggccctcctcttttcctctcctaccactgcctcctccccaccttcaaccagcacctgaggcagacagaattccaccctcatcgtcttctgagctccacccctgtggatggtctgcagactcctcaaactcgggatgtccaaagctaaactctccattctcatggctccgttcctgctgctgcttctgtgggctctaactccaggagtgacaccacaatcaccccatatcttggacttgaaatccaggagagatctctggcttccctaccttttctctctagtaggtccccaagtcctactgattcaccactctatgagaagggccacctgccttttaatgctgtgactccactttcctgcaccattatctcagccccagtctctgtgcaggaacacatgccagcatgaaaaatcaattggcttttgtcaggccataaataccaccaaaagaaaatctaaaggtgttgttaagacagaaaaaaacaaaatcattttccttctctcctggaaatagcttaaattttttttctggtcttaaaagaaatcattcctctcaagaatcactttctcctgtcatagcttagccaccctgtgcctttcacttatggactcagtttgttctgtatcctgccttcccgccaccatcatctcttgtgtagacgatgtgtttgttttttaattggtcttcctaaatctggacttgacccaagcctaagttctctctcccctagctgccagaaacacctttctaggacacagctcttctcatgagacatctgtcttcaaaaacctctggctctctcttcttccagcaggatagaaaaactccacattctgtcctaaaccactcttccaaacaacatgtctattacgtctagcagcacacctcctactaacctatcgttagtcatactgagtgcccagcatgccttgcacttcccagtatctgtccctgattgtgttccctcagcaaggaggaaccttcactctttccggtgaaaaatctgcctgtccttcaaggcccaactcatgggccctgcaaagtccctccatggggacaggaggaattttccctcttatgttcacttttcttcccctctcttgtagcacttaacttactcagctatatgctaagttcggaaacttattttagccaattatctttgatttaaatgggttcccattcattctctgtcccacctcatggctaccttgaggcaatgctgcagaattccaaaggcttgaaaatcatatctactctctctgtttcttgactctacccctaagaaccaggactgattctcactcacctttctaccccagagtgcctaccaaaaagaaagaaatatatatgagcttaacaaatgttacttaaattgaatttttatcctattgttgaaaaaaatagctaataatgtttatttttaaatcagctgataaggtcttaaaaggaaaaagcacactctaggacaaactttgcaatctacagaacaaacagtcttatggactcagtttggcattgaagggcattgtgtggctatgacaggaaaaagagtgattcttctagtggcgatttcttttaagaccaagatgaaaaaaattaagctatttccaaaagaaaaggaaagggaatatttttttctgtcttaaaaacgtctttggattttcttttggtgatatttattgtctgacaaaagccaattgatttttcatgctggaatgtgctcccacacagacagggctgagatgatggcaaagacttcccttcccaaaccacgctgggctgagtctggagatccctggcttccagctgtttgtgaggtcaattacacccctctgcatggggaggagacaaggttcctttggctcatcatcctttggctcaatgttggaaattcaccaacattgattatctcatttgtagattatctcatttgtataatacagccatttagaatcatagtcattcaagg

SEQ ID NO: 1882683 - DNA, 4001 bp, Homo sapiens
ggctgaggcaggaggatcgtttgaaccagggaggcggaggttgcagtgagccaagattgcaccactgcactgcagcctgggccacagagcgagactccatctcaaaaaagaaaaagaatataaggaagtccgcaagaaagtgagagggcacgtggtttgacaccactaagatgggttaaaatatccttccctgccacctgtggctggaaccttaaccagatattcatgtctgctgtgtaagtgcatgtcaaggttcaaactccttttcttgtttacccagccctggcccacacctgcctttctgccctgattcccaagacaaatcctgcgccccagcagtcaaactggtccattcaccactccctgggcgcaccttgaggctccctgccttcaggcccttgctggtgcctttcccaatctctgccactgaaaacccaggtcacaccagctctccctgaagactcaactaatgtgccccgatgactgggcttgcttcctcttctaatctccagatgcttcactgcaggttgtaccccaccttgcattgtggtcatctaagcctcccctgctagagggtgaagatatgactcttaccccttgccttccccggccctattacccagctctggggcctgcacaaagacagaaagaggaatataggagtgtaattcaagtcagaggtagaattaggttaaaagctggatcaagattgggttgagtttaggattagaattgggaaaaggttcgtcaattcttaatcccacctactaggcggcgcccgcagtctcattcgggtcaagacgcctccggttcttgaatttgattaccagtctagcaagtttctttcctgccctactgtccctttaaggaggtgaaccaggtgaggccgggactccgcccccggcgctggccccgccccccgcccccgcccggcccgcccggctctcctagtcccttgcaacctggcgctgccatccgggccactgtcccaggtcccggcccggagctatggagcggcgctggcccctggggctagggctggtgctgctgctctgcgccccgctgcccccgggggcgcgcgccaaggaaggtaccgacccccgcccccgcgcccccaacccccgcgccccgccccttcccggggcccggccagcacccccctgcagaagccggcattcctaggggccatgttccccgagaccctcgccagctctctcgctgtgcccgaccgccaggctatcgactggccaggcccatctttggtctttaaccccaagcggctgctctcccgggtcagtcacccccactcccgcaggccagcaatctgctcctgggagtggggagggaattccggacccttgccaggaagtagcacctgcacccgcacccctgcctgcattcccagacagtcccagcttcaggtgcccaccccagagatctgagcccttggaagttgaaggtgggaagtcgcctcctgccaacctaggccagggacagagggagctgcctccgggagaagggttaggactgacgccacaggggttcccagttgtccgagtcgaatattccatgtgaaagttggaacaccctctccggccttactcccccccacttcccaggcaggtagctgtgcctcttatccccacttcacggctctgatcactggccaggtcaggccaaagcaggcttcggacagtggaggtgagcctccctacccaggaaaccccttctgaggtccccggtccaccctgcccactcctggctagcagaggtgagctcctcctgccctccacgcgttccaatcctgcagctgatgggtgtcccaggacgcagcagcctgggtaactgagcgtctcgtggggctgctcttcttgcattgactttggtcaaagacccagcgccccaacccttgtcccactctacctgccttccttcacacacacaaagaagagtgaaatccctggagctcttcactcctcagtcctgagccctttttctcccctaagcctcaggaagtcacagcttttaggaacaggatgttgcagcctggggctgaggccccagaatgattaatgtgggctgcaggggcacctcctcccccagaggtgacagacttcttttctccccactttcagttactctgatggacacaagcaaggcacagggagagctgggctggctgctggatcccccaaaagatggggtaagtgtcggaagagggaaggatcttggaaaactcctgaaggccagtgggaaatggggtggagaggtgggtggaggaacagagaaaagagcaggaaaaactggaagtgtctcctcagggagggggagaggaggctgagtcagagcctcctcaatgggacaaggggtgggggggtcagacttcacctcaagatgaacgcttgaatggcctggctcctccagtgaatacttgggaatattgtgaatacaagctgatacttgtgagggggagaggagctcacatacccggggagagaatgcaccatgctggggatggttgaaggctgagaccagtgctttgcttggggagggatagaaaaggcagaaaagcatcctcaatctgagatccattcatcccaatgaagttgcattgataggtttcagggggtggggaaaccccatgaaagtgtactctaaattctgtatatgtaagcgggcatttttttttctggagagaccagccaaagctttcatcaaattcttcaaagggtctttgactcctccgaagttaaaagctgctcccctaaaggtttctgagcccttagctcatcctccacacctcctcaggctgactgcgtgcacaccatgcattccagctgtttgaaagtgtcagagcttgttccagttcccttccttccttggatgttcctaagactcagtgaacaggttgtgaggtgggtctgagagagcatattcagactcaaatgcagagagcagctcttatgatgtacaaaaaaccaaactcagttttttcctactgcactctcaacacaaatcacttcggtgacctgtggtcaccaaaatgcgtgtagggattcctcccgcctgcagtcagttctctctggcagattcttcagtggacagtagctgagtgtcctctaatcttattcagttcttacactatctacctggagatagcctcaggttgagggctcagccccacaagactgccctcctctagacaacaatcacaagtaacatgttgtcacctatacttctgttccatcggctgtaatcaggtttacctgaccctcctcctcgggttcaattagtttgctaggatggctcacagaactcagggaaacattgacttggatttactggcttactataacggttattacaaatggtaccatgaacaccagatggaatagctgcatggggcaaggtatatgtgaaggaggcgagccaccctgcagggacctaatcatgtatggccatccagaagccctcccaaccccatccttctgggcttttatggagacttcattacataggcgtgattaattagatcattgcccactggttatcagctcaaccttcaacctctctaccttccctggaagttgggggtggggccgaaagtcccaactccaatcacaaggttgccttctgccacccaggcctcccccaccccagtctagttcccatccccggcagtcagctcactagcatataaaaagacatttgtcacttcagggattttgagggctttaggggttgtttgccaggaaatgtggacaaagaccaaatatatattttacaattcacagcaccctttctgccagcagcacagctggtcacagaaccacttagggggctgcctaagttactggagcatctacaactctggctctggaaccccttctctcagggtttccttccttaccccagtacttgagacttcaatccagcccctgtttctggggtcagggttacttgctttctttccctctgggtcctacagtcctggctccgtt

SEQ ID NO: 1882684 - DNA, 4001 bp, Homo sapiens
caaaggtccgagtcaggcgtcgctggtcgtccagaacactcacctcgtcccactgcaggaagggccaggagaagctttaggggctccgggcttaagcacggcgaggtagaggttatagggaaggggacatatctcttccactgagacttaaaattaatgacaagcaaagcagatagaggataccttgaaatcttggtgctctagagggagggatccttttcccataatcctcacccagggtttccttcatgaattccactctccagggaacagggaggggcagggccaagggattcaggttcagaattagagtggcactcaccccccctggtgggtaggtgagccagccaatctcagatgtctctccggtggtgtccagcaatacctctgcccagaaataagaggggcacacagtggccaagcctccagccagcactgccagcccctactctattcccaccgcgaacaaaagaatgccccacccgggcccatgtctttgccagcaggagcacagctgtccatcagggtcctttctctgacaaatctgatgtgggtcttcattatcctcaccatgcctttccctttattgatgtcttcactcttatctaccttttctaaatctttcccacttccccctttcactgggtctctatggcaggtctgggttctcctgtctcccctccctcttaccttccagagccagaactgaagacaccaggagcagcacccataggctacacaccatgcccgccactctgttccctaactgggcagccccttcagtagccatgggacatcttcagggcgtccaccatcgccccagccaccaccctgctcctgggtggggctgcagcttttgcaagactcagggtgtacagctaagcttgcttcctgaggagacacacaagaccagaagaggcaggtgggaagaaagtgtttcttcatatacagcccaagctccaaaagctgaccccgtgtctgtgtctcctcctacagctctccaatcgccccagcacccaccatgggacagaagccaggttgcatactgcctctcctgagccggtgcacatttgaccatcttggagtgttcgtgcctactccctgtgtgaccctgtctctgtgttcatttctcacagctctccttcctagaagtggggcagagggtgtttctgggtcaatcttaccctttttttttttttctgcaaggggttattccagttctttctcttcatttactctcctcccttcctccaacagccaccctgtattggaagttagaagattttcattaaaggcagctggttaagaagctgctgcatcctacagacacatgaattgaatcctcaccacaccgccccacccccgatggacctggatgctctagaaatttcagaggggcagtgaagcagtgaagcgggagggacacaggaagatggctgtggggtatgatgggagggaagggaccagaataaatacagaaagaacacaggcatgaagattcagtctgataaatgagacagtgcagggagggggcagagctatggaggtctggcatacactttgtgaacaaagatcctcgtgccccaaggggtgcatgttttcctagagcttacagaagaataaccctatggctttaacatatgaaaagatgcttcttgtttgctcacattgaaaggaaaccaggttaaaactacagcaacaggccatttgttatagaaggaatatttgtgccccccctccattcatatgttgaaatcctaactcccaagatgatggtattagaagatggggcctttgggaggaaattttaggtcatgagggtggagccctcactaatcatgagattagtgcccagatgaaagagaccccaaagggctttctcaccctttttctgccattcgaggacacaacaaagaagagggcagtctgaaacctagaagagaggcttcgccaggaactgaccatgccggcaccctgatcttggacttcccagcatctagactgtgagaaagatatttctattgtgtataagctactaggtctattgcactttgttatggcagccacagttgcctaagacaccatttttaccatgttggacaagatatgggaaataggttctcttgtacatactctgcttgaatccaaattggaatattctcttgggaggacaattgggtaatatctttccagcaactacattgtaagaatgtgtccttcaggtactgtatacttgtatgggtttgcacagatgtttgaacaaagacattaattgcaaattgtttataagagaaaaggctgtaaactaactgtccatcaattggaagacagtaaaattatagtacatccttagaaagaaatacgggcaactgttgatgcactgatataaaaagcatttccaagtgaaagtgggacaatggagaacagtgtaaagtaagctcccctttgttaagaaggatatatacacatacatatgtatggaaggatatctatggaagagcatccaaaacctgtgaaaaaggcaaaggaagtggactgagacccagtgcaagggagacttaactttcattgtattctcattaattgtatccatttaaatttttgcattcttaaactcttgcatgtgtattctttcaactaaatcattgattaaaattttctttaaaactataggataataactgtttagtaaagttaatcaaaacagtgttcatatcctcataatggcttctcagaactatgtagtaagctacctcttatataaaaccttcctgtgccttcagaaggtacaccactaagctcacgagcaaatgaacagaaggaatagctacctccagtgtcacaatgaagacaaacaggcttggcacctcctttgcttgttgatttagagattggcggttctctatctctcctcgtgtctgagtctcagaagtctgtgaattgggtggactataatccctttatttctgtgaagaaaaaaaagagacatgttgcccagattgctcaaaagacatagaactgagaggaaaacaaaaaaaaagccaattagaagagaagttgtgatttgtttttcctggatatatatggccttgggattgttgaaagctatcataaaacaaaaatcaaactatgaaactttaattgcaacaaatatgaaaatcataatttgattcctactaatttttttctggcactgcgggctgtgctgtccatgaagttatcatggaaatacaccatttctacatacgcgtgggctgatgtagagtgggcacctgccaactagcccctgaaactcaccttttatacatctttaaccctatttgtgaaatagagagttcaatttacagcctatggagacaagtaaggagcatttccatatggcaaattgctcttaagtaatgttctttgcaaaaatgtctgaaatgttactaggatccttcacagatgaaataaatgctttggagaggaacggggagatcatgaagtaaaaagcaggcatagctattaaattctgtaaccttggcaccgtcaccagtggctgtttaataaatatcctaaagtaattcatgttgtaagtgcatcccctccaaactctcaatggcttaatttggagacgtgcttgacacactgaagcaaaccagagtcacggagtccttagaaatactgttatcagggaaagaaaatgccagcagcaggtttttaaacaatgaaggctattttaccatttgcctagaagttattctttaaaatagtctctttctttcactcagaacatggatggattctgtaatctgtacaaagaagaaacagtaagccctgtgtcttctcaagcttacaactaggcaaataatcatgaagaaggaacaataaatattttggaaatatttcaatgaattattttgaaagacagccaagcaagatagaaaagatgcgctgcagatagtatcagctgtccaatatggaacactctggaagatgaatagcaagatatttgctttgat

SEQ ID NO: 1882685 - DNA, 4001 bp, Homo sapiens
caaacccagccaaaaactttgagtgcagcagctgctgctgccctccatctcctcttccactcatgttgggcactttaatcagaaaaaggggtcttaaaaacaaaactatgccttatccaaatcactgaaaggtaagctcattttgaagactgggcttctagaagcagagtcgccctacagtggcaacaaagcagataagtatctgcaatcccaacccccgtgccccctcccttctcattttctccctctccccacccccgacggagtcaagtttataaacagcaactttcaaactgatcactcacattggtgaccatgtaaggcacttgctggtcataaaatccatccatgctgctgctcttcgcaaatctcagctcagtattttatattttgagcatttagctggagatttcctcaggatctggacttctatcaacctagaggggaacaagatggcttttaggcttaaaaaaaaatcatgaatgaagctcttgaatttgcatagctaattaccctccgacagtcccattcacaaaaataaccctccctacaccgcctccttcacctggatccaaagagagccaacagagttcacaatttacatattttcggtagtagcaaaaatccgaacaagaggcgatgtatttatttacactctcgatgtttccctgcgcggtcggtgtaccccgggcagctctgattcgcaaacgtgtgcaaaactagcaatggcgatcaacgagacttgctttgcacctaacgggactaaagagacggagacacctctttcatcaggatagtttttgcgacccacaaccatgcaattatctggagagacataaaaagttgttggaaagacccacctgaaggccacgctaggcgaaaggctgcaaaaacttccctccaaatttaataaaaacattaattatagcccagcacttcccccttggaagccgaaagcgcctctgacagagctcaattcggtggtttttcctctacttctcctccaggggcctccaatccaaactgatggatcgctgcctcccattggctccgcgtctctttcacaagatcagatttcgggctgtcaatcaggcggcttgctgccccttcccgcgggtctccctcgcccctctgccctagggggtgctcggccggtaggcgctgggtcctcagcctggaagcgccacggagagactcgatttcctctgtaacccgctgcttattgttaaggcgcctggggatactgaaaccgtgtgtttcgagtcgccagttcccattattggggtgttaggtccactattgggctggtttccttaaagtactgttgtgcggttctggtatacccttagagccgcgatccacaaagcccgtaccgccttattcagctgccctcccctcaggatctccaacctctctactcttgccctgactaggagctcacctcgctctctatcctcattcccactcagcttttggcccaatttattttcccgtttttcaaaacccaccatcaccattatggtttatcgaaacattttttaaacagtcatcctcaactaaaattagatcctatcgttcgtgggacagaaacataaagaatctataaggaaggcacctaggagatgcagaattgctgattagcagaggttgtgatgggaggacaacagagcaagctaggtgaaaaagtataagtcaaaatggtccctacgtgtgcactgggaaaaggtacttccagtccactgtggctgtggggaggaggagggagtgcttggggttgctcgtatatcctagaacccgcacgtttcctgagcttttgttatgtatacacggaggcggagggtgtcacttactgtacttgacgctttcacttcctctccagcttttaaacagccagagcccagggttgggggcgagcggtgagatggctcgggtttcaaggacaataactaggacgttaagcagtgagggctgcatctctgaagccacttgccctgatcctcctatgggactcagaacagtaaagcgtcactttaaggagccagtgtccaacagcggacgggaggccgcggggataggaccagggactcaatgctgttgaaattcatttgtgaccagaactagtgaccaaaagacgtttccggcagctgttccgcccgttaggaaacgtgctgcagttctcaatttctatttgaaagtttccttccttaaatagaacgttatggagacacattaaaatggagtgtaagagcgcacagcactcaaccccggacctgggcaggagaaagatctacttaaaaaagaagcaaacaaacaaacaatcaacacttattactgggaaaacaaccaataactatggacagcaaagacagaccccgcgcattcccggaaactactaaatcggagttcacaacgcgcgcacctataagcattttgagcgggaactgcattttaaccccggccaaggagagattccaggaagcgcctgggccccgaggctgaacagtgaagctcatgggtactatctgagggtgcaaccaagcagggggtcaataacaagggtcctccaccaccctgcactcctggaataacccagcgcctgtaatctgagcaacagtttccaaagaccttctctgcagcccgagcctgacgggtatccagggtaaccgcgagggggcggagcttcgggttaggtcccggcgaggttcttcccgcagccaataacgagccgtaaatccccagcccattgttgtttattgctgacccctcagcgctccgctaggagattggccgctttagggaagggggcggagtcccgcccgccccaacagccacctttcgtctccattcacaaaattccggcccttcttggtcacgtggttgggggcgtggaggggtagaggaaatgacacaacaaaggcccaagtatcccaaaccacaaaacttttttcagctcgctgcctcctctttgtcctgtccctgaaacagatactagatgaggaaaaagaggttggggtctgggagtaataacaagagagaaaaaaattaagaccgaaattaaaggaaggctcacgtggggataattccggcgtgcactgcttagacagcttttgcactagaggaaagaaagaattgagagtggggagaaagtcttaaggactgggaacttttgcttgctgcttcaagtcattgcttttaaaggtgcaaactgttcgactgtagatggatttcagttttttcacttaacattctgtaattttcatttctacctttttttgtatcccacagtgtcttgttagttttttaaagcttttatgtattattagtattatatatttttaggaatattgatggttttcgctggctgatagctttagtttccatttccaaagacttatcactccttcccaggcccccataagctctgcgccccttctccctccctttagtggactggcactctcaggcgctgcgctgttaagcctcagattttactacgtattgcggtggcttcatattttcccttttgagttctttaaacgaactcatatcttttaactctttgatcttcatagtaactgaaaatgatgttctcgtgtgaataagcagctagtctcgctacagctcggttttgttgaaacagcctaaaattttgagataaatgtgtccctcttgactgtgaacgattgaaccaccctcttttctttctcccactttctcttctgtcctttctctgcattgatacttactgaaacactatctcttctgtcctttctatgccttgatactcagacactagcttctagtttggcagttgtttatcttctctgcttggcactgggaaaaaccaatagacccacttgctgaagacagtggaagggctgaaaatttgtttttcagaaaatgtaagatcttggaaaatatctgcaaaggcagctgttctgtctacaagacaggaacataaaaagctggacaaagtttccactactttttgagaatgtctt

SEQ ID NO: 1882686 - DNA, 4001 bp, Homo sapiens
cgggagaactacgtatccaggccgcggagatgtgagctggcggccgccctaaacctgccggaaaccaccatcaaggtatgcggggtccaggctggggaggcgggtgtgcacctatttagcgggaagtaaatgccaactgccaactccctgaaacgcaggccaggaatctgggcctggggtctccctgcccggcgcgtgcagattgaccctcgtgacagctcctaggcaggcattgctgccatgtggctgactctgtccctttcctggttaaatagacaaggggtgggcgtgggggaaggggatagagtgcctgtgcgggtgacaaggaagtttctggggacacgctctctgcggccgcagaccaattgagtccatgtcctttcactgctcctcccatacacacactggcctctggcaccccgggggcctggccacctgggcagaaggaaggagggagcgggctggagtcactccccaaacctctctcggagggattccagctccaggtggtggtggtggggtcggtctctacccggctggtgtctgctttggctgttcctgccctgcgaacactgtccccggagcgggaccagactactggcctctgagcatcgggccaagtccagctactgaacctgctccgctcctctccccaggtgtggttccagaaccggcgcatgaaggacaagcggcagcgcctggccatgacgtggccgcacccggcggaccccgccttctacacttacatgatgagccatgcggcggccgcgggcggcctgccctaccccttcccatcgcacctgcccctgccctactactcgccggtgggcctgggcgccgcatccgccgcctccgccgccgcctcgcccttcagcggctcgctgcgcccgctcgacacgttccgcgtgctgtcgcagccctacccgcggcccgaactgctgtgcgccttccgccacccgccgctctaccccgggcccgcgcacggactgggcgcctctgccggcggcccctgctcctgcctcgcctgtcacagcggcccggccaacgggctggcgccccgggctgccgccgcctcggacttcacctgtgcctccacctcccgctcggactccttcctcaccttcgcgccctcggtgctcagcaaggcctcctccgtcgcgctggaccagagggaggaggtgcccctcactagataaggggccgccggctggctgccggctccatgacgcccgtggggtcaccccccggccccgggactcagccagcctcgctcctcgctcctcgctcctcgcccctaggacgccaagggggaaaggagagggcggaaaaggaccagcgggatccggccgcaagaattggaaagcctaggaagtggcggtggctggcgcgtttggggagcaggagtggggatagggaagcagagcttgagagaccttcctccggggcagcctccggacccaccgccccccaccagggtcgaggctgtagctccaaagctaaacaaaacttagcagcaacagcaaccaatatccagtccctcggcccctcggcccctcaccctccacctcacactcccttctcaccgggccccctctccccagccaaggcccaagcactggaaagggaaattgctgtctctctgaacaaaatgctgtgtatgcagagcaggtagagattaatctttgccagcttttccaaggcatgacaaggggctggtggatggcaacataccagtcatttggaggagagagtgagagatgatttactaccagggagaatccagccccttggcatgggacctggagcctcgactacacagcatcttctgggtctggcgtctgccagcacctgatctctttcctcattcccagctttgtgacacttctcaacttgcggctccatctctccctgcccccacttttttgttggccagggaggctgcagatgccccaggagccctttgccgcttctatgaggccaagccttttttccctgggcccagcacacaccctgattagcaagtgatgtgtgcgaggagggtttgtgaatgttgaatgtgtaataatgatcaccatggagctggccactgaccccagagctgagctgttaacaaggcgcccagggaagagcttagggagtgggaacttcacctccctctctcggtatctggcggtaaattagaggcaattttcatcctttgcttgttcaccttcacttcaccaggaactttctggccctaccctttgcattgggtattttacaactttctctcattttcttcccaagctaccactggagcttgactttcagataccagtgggagccttctgtcccttttggggaccctgtctgtggcctccaccagggtttgtttagagccactcccaaatcctcactcccacactcatccttgcagccagtttttgaggaagaggagaacgtgtaaccccaatgcaagcttcaccctgactgagagggagtggttcttcctgtagggaatgaatttggtttgatttggggttttcctttgaagcccaaagaacttgctgttatgattcgttaaccatattgcaataaaagctggacataattctcactttacattttagtttttgtggcagcaggcagctcttaactgaattttaaagttgctatttcagccaccatgggttcgaatagggaaggaaccaaaagatggacccacagagtcttccaagccactgtttgtcactggtaggctccaagcagccattgcatggaggtggagaagacaggctccaagctgccctggggtgcatgtttccttaattttgggtatgttgggaacagttccttggtaaagtggcagcagagtgctgccaggggcccacccctgtggtttcttctccagttgttccaatcctttgagcaacagaaaggggacccaggttgtggtctctgagcaacctgcctccaccccagcccaaagggaaggtgagtggggcagtggcagtagagcctgagtactgcagagacctgagttttctggtcaaactgggtctgcacttgagggtggaggacagcagggaggaaggctccttggttgggatcatcttggtctgaattgtcctcatactggaagtcatcttgagggtgggattctgaggggttaggacaagaggaaaggagtgctcagcagctaccttccagcccgcacctgcatcccccacaggagagccaaatgtggctggttgtggagttccacttaagcaggggagagatgggtgccttctgggagtccaggaggctctggattgcatagacacgaggagtcctctgccactgtctttgccagcacatagagactcctcaaatgccctcctccctccttgggttccacagcaaatcctcctgcacacagtagcaggtgccctcccaagcaaattgtgccctgaggtttccagcaccccctctcctgcagccaaaagctcctgagtgccaaatcctggtaaattttgcagttgctccatattgggcagagattgcttgcgacaggtaaatgggctgcatgttgccttaatgccaggcgtattttcagttaatagggagggaaaatgaggtgtctgcagagatattggaaagtacaagatcgatgatccagcttcgtgtccaatcagcagcctttaattgactgtattttctgggtaattgagcctctcttcctccaaattgaagtggaagatataacaatacatcttgccaggaggaattactcattacttcataatgaaatttcccttttgccaaggtttgcggtttggcgctaggcacgacttctcactccccctctccccccaaatattcttagcccacttgcatcaggctaccccatctggcatgacacgttccatttgggtggtggcagggaggaagtgggagttgacttgaagaagatactgccccttcacaatcacagcctccttatctgtaaaatgagaaggctagaccagggcctagcatga

SEQ ID NO: 1882687 - DNA, 4001 bp, Homo sapiens
tgagatgttggtttttctttgtcaaagataacaatgctcattccctccccattaaaaactacatatatatatatatatatatgattagatgattactacatgtgctttgaaatattcaaatattttagacagtaaaagtcccttgtaattcacccctttgcagatgattggttaacaggttagtacacatctacctaaatttaaaatcccatatttaacatgtatacttattagaaagtacacattctaatatttttctgttgtatttggtactgtttccagatgctcctgcctttttgctttcataattttgaaggacctcagctccctgcctcctagatttttgctactgtggtctcagagctgtgtaatttggatgactgagacggaaaaacctctggaaaacctttatttatgttgaataagtattccttgaatccttcctcagcatcctgggttatatttgatttgctctgttcatgataacttcatgccaaggagactgctatcagctctcttaaaacagatcccaactccctgctcatagtggccaaaggaatggagatttcaggctgagtttacttacctgcatcatcatctatccagaagcatccctgcacaaacctctgtttctacccttccattcactcggctcacttttctgctcttagtaccctttgtttcttgtgaactctccagcaggagtgacttgcaatttgtatccactgacacttaagttctcagaagtgctggagaagcgtatggaagtaaattatcctgatgtataattttgtacatgtgaaactcaccgtggaagtgcctattctaatttcagtacggaacacagctaaatatttggatcaataatccagttttgaaagcacactttatttaaagtacaatgtgctgaagaaaatgaaaaaagaaagggtgctttcaaatttgtactgagtaaactttcactagatcacatcatatgtttatcactagtcacatatatgttgtatttctatgtgtaatcgtcaggcacttttaatttctagtttgcatttaccatgccagcctcctcctcaatcccaaatttcctttggttataaatttagtaaatttgaaagagccagcagggattaaaccctgaaggtattcaaatgactatctgacgttattcctcatttcagccatttcaaaaaattatgctttcatttagaataggctctgggaatcaaagtgtgtgtattttgcccaagtagaagacacagtttaaagttaacatcctagctactagaagggaaagcaaacatcgctggaaaaggagcctatttttttttaccttacactaaaactacactgcgaagatcaaaagaaatcaacatgagagtgtgcctcttaacgctaggcccaaagtagatgcttattaaatgatagtttaccccaatccttcacaaatggttgataggtcttactatttccccccattcaaatctagaattttttcactctcataaactaatcgatagtgaatggaaagcacagaatagatcatcgtccaagtgttaggtattagcctgagaaatccagaatcccatatttgtaactgtccttcttgagaaagtgcatttttcaggcggattctagccccatttttctttttaccatttttacatattatgagaggtggcttagaagtacttcgatttttgcctcttcatcacaacacactgaacgttaaaatcaagtggttgggtttttattggcttattttgtctctaaccgttttatttctcgagctgtcatcgttcttttcgtcttacatccttatgaaccttttctggattaaaaaaaatgacgttataataaggaaactaactggcgttggattcgaacgaagttgactccattccttttcctccccgtagtgtgggcgctacgaggaaagacctcggcgagaaccagcgaagcccgggctgccctcgccgtgcgggcgcacatttgctcctcgcgccgggctgcgccgggcgaccgcggccgcctcggcgtgtgtccgcggctccctcccgccctcgcccgcagttccccgatcccgatcccggatctctgggtccacagcttggctacctcccgagccggagccggagccggagccggagtcgcggctgggcccggccgccgcgtcacagggggagggaacccgggggggagggggaggggcggtgaggtcagcggcggcggcgcgtccgcgggcggcgggagcggcgcatgcgcggagcgaggcccgtgagtggcagcggcggcgcgcggggggcgggcgaggggccgagtgtgggggagcgggcgggggccgtcgaggcggcggtgtgtgggcgcgacggctgcgagttggagaggtctgtggtgcgggtcgccccgggggatccccggcgcgggcctcgcgcgacggccacggtcgcgcggcgtgtgtgtggggtccaagcacacccgcaaaacttcctcctcccctgctccgggagagcgagcgagcgtgtgtgagagagcgagtgtgaggagcgagccgcggcccggcgcccagcgccgccactggagcagctgtcaaaacttcgccgccgccgccgcccgggcctgacgggcctgacgcgcgggggaggggcggccggccgggggcgcgaccccctcgccgcccccgccgggccccgcggccggccctccccgcgccgggcccctttctcctcctgccgcgggcggctcgggggaggggccgcgggcggagaccccgggggccggcgcccctcacgccgcccgcccgcccggctgccccgcccgcccgcacccgccggccccgcccgccccgcaccgcccgccccgcccgccgccccccgcccggcccctgcgcgcggaggtgcgcgcgcccgcgccgatgtgtgtgagtgcgtgtcctgctcgctccatgttgccgcctctcccggtacctgctgctgctcccggggctgcgggaaatgcgagaggctgagccggggaggaggaacccgagcagcagcggcggcggcggcggccgcggcggcgggagccccccaggaggaggaccgggatccatgtgtctttcctggtgactaggatgtcgtcggaggaggacaagagcgtggagcagccgcagccgccgccaccaccccccgaggagcctggagccccggccccgagccccgcagccgcagacaaaagacctcggggccggcctcgcaaagatggcgcttcccctttccagagagccagaaagaagtaagttgagtgcgagggagccaggccgggagccagcggcggcgccgggccggagctgtcaccgggcgcccgccccgcggcctccgcgccccggcgccccccggcggggtgggggcggggcgggcccgcgggcggtggcggctcccggccccggccccgcgcccctcggtagccgcccgcgcccggcctcccccgctccgcgccgcccgcccgggctcccgccggcgcccggctccgcacactttacttttcagtcgggccttttcactgggtcttctccgcgactcttcttttggagaaatttctcgtagccgcgtcttggcctagctggatcattgagaaaacaagcccggagcgcgcccaggtagtccccggacggactccgggcgaaccgccgagccgtcggcgctcgggaaactctcggagctgtcaaaacgcccgggccaggtggtctcggggcgcgggctgggggcgagaagaaagcggccgggcgagtgcagcttttgtttgtcagcgacttgctcctggaacttttcctggtcccaaacctgtgttttcttcttttgatgatatattaggaagccatttgacttcttcctcccccctcccccaacacccagcaccgcactcccgggctccgaaagcacaagtcctgtgggatcccccagcttcggggaacggcctgcctaagttttggagacgtagccagcgtcccctcgtaaggcagaata

SEQ ID NO: 1882688 - DNA, 4001 bp, Homo sapiens
caaattgcaataaaatgttttcttttgtttttgttttttttttggtgaaaaactcaagtgtcatagttttggcttctagtccattctgcagtgagcttctcttgcttgataacactaggcacttcagtcactcacttagatgccctgaaatttagctgcttcatctgtaaaatctgtaaaatgggcagaataatccatctctgtactcctggcagcattgccatgagctggaactagacagtggatgagaatgacacagctctacggttttgagaggtggcagatgtgggtgttcagaccttaccctcaggccagcagaggcagcagcttcagacagtgagacttctgcattttgtccttccaggaggtagagcccggtactcacccagcaatcattgttgcctgacaaaagtcacagagaaggctcagttcttccttcctatgtgagtatatctccacttggggcctcccagcccctcccagtggtacagcttctcccctgtgtatctcaagtcatccatacttcttagactcatcccctctaaaccttaagcagtgtcccaatccccatcttcttgaaagtacctgatgaagaatggagtcagctgggcccagtggctcacgactgtaatcccagcactttgggaggccaaggcaggtggatcacctgaggtcaggagttccggaccagccttacctttacggtgaaactctctctctactaaaaatacaaaaattagccaggcatggtggcgtgtgcctgtagtcccagcaacacaggaggctgagagaggagaattgcttaaacccaggaggtggaggttgcatgagctgagatcgcgctactgcattccaacctggatgacagagtgagactctgtctcaaaaaaaaaaagaatggggtcaatcttcttgagggtaggtacctgcaatgtcctgtgtagtgtcagccaatcccactttcccctacatctttaatgttctgggcactctctcctgttttcatacctgggttgattccattgatctccacggtgatggggtgttttgaggggtacaaactggaggagcaggtccaggtgccaagcccctgggccagctgggagcagtcagttccagagtgagccagcccagtggccagggagagcaccgcagcctcataggagtcactggcaactggattttcccggctcacagctgggaggccagaccctcgtagcatcttcctcaggagcctgtgcagggatatgtaagcagggaccccctccgcaggaatctgtaggaaggctgcaccatcaactctcaactttgccagacagctcttttccaagttcccattctcgtggttcagtatagcctggaattgagagagcgccttgcggaagtggtagcttctcatctcaggggtgggaacggggaagcagcctgctttgagagtctgaggcaggatgctgaggccaaagcagttgaggatgatgttaccagggaagccagccaaggggcagtggccagggttctgggaggcccaccaccaggcctggcccccaatcagcagccccccaccctcagccacaaactcctgcagctgcttagcctccttgtcactgtatgccttgcagcagtagacacacaagtcgctgttcagatggggctccaggctgcattgcaggccatgctccgataggagaggacacagatcttttagatttgtgttcaccccaactttgcctgtctggcctctggccagccagcgcaccgcattgagcaagaagggccccatcttgggagcacagagcaggcactcgtgggcagccaggaccacccggccccggccatagtgagcagccgccaggaagcagttgagtgaggcatccagccccagagggaaggccagggctccatgtacaagcagctgtgaggggactccccctgtcctgatgtccagctctgagatcccctccaggagctgctgctggtcctgcctgacatcctccccatacctggaagagacaggagaaacaatgaggctacagtcagttaatgagccactgaatcgaactcattgagtagagaaatctatgtgcaggtaagaagattgcacggttcatgtcaatcttcacattcttactaatattaggattttagcatgctaatatcatttatttttatcatatttaaggcatattttttcactgtttttacaactgatggcatattatcatttaattggcaatgtttagtctttctttcttttctttctttcttttctttctttctttctttttttatttgagatggagtttcgctctgtcgccaggctagagtgcagtggcacaatctcggctcactgcaacctccacctaccgggttcaagcaattctactgcctcagcctcccgagaagctgggactacaggtgcgtgccaccacacccagctaatttttgtatttttagtagagacggggtttcaccatgctggccaggatggtctggatctcttgaccttgtgatccgccagcctcagcctcccaaagtgctgggactacaggtgtaagccaccatgcccggcctggtctttcttagtgatacataaaataatggcatttctcacaatcaatttgtcatagatttgaggaaacgctatagaggtagtgcccttacttgcatatcttaaaatccacattttctaaatgaacacctccaggaattcctcccatttagtcaactatgtgttgaatatttaggcttcagtttcttgacttttaaaataattaaacatataaacaagttagaaaaactagtttattatgcccagagaaagtagtactgcttatgaatttctcgatctaactttctgcaaaggaaggctgtaaaaacaccaaatctggactctccgtagggtagttctgatctaggaacacatcacaattaaattgtataacactacgcttgaagatttatacaaacacacactgtttttaaaacttcacttagatctggttagagtattcacttcttcttcttaaggaatggtcaaaatgtaatgaatcaagaaaaggctttgtatttcaagaatttttttaaaacaatttgtatatactgtaaatgtcaagcaataggaggttggttaaataaattatggttaacaatagattgcaaaccatatagtgattaaaataattattaggtaacttgaaaaatgcttaatggaaaaagttttaaaattagattccaggataccatgctctaaataagccaaattttggggtaaaaaaaataaaaaaccatgaaaccagacatagaagcagaacctaaagcatatttatcaaaatatctttgtttaaaaaaaatgtcttcagtggtcgtcttggctggtgggattttaggtcattttaattatctttataaaactttattctctcgaattttaaaattaacatctatttctcttataattaaaaattaaatgttatattttttaaaaagtatagtttatttattccagtagtaaaacattattgaaaaatgtaactcttgtgcagattctctttaatttcttttcagcatgaaaatgaggagatggcatgtcttagttttgtcatcccattttcagactcacatggcaaatgtcatagagttcaggtatcagttctgcctgtggctttttgttacctgttggaactcaagatattttggggagttaatgacattgagctacaagacttaataataaaaaattccactcgaagtgttcttagcatcttctcacaggcacctgacaaagcctcagctaatggtagtaaaacttcaatatggaaagctgcagttacttgcagatatcctctccacagctaattaaaatgactgcatatattcatccacatgcccacacacacaaactacagtagcattgggaatctaggaagtgactagaatggttgacaaaagctgcaagaaccacatagaattaaagaaaaaaaccaacaacttcttagcataaa

SEQ ID NO: 1882689 - DNA, 4001 bp, Homo sapiens
gcaataaaatgttttcttttgtttttgtttttgttttttttttggtgaaaaactcaagtgtcatagttttggcttctagtccattctgcagtgagcttctcttgcttgataacactaggcacttcagtcactcacttagatgccctgaaatttagctgcttcatctgtaaaatctgtaaaatgggcagaataatccatctctgtactcctggcagcattgccatgagctggaactagacagtggatgagaatgacacagctctacggttttgagaggtggcagatgtgggtgttcagaccttaccctcaggccagcagaggcagcagcttcagacagtgagacttctgcattttgtccttccaggaggtagagcccggtactcacccagcaatcattgttgcctgacaaaagtcacagagaaggctcagttcttccttcctatgtgagtatatctccacttggggcctcccagcccctcccagtggtacagcttctcccctgtgtatctcaagtcatccatacttcttagactcatcccctctaaaccttaagcagtgtcccaatccccatcttcttgaaagtacctgatgaagaatggagtcagctgggcccagtggctcacgactgtaatcccagcactttgggaggccaaggcaggtggatcacctgaggtcaggagttccggaccagccttacctttacggtgaaactccctctctactaaaaatacaaaaattagccaggcatggtggcgtgtgcctgtagtcccagcaacacaggaggctgagagaggagaattgcttaaacccaggaggtggaggttgcatgagctgagatcgcgctactgcattccaacctggatgacagagtgagactctgtctcaaaaaaaaaaaagaatggggtcaatcttcctgagggtaggtacctgcaatgtcctgtgtagtgtcagccaatcccactttcccctacatctttaatgttctgggcactctctcctgttttcatacctgggttgattccattgatctccacggtgatggggtgttttgaggggtacaaactggaggagcaggtccaggtgccaagcccctgggccagctgggagcagtcagttccagagtgagccagcccagtggccagggagagcaccgcagcctcataggagtcactggcaactggattttcccggctcacagctgggaggccagaccctcgtagcatcttcctcaggagcctgtgcagggatatgtaagcagggaccccctccgcaggaatctgtaggaaggctgcaccatcaactctcaactttgccagacagctcttttccaagttcccattctcgtggttcagtatagcctggaattgagagagcgccttgcggaagtggtagcttctcatctcaggggtgggaacggggaagcagcctgctttgagagtctgaggcaggatgctgaggccaaagcagttgaggatgatgttaccagggaagccagccaaggggcagtggccagggttctgggaggcccaccaccaggcctggcccccaatcagcagccccccaccctcagccacaaactcctgcagctgcttagcctccttgtcactgtatgccttgcagcagtagacacacaagtcgctgttcagatggggctccaggctgcattgcaggccatgctccgataggagaggacacagatcttttagatttgtgttcaccccaactttgcctgtctggcctctggccagccagcgcaccgcattgagcaagaagggccccatcttgggagcacagagcaggcactcgtgggcagccaggaccacccggccccggccatagtgagcagccgccaggaagcagttgagtgaggcatccagccccagagggaaggccagggctccatgtacaagcagctgtgaggggactctccctgtcctgatgtccagctctgagatcccctccaggagctgctgctggtcctgcctgacatcctccccatacctggaagagacaggagaaacaatgaggctacagtcagttaatgagccactgaatcgaactcattgagtagagaaatctatgtgcaggtaagaagattgcacggttcatgtcaatcttcacattcttactaatattaggattttagcatgctaatatcatttatttttatcatgtttaaggcatattttttcactgtttttacaactgatggcatattatcatttaattggcaacgtttagtctttctttctttcttttctttctttctttctttttttatttgagatggagtttcgctctgtcgccaggctagagtgcagtggcacaatctcggctcactgcaacctccacctaccgggttcaagcaattctactgcctcagcctcccgagaagctgggactacaggtgcgtgccaccacacccagctaatttttgtatttttagtagagacggggtttcaccatgctggccaggatggtctggatctcttgaccttgtgatccgccagcctcagcctcccaaagtgctgggactacaggtgtaagccaccatgcccggcctggtctttcttagtgatacataaaataatggcatttctcacaatcaatttgtcatagatttgaggaaacgctatagaggtagtgcccttacttgcatatcttaaaatccacattttctaaatgaacacctccaggaattcctcccatttagtcaactatgtgttgaatattttggcttcagtttcttgacttttaaaataattaaacatataaacaagttagaaaaactagtttattatgcccagagaatgtggtactgcttatgaatttctcgatctaactttctgcaaaggaaggctgtaaaaacaccaaatctggactctccgtagggtagttctgatctaggaacacatcacaattaaattgtttaacactacgcttgaagatttatacaaacacacactgtttttaaaacttcacttagatctggttagagtattcacttcttcttcttaaggaatggtcaaaatgtaatgaatcaagaaaaggctttgtatttcaagaatttttttaaaacaatttgtatatactgtaaatgtcaagcaataggaggttggttaaataaattatggttaacaatagattgcaaaccatatagtgattaaaataattattaggtaacttgaaaaatgcttaatggaaaaagttttaaaattagattccaggataccatgctctaaataagccaaattttggggtaaaaaaaataaaaaaccatgaaaccagacatagaagcagaacctaaagcatatttatcaaaatatctttgtttaaaaaaaatgtcttcagtggtcgtcttggctggtgggattttaggtcattttaattatctttataaaactttattctctcgaattttaaaattaacatctatttctcttataattaaaaattaaatgttatattttttaaaaagtatagtttatttattccagtagtaaaacattattgaaaaatgtaactcttgtgcagattctctttaatttcttttcagcatgaaaatgaggagatggcatgtcttagttttgtcatcccattttcagactcacatggcaaatgtcatagagttcaggtatcagttctgcctgtggctttttgttacctgttggaactcaagatattttggggagttaatgacattgagctacaagacttaataatgaaaaattccactcgaagtgttcttagcatcttctcacaggcacctggcaaagcctcagctaatggtagtaaaacttcaatatggaaagctgcagttacttgcagatatcctctccacagctaattaaaatgactgcatatattcatccacatgcccacacacacaaactacagtagcattgggaatctaggaagtgactagaatggttgacaaaagctgcaagaaccacatagaattaaagaaaaaaaccaacaacttcttagcataaaggcagcat

SEQ ID NO: 1882690 - DNA, 4001 bp, Homo sapiens; identical to SEQ ID NO: 586429

SEQ ID NO: 1882691 - DNA, 4001 bp, Homo sapiens
gagattagaatggtgattaccaggggttaggggtaggaattggggcgatgttggctaaaggatacaaaatttcagttaggaggaataagttcaagagagctgtcatacactgtagtgactacagttaataacaatgtattgtattcttgaaaatcgctaagagaatagattttaagtcctctcaccacaaaataagtatgtgagatactcgatttaaccattccacaatgtatacgtatttcaaaacatcacattgtacacaataaatatatgcaatttattattaattttaaaaacaaatggtttaaaatgctaacattagtcacttccatatggtgagataatgggcaatttttatttccttcttccgcatattttttatgcttcctaatttttgccattatccatgaattatggatgggggacggggggttaaaataatgtttagtcttctaggcagtggatatttagggcattaaatccagggcctgactccacagctgagatgctacttgtggcgatcatcttctcccaagctccacattttagctttgtacagagtgatgtcactgtagaccctgaagtggttcatcctgtggtcacggcgttctgggtcgaccaaggcttctgagtcccacccaatttcctggttttcagtctgtgcctccgggtacttcttcgttggcccctgggcagcatggtgaatgagattcagaaacctggcgtctgcgggttcctccaggttatcatgccaagacataggcttcctcgtaatcctgtgaaccttgcgcaggggattcacatggtactgcgtgtggagtttctgggttcgtaactctttgaggtacagctcccgcaagatctggttctgatggacctcatctgtgaccaccctctctttcgggtgtcccgccatagccttggggctgctccgtgggtccggggctctctcggcgtcctcttaccactcgcttggctgcgggccttctgcagtctctaggcaatggcaccccactccgtctccaggcaacggcgttcgtatgataccgctctggcctctcggaatccagcctctttactagaaccgcctctggatactgccaggaaaaaggctcgccatcaactggcaaacccaggagataatgaacataaaactagacctcacgttgtccaatcacctccctccttgagaacagattcgatgcttttcactcccctaccttctctgcccctggtcctgcagtttgctccgtggttacaaaccaagttccacggagaagccagttcaaatgcagaggcttgtgcagtctggctgcccaggcaggagaggaaaggcgcaggccaggccgaatgttcgcttgccatggtcttggattccccgtgtctgccaggtcgctgctgggaatccacaagtcctggcaattctggaccgcctgggaactgccccagtaggagggaaaccatttctccagggtgagatttgcaagccgtcaggtctggttgggggtggctggatagggagtggggactagagtacaggggactagaaagaagggctatgaggagggtgagggggaaagatagggggacaccgggaaaggggtgcctgacgaacagggcggcggcacacggacgccctggtagtaacagaggaagggccgggcaggaagttccttgaggtagggtactgggaaggggcgacattagtcagcttgggcaaacgggtagggcagaaaatcgaacaacttggacggctctggagaggaggctgacggcaggaagtttgaggagtaacggggggaaggagggctggaagacgagagcgggaaggaacagaaagaaaatgaggctggggttgaggccgagaaattggaggtagctttctagtcatttttccaaatcagcgctgtagtaactcacttgtccaaacgagtcaaaatgagtaactgagatgtgctgagaccgactccagcttttatcccctcaggacattccatcacagaatgcctattatgaaatgtacatttatctccttaggtcatttcatcacagaatccctattatgaaacgtacattctcccctttgttctagtgaggaggccccaccaatcagagaaaagatctgtttcttggtttaagagtgatcatgggaaatagcaaagaaaagaaatggggctgtaatattagtccctgttcttgggatattacgtagttttgcccctggacaggcaaagattgatcaaggggctaacagaggtaggggcttggggcctaggagagcagttctgaagcaagaattgggaaaatgggaagtcagtatcctagtctctttcccttactacattgttcaaagccctttcacattatctacctcactgcgtgaatatgcatgattagagacgttatgttcattttaccagtgaggacactaaagaccacagagggaaggaccataggcaggcagtgggtgggtaagcaggcaggacaagaacttgggccaaaaagagggggcaggtaggagaggccacaaaatggcacaaagcgctgaccagcaccattgcctcctcctgtgtctctggacaggatcttggaggggatgtctcagagaagagctgtagtttttgtagcttacctcttggtccctgtgctcccttggtttgatgacttaatcttcactggaaccagacacacagggtccaagctggtaggatgactgcccactcctgagcacctagtgactagatttggacttccttgctcactacctgagatgcctaactccatcagatgatgaaggaagctgctgccctcccctctcttttgtctgaagtagcaaccctctctgctgaacattcctggtttctttgaatgccattcaaatcatagtctcctttggtcacctattctctcctgtgcttgtatcatcacaagattctgaattttctcccttggcccaacacccttttcctcccatgctgcataaaacttccagttatgctttggaagtccagctacatgatttttagcaaacttccctttttccatagactgcttctttattgacagttccttgcctctccttattttaattgtaacttggatttctcttaaggacattgcttcctttttatctcaagtagaaactacttattctctcaaactctaaagtacttcagagtaagaatgtggtttatagagtctcctcgctccttccgactccttgaaaactgctctgcattattcctctcttcatactggaaaatctcttgctccttatgagttatctttaaactaggaaagaaaacttactgggaaataaaaaagtaacaccttccttataatgacctaaatgaacaaaaatgttaattcatagttcagaaaactttgtctattcagaaaacaagtatgttctctattctcactgtgtattagtctgttctcatgccgctaataaagatatacctgagactgcgtaatttacaaagaaaaagaggtttaacaaactcacagttccatgtggctggagaggcctcataatcatggcaaaaggcaaaggaggagcaaaggcacatcttacatggtggcaggcaagagtgcatttgcaggggaactcccctttataaaactatcagatcttatgagacttattaccatgagaacagcaaaggaaagacccacccccatgattcaattacctcccaccaggtccctcccatgacatgtgggaattgtgggagctacaatttaagataagatttgggtgggacacagccaaaccatatcacactgattgtaaacaacagccaatagattgtttacttttgaccaggttgagggaagagtcaacatatagttccatagagcatgttgcaggcagtgagggaagagaaagcacaggaatttttgaagatctttctaaggtcccttcaatttggagaatagcacttaagaatctggggaagccaagaaaagaaaggagctcagttcctcaccacagaatg

SEQ ID NO: 1882692 - DNA, 4001 bp, Homo sapiens; identical to SEQ ID NO: 586432

SEQ ID NO: 1882693 - DNA, 4001 bp, Homo sapiens; identical to SEQ ID NO: 586440

SEQ ID NO: 1882694 - DNA, 4001 bp, Homo sapiens; identical to SEQ ID NO: 586439

SEQ ID NO: 1882695 - DNA, 4001 bp, Homo sapiens; identical to SEQ ID NO: 586444

SEQ ID NO: 1882696 - DNA, 4001 bp, Homo sapiens
tttttaataaatagagatgggggtctctctgtgttgcccaggctggtcttgacctcctggcctcaagcaatcctcttccctccacctcccgagtagctaagattataggtgtgagccaccatgctcagccgctgattttaacttgtatgttttaaacaaaatttctagtaaagtagaacatttctttgatatgtttgtgtcaggatttgactctcccaggtctttggagaggctttctaacaagacatcccccgtgggtggccatctgccctgtgagaaggtcatttctagttccaggtcacgcacagtgtgtcagctggtggggtgtggagtttcaggcccaggcctcctggaaagtgcccgaaagagaaacggcttagaaaataaggactttaacggtggtgtgggttgagtttggaaagtttagaccatgttagtggaatcagagctgggaagaggttctagaagttacctcctctcactggtttccagtccacacttctcagaactctcccattttgcagtcaggtgcagtggctcacatctgtaatcctagcacttgaggagaccgagatgggcagatcacttgaggccaggagtttgagaccagccctggccaacatagcgaaaccccgtttctactaaaaatacaaaaattagccaggtgtggtgtggtgcacacctgtagttccagctactcaggaggctgaggcatgagaatcacttgagcctgggaggcagaggttgcagtaagccaagatcgcaccactgcactccagcctgtgtgatggaaggagactctgtctcaaagaaaagaactcacctattttgcaaaggagcttcatggttctcttgaagaaaaataggaatggaggccacctctgtgtcaaaaacaacgtcccacatttctgtgtttcactttttttttttttttttttgagactgagtttcactcttattgcccaggctggagtgcaatggcgcgatctcggctcactgcaacctccacctcccgggttcaagcgattctcctgcctcagcctccctagtaggtgagattacaggcatgtgccaccacgcccggcaaattttgtatttttagtagagatggggtttctccatgttggtcaggctggtctcaaactcccgacctcaggtgatccgtgcctggcctacttttttttttctttttctttttctttttcttttctttctttcttttctttttttttttttaagagatagggtcttgctatgttgcccagactggtctcaaacgcctggcctcaagtggtcctcccaccttggcctcccaaaacgctgagattacaggtgtgagccaccacgcttggcctgttttacatgttgacggacagcatataatcacatgtataagggtttctgcttgtaaaagtctggaaacccattctaactgccagaatcacagaacctagagaaggggacataactgccctgtggccacccagtagctttcatcttctctcgggacggcagaggcaggacagccagcattctggtgaggattgaaggattagttgtaacagatttcagcaggtctgcagtgatcagatgggtttctcacatattgttaagttgaaagtagccgtggctcagtatgagttgagtacctgtttaaaatctgcattcaaagccttcttcccagaggccacaactgcagtgagatccaagtgtgtggctcacccgccccggggctcacagctgggcagggtgatttccactcaaattcttgtgccagtgcagatcttgttctaaagcttttctaaatgcctggagactagaaagacttttggatacttttccctttttcttttggatgaaattgcatctccagtagaacagcagcattccatggtgcctcagccacgatcctctggacagagatttgtggcgaagacctgacgagagactgtaaaggaaaagcagggtttgtttttcctggtcaaagttgttaatactaaaaaaaagaagaaaaaaaaaactttggccaggtgcagtggctcacgcctgtaatcccagcactttggaaggccaaggcaggtagatcacctgaggtcaggagttcgagaccagcctggccaacatggtgaagccgcgtctctactaaatacaaaaaaaaaaattagccgggcttggtggtgggtgcctgtaatcccagctacttggaaggctgaggcagaagaatcacttgaacccgggaggcggaggttgcagtgagccgagatcacgccattgcactccagcctgggcaacaagaatgaaactctgtctcaaaaacaaaaacaaaaaaaaccctttgatcattaaaaagttatatgactattttagaacatttgcaagtacagaaagaggtaaagaaagaatagcccaggtgcagtggctcacacctgtaatcccagcactttgggaggctgaggcgggtggatcacttgaggtcaggagtttgagaccaacctggccaatgtggcaaaaccacatctctactgaaaatacaaaaattagccaggcgtagtggtgcgtgcctgtaatcccaactacttgggaggctgcagcaggagaactgcttgaacccgggaggcggaggttgcagtgagccaaaattgcactgctgcactcctgcctggcgacagagcaaggctccttctcaaaaataaaaaaaaagaaaaaaaatcccataattctttgattccagtgacattttagtgttgttctttccagacttttaatttttaattaatttatttttatgagacagggtctctgtctgtcacccaggctggagtgcagtggtgcaatcatggttcactgctgcctcaacctccagggctcaagcaatcctcccacctcagcctcctgagtagctgatactacaggcacgcaccaccacaaatggctaatttttctagtttttgtaaagacaggcttttgctgtgttgcccacgctggtcttgtatttctggactcaagcgatccgcccgcctcggcctcccaaagtgctgggattacaagcatgagccaccgcgcctggccctttctttcattttttaagactgatttgtattccatcattagaatgttccataattggtgcaagaattcctttattgtaaagtgtttaggctgcctccaaattgaggctttttcccatggccaattataatactaataattttcataatgaagaaccggcatcattaggagctggaacaaattaggtttttaagctgcagctaagtgatggttaagccgaggctgctgcagagactggtgcaccgacacgccactgtattgtgcataattgctgggttcaaggggaacgcagtgggcgtttctgggcagtgactcaaaggtgcctgtgcccctggagcagaaggctcacccctcctttggtgtttcagagcctctgggatattgggcacctgaagagctgcagccccagctctgccctcagggagtttctgttttggtggggagaaggccactgaaaccagggagtgcggttgtgtttgcgtaagtgccctgcgccgtgcacacaagggtaggtggagccagccgtctctggcaagctgtgggtcagggggcccaggagaaggggataccatggttgggtctggaaggatgggcgtgtttgcttgggggctggtatagagggaggatcaattgctagaaggtggtaagtggcttggaatgttctggaactttctagaattagatgtaggtatcaaaggtggcgggcttggtgtgagtaggaacagtggctggtcatggaggggcttgtgtgccttgtcatcctctggagtctccagtaccctcctagggcctgggccatggtgcgccctccattggggaggctgcgtgccttcgtggaaagttttagctgatgtcctcgcctgtatttcccaggctgtttttgcagagttgtgagagttggttcatccgggccatgaggacatgttgggaca

SEQ ID NO: 1882697 - DNA, 4001 bp, Homo sapiens
agagctctagctgagcgcaggtacttaagaaagaaatgctctttccagactctcaatggaaactcggaagcgtgcgcgcgcgcgcgtctgtgtgtatcctgggtggggtccgatcgagtcaaggttgcttgtggtgtgacacccaattattccttgcaactcctcaactttgtggatgaaagtgcgactttcccaggcctattgccgcgggcattgcctttacaaaaccacaaacacagaacaagcctcctaaggcttttaattttcggggcgtttggggaggccagttacctgccggcgtcttctaaatggtccagactcggttcgggccgcggagactccgggattccgggagcgggcaaccccgagccctggaggaagaaataggtctgcggaggtggcacagatctgacccggcccagcccggcccagcccggcccacccaggcccagtggaaccaagcagcgaaacctcggatttcactgccgaggcttcctagccgaggctttctggagcttggcgtttgataaatatagcctggcgtttgcccctgaattagactccgtttccttatttagcccttgcacaatgattttagatgatgtcacttagagctaaacgagaaaattgatctcagatttgcttggcctctaaagcctggttaagcagattgagaattagaaaggcagaggaagcaaaaggggggtggggatgggggggtgcggagggtagtgaagtgtgcgcggcagagtgtgtgcgcagaggggagggcgcgccaagcgggtgaaagcgcccccgccttttctgggcggggaacctcactcaccaatgaaaagtagttactgactgcagatgaaaaaaaaaaaagttttcctgttgactgttggaagcgaattgagcaattatctagtttaccttctcctcttggaagttaacgattggcgagatcttggctgcgttattgacacaacactttctattgatagaaataagtagtgattgtccccgagtcattggtgcgccaagaactctgcgatgggctggcaggagtccattgggctgggcaggcaggttcggctggtgatgctggggaggaggaggaggaggaggctactggtggtgatggtgcccgtccccctctccgcaggtctgtgacaagcagggaacaaggcaacggacggcgcaacccagccccggctgacggacgctggcgactcagacatggacagtagctgccacaacgcgactaccaaaatgttagcgactgctccagctcggggcaacatgatgagcacgtccaaacccttggctttctccattgaacgaatcatggcgcgcaccccagagcccaaggccctgccagtcccccacttcctgcagggagccttacccaagggggaacccaagcactctctgcatctcaactcgtcgatcccctgcatgatccccttcgtgcctgtggcctacgacacgagccccaaggcaggagtgacgggctccgagccgcggaaggccagtctggaggccccggcggcgcccgcggcggtgccctcggctcccgcattcagctgcagcgacctgctcaactgcgcactgagtctcaagggcgacctggcccgcgacgcgctgccgctgcagcagtacaagctggtaaggccgcgtgtggtcaaccactcttcattccacgccatgggcgccttgtgctacctgaaccgaggtgacggcccatgccacccggcagccggcgtgaacatccacccggtggcctcctacttcctcagttcccctttgcacccgcagccaaaaacgtatttagccgaaaggaataaactggtggtcccggcggtggagaaatacccttctggagtagctttcaaagacctgtcccaggctcagctgcagcattacatgaaagaaagcgcccagcttctgtcggaaaaaatcgcgttcaaaacctcggatttcagccgaggctctcctaatgccaagcccaaagttttcacttgcgaagtgtgtggaaaggcaagtacaatgcaaaacggagatcctttccttccctcccttccttccttccttccttccctccctccctccctccttccctccttccttccctccctccttccttccttccttccttccttccttccttccttccttccttccttccttccttccttccttccctccctcgctcctcctttccttcctccctttttagtattttgggggtaattatttgcatacactttttgttaagattctcttcctcctaccctctctctgcccggtttgatttcaaagttacttgtgcggctaacctgttctacgtgtgtttaattttaaggtctttaatgcgcactataacttaacccgtcacatgccagtgcacacaggagccagacccttcgtttgcaaagtgtgcggaaaaggtttcaggcaagcaagcaccctgtgcaggcacaagatcattcacacgcaggtgtgttcatctgtctcaatttcacctagtttgcttccgaactgtttgcagaaaaacagccgataaaaccttactctttaggataacgttcatttaaaaagtgctagctaaacagggtgaatgccatgtattgtttgcttttgttctgcttgaaagtgtttaagcattactgtgttttgagcttgcagaacttcacataattagaaaatatctaaatgtctctgcttttcctttctcctgcttaggaaaaacctcacaaatgtaaccagtgtggcaaagcatttaatagaagttccactttaaacactcatacccgaatacacgcgggctacaaaccgtttgtgtgtgaattctgtggcaaagggtttcatcaaaaaggtatgcaaaccaggaaatgtctctcatggttagtcttatgaaaagccatacttaatactttcgggatgttttagaagacgatgtttaaagtgtagttatgtggcacttttgttgccattctaactccctactcgaagtctgattagtattagagaaaagcatgattcataaaacaagggtatatgttttaactgcatgctctcattgtatgtaattggactgataaatgtgtattaaaatttaaggaaacggcatcactgttgatgcgatgcttgaaaataaacttggggagacaagtgcaggcacagatagtagccctgcacttgttgtgggacctgtggcggctcttctgcttgcctggcgctaccttccacgtgtctgctcctccctttttaagctattttttttttcagaaccatattcctgtcatttgtgtgtttcagggaattacaaaaaccacaagttgacccacagcggggagaagcagttcaagtgcaatatctgcaacaaggctttccaccaggtttacaacctcaccttccacatgcacacccacaacgacaagaagcctttcacctgccccacgtgcggcaagggtttctgcaggaactttgacctcaagaagcatgtccgcaagctgcacgacagcagcctggggctggcccgcacgccagctggcgaaccaggcactgaaccgccgcccccgctaccgcagcagccgccgatgacgctgcctcctctgcagccgccgctgccaaccccggggcccctgcagcccgggctccaccagggccaccagtgatcgaggctaagggtcctcccagcctcagccgtgcccccacgctgaggcagcggcagactagagctcctggtccgagttcgtctgcagaccccagggcatgttgggccccacacttcagggccgaccagaagcctctgcatcccctggcctttcgcctcttgcatgcacctgctaaatggttttgtgtattatattctatataggcactaacaattatgaaaaatttggagggttttgcttgttttctgtttttctttttctttttttttaatttggaaagacttttcatcttgggtggagagatggtgtttattttgttttgttttgtttaaacaaatt

SEQ ID NO: 1882698 - DNA, 4001 bp, Homo sapiens; identical to SEQ ID NO: 586454

SEQ ID NO: 1882699 - DNA, 4001 bp, Homo sapiens
acctccatgcaaacaggacatgcaaatttgtgatgtgttgattaaaaagaaagaaagaaatgtgtatatgtgtaacttgtatgtttatgtaggatacagattgggaaataaaatgtatttcttactgtgtgtcttgtggaaaaaagtttgaaagctgcttgtagagactacaatacaatggtaaaacttttaagtaaatctaacagcagaacttttagaatctgaacaatatgcctgaagatgatgatccaagatttgactgtaagcacaaattcaagaatagtgtatacagtataggcccaaagaagttatctaagtatggactatataaaggtaatgtgcattattccaaattattatattttatctagattatatgttatatataatatgctatgtattataattattaataatacatcacagaaaaagtcttaaagaatgtacaacaattttttttttttctgagatggagtcttgccctgtcgccaggctgcagtacagtggcatgatctcggctcactgcaagctccacctcccgggttcacacgattctcctgcctcagcctcccaagtagctgggattataggtgcccaccaccatgcccagctaattttttgtacttttagtagagacggggtttcaccgtgttaaccaggatggtctccatctcctgacctcgtgatctgcccacctcggcatcccaaagtgctgggattacaggcatgagccaccgcacccggccagaatatacaacaatttttaaagggtttcttctgggattggtaggaagaacaatgtactttacaattcttttatggggaaaaaatatcaatccacagtgcctatcattgttaccagttagctcttcctagctcctccatgtccagatatcagcagtgtgaaaacactgaaaagaagcggttcctggggccaggcgcagtggctcacactgataaccccagtgctttgggaggcctaagcaggagcatcgcttgagcccaggagttaagaccagcatgggaaagatagcgagactctgtctctaaaaaataaaaaattagccaggcgaggtggtgcatgcctgtagtcccagctactcgggagactgaggtgggaagattgcttgagcccaggagttcaaggctgcagttagccatgatggtgccactgcactccagcctgggtgacagagtgagaccctgtctctgaaaaaaaaaaagttattgaatccccatgtggaggacacattgtggctgaaatgatggagtaaaacataaccactgtgaggatgaggtaaagccagtatttcaagaacttgcaactaatctctcccaaaggaaactgtcttggacagcctacaggctcagaagtgaaaagcaacggcctacagcattccacctgtcccaggaaacagttccagaaggacgtgctcagtctgaccccagagaaacctcccggacagctcccctggggacacctcccacacatgggtctgaagatccaagatttatttcactcaaactggttctttctcaagagggtaatggagcattgacgtggctcactgaattcacaggcgtctccaaacaaaaatactaaataatttttaaaaaatagaaaccacacactctgggtattacatgtaagaagcatgctgtgattctaactatggcaccccaaaaagcacaaaattcagatagtaagcgggcccccaacacccttgaatagcgttgcttactcacccacgccagcttccccatagcccaggtgaggcggaatgatcactgtccgtttctcgccaacgcacatctctctgagacccatgtccatccccaacacaacttgcccagatcccagaacaatactgtaagttttgcctaaattccacctaaaatgaaacagaagagcctcatgttaggtcaccaacccactggcactgagagtgttcctatgagaagaacacatcactcctagggtatttctaccaaagaaatgcaaatccctatctaatcatgaggaaacatcagacaaaaacaaattggggcacatgctgaaaaatgtctggctgtcatcttcaaaactgtcaaggccatgaaaatccaggcaagactgtggaagttccagagtggagaagcatagtggaatggggtcctttttgcttgagcccaggaggtggaggctgcagtgagccaagatcgtgcccctgcactccagcctgggagacagagtgagaccctgtctcaaaaacaaaaaacaaaacaaaaaaccctggcttttggattcagcaagacctgagatggattcctggttctgccacttaatttgaccctgagaaatgtaatctctcagttactttatctatgaaacggagacaacaaatatagctatctcacagggacattttaagtcgcaaataacatgttatgcttggcacagtggagaggaagtaaaaagggctcaataaatgtttggccttgaggtgtaaagtgtttatgtctgtaacagtctaagactaaaaaaaaaaaaaaaagaccaccaagagtttaattatccttgatggccatgggcctcaggaagccagttaaaaaaaagtttgctctatcacttcggtcactactaaaaataaatctactccaaaatctatgccattcctatcacttcctaaaggcaaacagtgtttatgttctttactccaaggagaaaagccccctgaccccccttgatgcccatgagcactggggacaacatggacgggtgcccctttgggtcatatcctcttctcaggcttcccgacctcccctgggcccagggcagccgcttctttccctcctccagctgattaccagcaaaccaagacagggtttgtgttttcccacctgggaggaacccaaaacaaagccaactcagggatggctttggggagggagccaactcccactgcctgcctttttctggggctactccagttgcaaagtcttatgacagaatattccagaactcagtcatccaggaacgcatgtttcttcttcctccttgaggccagtttaaacacgcacgcgtaagaaaatcctccaagcaaacaatttgttgtcatgtgtcatctctgaacacaccactcattctttttcctcgggtcctgtgattttctttcttctctcttgggcagtgtttctctcatacacggtcctcactccccctgcatgcttcctggccccatccaccgccggcctgcagcttcctgcctgcttcaccctctccggctcactcccactcctctcctcccttctaggcagcagctgctgccttagtcctgatgaatggggcccagcccacacggggctctagctgggaccagataggcaggtgctggccaagctttccattagcccactattctgaagctcacaccaggaagacaccagcagggacgccagccgctactcttctgctgcagatttacatgtaatacagaggctctcagagtacaaaatgcacttcctgataaggagctctggctcatgtggctcctcagtgctctgccaggatgttatgagtcctccaaacacaagcaggaggcagggagactgactctccccgccccacgtgagaagcagatcctggagcctctgagaaggaattcctttgttcattccccacacccacttcccctttcctcagcctcaggatcagcggacaggaatatgaacatcagcaggagcagtgacagcagccacggaccttacagacccttctaacctcatggaccattttcactcttaggagctcacttgatccacaaaagcactacaagccatgccccttccctgctgccctgcctcccgctagcttccaatagtcagtggttgggatttctttgcaaggtctgttgtaagccaggtccctgtacatctgggccctggaagcctagcacatatttcactgattctaaaatgcttattttttcacagtttaacctttgtataattaggatacattt

SEQ ID NO: 1882700 - DNA, 4001 bp, Homo sapiens
agtaaaacataaccactgtgaggatgaggtaaagccagtatttcaagaacttgcaactaatctctcccaaaggaaactgtcttggacagcctacaggctcagaagtgaaaagcaacggcctacagcattccacctgtcccaggaaacagttccagaaggacgtgctcagtctgaccccagagaaacctcccggacagctcccctggggacacctcccacacatgggtctgaagatccaagatttatttcactcaaactggttctttctcaagagggtaatggagcattgacgtggctcactgaattcacaggcgtctccaaacaaaaatactaaataatttttaaaaaatagaaaccacacactctgggtattacatgtaagaagcatgctgtgattctaactatggcaccccaaaaagcacaaaattcagatagtaagcgggcccccaacacccttgaatagcgttgcttactcacccacgccagcttccccatagcccaggtgaggcggaatgatcactgtccgtttctcgccaacgcacatctctctgagacccatgtccatccccaacacaacttgcccagatcccagaacaatactgtaagttttgcctaaattccacctaaaatgaaacagaagagcctcatgttaggtcaccaacccactggcactgagagtgttcctatgagaagaacacatcactcctagggtatttctaccaaagaaatgcaaatccctatctaatcatgaggaaacatcagacaaaaacaaattggggcacatgctgaaaaatgtctggctgtcatcttcaaaactgtcaaggccatgaaaatccaggcaagactgtggaagttccagagtggagaagcatagtggaatggggtcctttttgcttgagcccaggaggtggaggctgcagtgagccaagatcgtgcccctgcactccagcctgggagacagagtgagaccctgtctcaaaaacaaaaaacaaaacaaaaaaccctggcttttggattcagcaagacctgagatggattcctggttctgccacttaatttgaccctgagaaatgtaatctctcagttactttatctatgaaacggagacaacaaatatagctatctcacagggacattttaagtcgcaaataacatgttatgcttggcacagtggagaggaagtaaaaagggctcaataaatgtttggccttgaggtgtaaagtgtttatgtctgtaacagtctaagactaaaaaaaaaaaaaaaagaccaccaagagtttaattatccttgatggccatgggcctcaggaagccagttaaaaaaaagtttgctctatcacttcggtcactactaaaaataaatctactccaaaatctatgccattcctatcacttcctaaaggcaaacagtgtttatgttctttactccaaggagaaaagccccctgaccccccttgatgcccatgagcactggggacaacatggacgggtgcccctttgggtcatatcctcttctcaggcttcccgacctcccctgggcccagggcagccgcttctttccctcctccagctgattaccagcaaaccaagacagggtttgtgttttcccacctgggaggaacccaaaacaaagccaactcagggatggctttggggagggagccaactcccactgcctgcctttttctggggctactccagttgcaaagtcttatgacagaatattccagaactcagtcatccaggaacgcatgtttcttcttcctccttgaggccagtttaaacacgcacgcgtaagaaaatcctccaagcaaacaatttgttgtcatgtgtcatctctgaacacaccactcattctttttcctcgggtcctgtgattttctttcttctctcttgggcagtgtttctctcatacacggtcctcactccccctgcatgcttcctggccccatccaccgccggcctgcagcttcctgcctgcttcaccctctccggctcactcccactcctctcctcccttctaggcagcagctgctgccttagtcctgatgaatggggcccagcccacacggggctctagctgggaccagataggcaggtgctggccaagctttccattagcccactattctgaagctcacaccaggaagacaccagcagggacgccagccgctactcttctgctgcagatttacatgtaatacagaggctctcagagtacaaaatgcacttcctgataaggagctctggctcatgtggctcctcagtgctctgccaggatgttatgagtcctccaaacacaagcaggaggcagggagactgactctccccgccccacgtgagaagcagatcctggagcctctgagaaggaattcctttgttcattccccacacccacttcccctttcctcagcctcaggatcagcggacaggaatatgaacatcagcaggagcagtgacagcagccacggaccttacagacccttctaacctcatggaccattttcactcttaggagctcacttgatccacaaaagcactacaagccatgccccttccctgctgccctgcctcccgctagcttccaatagtcagtggttgggatttctttgcaaggtctgttgtaagccaggtccctgtacatctgggccctggaagcctagcacatatttcactgattctaaaatgcttattttttcacagtttaacctttgtataattaggatacattttatgaccgacagtatgtcatcaattagcgtttttacttggtcagagatacatgaaatgtttccatcacgccctttagagttgttgaaatacattaaatgcattagcatacaggatcccataccgagagggagagctctgaagagtatatccatagggtcttttctttttctttctttttggagacagagtctcactctgttgctcaggctgcagtgcagcagcgctatctcggctcactacaacctctacctcccagattcaagcgattctcctgcctcagcctcatgagtagctggtattacatttgcccgccactatacccggctaatttttgtatttttagtagagacggggtttcaccaagttagccaggatggtcttgatctcttgacctcgtgatctgcccaccttggcctgccaaagtgctaggattacaggcatgagccactgcacccagcctctgtgcatcaatttttaaagaaagcagttcggctgggcatgatggctcaaatctgtaactccagcactttgggaggccaagaggggaggatcatttgaggtcaggagttcgagaccagcctgggcaacatagtgagacccccatctctaaaaaaatttaaaaaattagcctgggtcaggtgcagtgacttacacctctaatcctaccactttgggaaactgaggcaggaggatcacctgaacccaggagtttgagaccagccagggcaacatggcaaaaccttctctctgctaaaaagtaaacaaaattagccaagtatagtggtgcgtgcctgcaatcccagctacttgggaggctgaggcgggaggatcacttgaacctggaaggcagaggttgcagtgagccgagatagcaccactgcactccagcctgggtgaaagagtgagactttgtcaaaaaaaaagaaaaaaaaagaaagaaaggaaggaaaaaaaagagaaagaaagagaaagaaaggaaagaggaagggagggagggagcaaggaaggaaggaaggaaggaaagatagcagttatacgatgagatctgcttttcagaaagacaatttcatggggtgaaaaatgacctggagcagggcaagaccatcaataggaaactcttaacacaatgcacctgagcagtgatgcagccacgagctatgcagtggggcagcatggagataaaagctctcaaccagcatctacccaagagaggaggatggtgggagcatgcaactgtcaccctccaggctcactcccacactattctg

SEQ ID NO: 1882701 - DNA, 4001 bp, Homo sapiens
acgtgctcagtctgaccccagagaaacctcccggacagctcccctggggacacctcccacacatgggtctgaagatccaagatttatttcactcaaactggttctttctcaagagggtaatggagcattgacgtggctcactgaattcacaggcgtctccaaacaaaaatactaaataatttttaaaaaatagaaaccacacactctgggtattacatgtaagaagcatgctgtgattctaactatggcaccccaaaaagcacaaaattcagatagtaagcgggcccccaacacccttgaatagcgttgcttactcacccacgccagcttccccatagcccaggtgaggcggaatgatcactgtccgtttctcgccaacgcacatctctctgagacccatgtccatccccaacacaacttgcccagatcccagaacaatactgtaagttttgcctaaattccacctaaaatgaaacagaagagcctcatgttaggtcaccaacccactggcactgagagtgttcctatgagaagaacacatcactcctagggtatttctaccaaagaaatgcaaatccctatctaatcatgaggaaacatcagacaaaaacaaattggggcacatgctgaaaaatgtctggctgtcatcttcaaaactgtcaaggccatgaaaatccaggcaagactgtggaagttccagagtggagaagcatagtggaatggggtcctttttgcttgagcccaggaggtggaggctgcagtgagccaagatcgtgcccctgcactccagcctgggagacagagtgagaccctgtctcaaaaacaaaaaacaaaacaaaaaaccctggcttttggattcagcaagacctgagatggattcctggttctgccacttaatttgaccctgagaaatgtaatctctcagttactttatctatgaaacggagacaacaaatatagctatctcacagggacattttaagtcgcaaataacatgttatgcttggcacagtggagaggaagtaaaaagggctcaataaatgtttggccttgaggtgtaaagtgtttatgtctgtaacagtctaagactaaaaaaaaaaaaaaaagaccaccaagagtttaattatccttgatggccatgggcctcaggaagccagttaaaaaaaagtttgctctatcacttcggtcactactaaaaataaatctactccaaaatctatgccattcctatcacttcctaaaggcaaacagtgtttatgttctttactccaaggagaaaagccccctgaccccccttgatgcccatgagcactggggacaacatggacgggtgcccctttgggtcatatcctcttctcaggcttcccgacctcccctgggcccagggcagccgcttctttccctcctccagctgattaccagcaaaccaagacagggtttgtgttttcccacctgggaggaacccaaaacaaagccaactcagggatggctttggggagggagccaactcccactgcctgcctttttctggggctactccagttgcaaagtcttatgacagaatattccagaactcagtcatccaggaacgcatgtttcttcttcctccttgaggccagtttaaacacgcacgcgtaagaaaatcctccaagcaaacaatttgttgtcatgtgtcatctctgaacacaccactcattctttttcctcgggtcctgtgattttctttcttctctcttgggcagtgtttctctcatacacggtcctcactccccctgcatgcttcctggccccatccaccgccggcctgcagcttcctgcctgcttcaccctctccggctcactcccactcctctcctcccttctaggcagcagctgctgccttagtcctgatgaatggggcccagcccacacggggctctagctgggaccagataggcaggtgctggccaagctttccattagcccactattctgaagctcacaccaggaagacaccagcagggacgccagccgctactcttctgctgcagatttacatgtaatacagaggctctcagagtacaaaatgcacttcctgataaggagctctggctcatgtggctcctcagtgctctgccaggatgttatgagtcctccaaacacaagcaggaggcagggagactgactctccccgccccacgtgagaagcagatcctggagcctctgagaaggaattcctttgttcattccccacacccacttcccctttcctcagcctcaggatcagcggacaggaatatgaacatcagcaggagcagtgacagcagccacggaccttacagacccttctaacctcatggaccattttcactcttaggagctcacttgatccacaaaagcactacaagccatgccccttccctgctgccctgcctcccgctagcttccaatagtcagtggttgggatttctttgcaaggtctgttgtaagccaggtccctgtacatctgggccctggaagcctagcacatatttcactgattctaaaatgcttattttttcacagtttaacctttgtataattaggatacattttatgaccgacagtatgtcatcaattagcgtttttacttggtcagagatacatgaaatgtttccatcacgccctttagagttgttgaaatacattaaatgcattagcatacaggatcccataccgagagggagagctctgaagagtatatccatagggtcttttctttttctttctttttggagacagagtctcactctgttgctcaggctgcagtgcagcagcgctatctcggctcactacaacctctacctcccagattcaagcgattctcctgcctcagcctcatgagtagctggtattacatttgcccgccactatacccggctaatttttgtatttttagtagagacggggtttcaccaagttagccaggatggtcttgatctcttgacctcgtgatctgcccaccttggcctgccaaagtgctaggattacaggcatgagccactgcacccagcctctgtgcatcaatttttaaagaaagcagttcggctgggcatgatggctcaaatctgtaactccagcactttgggaggccaagaggggaggatcatttgaggtcaggagttcgagaccagcctgggcaacatagtgagacccccatctctaaaaaaatttaaaaaattagcctgggtcaggtgcagtgacttacacctctaatcctaccactttgggaaactgaggcaggaggatcacctgaacccaggagtttgagaccagccagggcaacatggcaaaaccttctctctgctaaaaagtaaacaaaattagccaagtatagtggtgcgtgcctgcaatcccagctacttgggaggctgaggcgggaggatcacttgaacctggaaggcagaggttgcagtgagccgagatagcaccactgcactccagcctgggtgaaagagtgagactttgtcaaaaaaaaagaaaaaaaaagaaagaaaggaaggaaaaaaaagagaaagaaagagaaagaaaggaaagaggaagggagggagggagcaaggaaggaaggaaggaaggaaagatagcagttatacgatgagatctgcttttcagaaagacaatttcatggggtgaaaaatgacctggagcagggcaagaccatcaataggaaactcttaacacaatgcacctgagcagtgatgcagccacgagctatgcagtggggcagcatggagataaaagctctcaaccagcatctacccaagagaggaggatggtgggagcatgcaactgtcaccctccaggctcactcccacactattctggttgcccttacgtggagtccagcagggtcccatccagaagtgaggcattgtagtgatatttgaggtaatctcccttcttactcagcactgagcagtcggggggtttgtagtgggaggtgatgctgatggagtccgaagggttgtggaagtcgatcacat

SEQ ID NO: 1882702 - DNA, 4001 bp, Homo sapiens
ggataggagggaaatttgtcattgtataccttttcatacttccagggttttaaatcatgtcaatgcatcacttagtagaaaaaaaagttattttttaaaaaagaaaaagaatgccctctactatacaaattaaaaagctaacactagttaatcatagttaaaggtgtgatgctgccctaggaatagatagaaggtaaaagataaaaattctacacaaagactcaaaagtacatataagaatttagttcataacaaaaatcaccttttagggcagtgaggaaatgatagagtcattcatgacggatgttggaaaaactagctaaccatatggaaaaaaataaagttaaatccttcctgtcacagtgataccacaataaattccagatggattaaagacttaaatatgaaagcatttatgagcatagagagaaactgcagaacgttgttaacactggttatctcatggtagtgagaatggaaggggctgacaggaaatttacattttttgctatacatttttgcattgtttccattatgcaattaggacatattatctctggcctggcacggtggctcatgcctgtaatcccagcactttgagaggcccaggcgagtggatcacttgaggccgggagtttgataccagccaggccgacatggtgaaacctcatctctactaaaaatacaaaaaaattagtcgggcaaatttttttgcatcactacaggtgatggtgcacacctgtagtcccagctactctggaggctgaggcagaagaattgcttgaacctgggaggtggaggttgcagtgggctgcaatcacatcactgcactccagcctgggcagcagagtgagactctgtctcaaaaaaaaagaacatattacttttgaaaataaaaattctaataaagaatatcttaaagaatagaaaaaaaaaaccattaaaaggcttgagggaaatacaagcaaacatttatatactctaggaagaggacagactttgtaacaagtcaccaaagccaggaaccataatgaggaagtctaatgtatttaacaacataaaaggtttacagttaaatgggccaaaaatcaacataaccaaaattaacaaacaaataaattgaggaaaatgaggaaaatgtttttaataatatgcagccataaaataattaatatttttaatgtgtagagctcttcaaatcaacaagaaacagacaaatgccaatgccctaaatagaaaaataggcaaaggacccgaacaggtagttcacaaaagaaggtactcaaataaacacccaaaggaatttcaatcccaatagcaatagaaaattcagattaaaaccacaggtatcattgttttctcctataaattagccaagattatttttaaatgatacccagtgttactgaatttgtagggaatgggatactcttaaactgtgatgctgagtaaaaccttccttgagggcaacttggtagtatgtatcaaaaggtataaaaatacacataaccactgggcacagtggctcatgcctgtaatcccagcactttgggaggccgaggcgggcagatcacttgaggtcaggagtttgacaccagcctggccaacgtggcaaaaccctgtctctatcaaaaatacaaaaattagcctggtgtggtgacaggtgcctgtaatcctagctactcgggaggctgaggcaggagaatcacttgaacccagcaggtggaggttgcagtgagccgaggtcacaccactgcactccagcctgggtgacaaagcaagatactgtctcaaaaaaaaaggcagggcgcggtggctcacacctataatctcaacactttgggaggccgaggcgggcagatcacctgaggtcaggagttcaagaccagcctggccaatatgatggaacccctatctctactaaaaatacaaaattagctgggagtggtggctcatacctgtaatcccagctattcaggaggctgagacacgagaatcgcttgaacccacgagatggaggttgcagtgtactgagatcacgccattgcactccagcctgggcaagaagagcgaaactccgtctcaaaacacacacacacacacacacacacacacacacacacataacctttgacccagagattcttctagcgatgtatcccagggaaacaattaatcatatattttaagatttccctacaaaaataattactgcagccttaagtgtcaaaatacaggaaacatacaggacaaacaacaaggattgattactaaatataggcaaatctatacaatgaaatatatgcagctgttagaatgggctagatcccactgtattaaaatggaaagctcttgaaacctaagaaaactgtggttccattatatgaacagaaatctggtgtacacagaaaagtggtctttcaattggaaatataattccagggaataaagaacagaaccacactggaatgtaacaaagaataatacacatatgcactaaatgatttttttttggtaacagaaaaagataaaaacaactcaaatattcatcaataggggaatggttatctaaatacaatatactcacccaatgggacacccatgtagatgtaaaaaataaaggatttctctctatgtattagtatggaaaaatcccagagaaacaaaaatcaaggagaacaccaccttgttccctagtaatactatattctgaaagccatataatttaaagagaagaaaataacatttgtgtttgcttatatttgcattttaaaaagtccacacattaggctgggcacagtggctcacgactataatcccagcactttgggaggctgcattgggtggatcacctgaggtcaggagttcaagaccagcctggccaatatggtgaaaccccatttctactaaaaatacaaaaattagccaggcgtggtggtgtgtgcctgtaaccccagctacttgggaggctgaggcaggggaatcacttgaacctgtgaggtggaggttgcagtgagccaagattgtgccactgcactgcagcctgggtgacagagtgagactctgcctcaaaaaaaaaaaaaatccagacactggaaaaattaaaaatagaaaccaataaagatggttaactctaaggggtaggggagacagggaggttaggcagacaggaacaggtatacaacatatcttttcttttttttttttttgagacagagtctcgcactgttgcccaggctggagtgcagtggtgtgatctcagctcactgcaacctccgcctcctgggttcaagtcattcccctgactcagcctcctgagtagctgggattacaggcacccgccaccatgcctggctaatttacaacatatcttaatgcatactttgttttggttttgagctatgtaactatttctcttttccaaaaaatttaaatgacaaatttaaaagagatccaaggaacaagaatgaattattcaaatgaaataatgccatatacaaattcttctgtaatggttttggatgactacattaactagaagtctatcacctcagagacagggaggttgctgtcactacttgtttgctctactggaagctaaaggagtagtttcaaacaacacatgccactagaatgagcaaaacaggccaaacacaagccatctctacaactgcaggccatgcctgataaacaaaagaaaactttgaacaacaaaagaggccagtaattagcctctatggcacccagcatcgagaagggagctgaatgcatccaaccagtgccgtccagctgatcagcctctgaaatttgtaaagcactgtgacacatatcttatctctttaatctaaccatctacttgacaaagttgctggaatagggaaaaatgaagtccaaggcagtcaaacactatccaaagtcatacagctagtgcaccacagacaggggctagagcccagctctcttggcattaagcccattctctgcccactgtacctccttga

SEQ ID NO: 1882703 - DNA, 4001 bp, Homo sapiens
ccccaattcaattaaggaaattccaagtctcatttagccttgggctatactttcaatatccttctaagtactgaattcctaagacagtgaaaccatctgacaggaatgttggggtttacccaaggacaggatatcagtgtttggcttgtaaaccagatgcggtggatgtgacagtcctgggagggaagcagcatggtctcaggatggcttgcagccagtggtgccgtcctgtcacacattaggaagagaaaatgaagcagaagaaaaacgctgcctgagatgttctcagcaaagtgcttttccatcaaagcctctgcttcttgacaaacagactctgagatgcatctaggaatagctctgatgtagaaaaatacaaggtcagagacacatcgggtatgggaagagtccatttactcatctatacaatagctatttattgagtgcctactatgtgccaagcactattctatgggctgggattcagccttgaacaaaacagacaagttgctgacgtttgaatgggggaaagcagacactaaacagctaaacaaatgagccagataatcttacctatgaataacagttatctagaaaggaaaactgcatgatgctcagggaaggtttctctgggacagtgtgaatggcaggaagcggcagcctcggcaagatctgctgttcaactcagtccttcaacaaaggcagctcaatagagcagctggacccaggtgttggcacttctgttcccttctcttgcagagacctggagttttcttccatgctcttggaggtggtctttcactcaccagctgcctcacaccctatcccccatccaatccctcctgcggactgtggtggcctccttagagagctgctgcctgacactcgctcttcagagttgccattgtgttcttcctgaccagccctatctgcatgagctatgggaccgtgtgctctcggctgccccagccaacctggccttgcctgttttgcagtgatgtaccaggctgtctggggattcaggctccattgctggagctgtccttcactcatcaggttcagagagctcagaaccagaaaccaggagacctaggttctcatcctaacttgctatgtgaccttggttaagcctgtctggactcccatctataaaataaaaggactgcattagtgattctctaactgttctgtgggacccaggtcttttctctctgcagaagtgattcgaattttatccaaaaactatttttatggttgtaatagaaaaaacaaaactccaatggtttatatgccaaatatcaacagtttaaaacccaacatgttaatttgttttgctaggcaaactcgtttttgcacagatcttagactaaatctcttattgccatctgtgtgtgtgcatgtgtgcatatatatatatgtaaactatttattaaaatgtcattgatttggatgcttgtaactcagctcttatctgggatgtctgcacctaataaacagtaccagcaagtgcatgactacagtgcatacgttccctgagcaactcaccaccaggtctgtgctagcagcatgttctcagtgaacattgtaatataggctaggcctggctttttttttttttttttttttttttttttttttttgtagttaaatgttttagttggaaggaactttagatatacagaaaagttgtcaagacagtagacagttcctatgtattcttcaccagcctcccctaatgttaaccttttacatacccctcatcgcattggcagagcagggaaattaacattggtacagtactgttacccaaattacagacttcattcagatgtcaccagctcttctactactgttcccgggtcccctccagggtcccacatggcatttagttgtcaggtcttcttagtctcctccagtctgtgttggttttccagtcttgtttttcatgaccttgacaccttagaagagtgcgggtcgtgtattttgtagaatccccctcaatttgggtctgtctggtggattctcatgattagactggggttatgcattccagaaccccagtctaattgtgagatgagtttcaatgcattccagaaccccagtctaatcatgagatgcagaccacatggagaccttaatgcatggagatcttgcccactagtagcgtggcccagcgttttgggacacagcccaatcagaccagtatttcccctctggagctggattgaggagggaacatggggactgaaaccttgaatgcttctgctttaattaccccgaaaaggtaaaaagcattgggcggaggagccccctcattagggatcactggggatactgagcagcattactgttgagagtgtgaaggcagaggaaagctgagatacagctcttagtgatgtcccttggctgaagccccatgggaaatggccaaattctatattttatgtcactgaaaaattggtaagagttggaaaaagggaaggttctgtaagtcactagtctcagtaatcaggaattattgatactgttggaaatggaaagcgtttctgtgcttagaaggacatacacgatgtgtgagtgtgtaagtgtatgcatatgtgtgtgtgacacagtgtacatgagtatatgtgtgactgaatgtatgcataagtgtgtgtgtacgtgagtgtatgtgtgagtgcatatgtgtgtatatgtgtatatgacactgagtttgtgagtttgtgtgtgtgcatgagtgtatatgtgagtatatatatgactgtgtgtgtgtgagtatatgtgtgtttgtgggtatatgactgtgtgttcatgagtgtttatgtgagtatatatgtgactgtgtgtgaatgtgtatgtaagtgtatgagtgtgagtgtatgacagtgtgtgttcgtgagtatatatggaagaatgtggatgtgtgtgagtgtatgtgtgtatatgatagtgtgtgtttatgagtgtatattttgagtgtatgtgtatgtgtgtgactgtgtgtgtatatgtgtgtatatgatagtgtttgtgagtgtatatgtatgtgtgtaattgcttgtgtgaatgtatgtgagtatattgtgactgtgtgtgtttgtgagtgtgtatgtgagtatatgtgtgactgtgtgtatgtgagtgtatgagtgtgtatgtgtgtatgatagcatgtgggtgtttgtgagtggataacagcatgtgtttgtgaatgtatatgcatgtgtgtgactgcatatgtgtgagtatgtgagtgtacgtgtgtatatgatagcatgtgtttttgagtgtatggaagtgtgtgttcatgaatatacatgtgagtatatgtgtgactgtgtatgtaagtgtgtgagtgcatatgtgtatgatagtgtgattgtatgacagtgtgtgcttgagagtgtatatgtgcatgactgcatgtgtgtgtgtatgtcagtgtatgtgtgagtgtatatgtgtgtatatgatagcatgtgggtgtttgtgaatgtatgacagtgtgggtttgtgaatgtatatatatgtgtgactgcatgtctgtgtgtatgtcagtgtatgtgtgagtgtatatgtgtgtatatgatagcatgtgggtgtttgtgaatgtatgactgtgggtttgtgaatgtatatatatgtgtgactgcatgtgtgtaagtcagtgtatgtgtgagtgtatatgcgtgtatatgatagcatgtgggtgtttgtgaatgtatgacagcatgtgtttgtgaatgtatatgtgtgtgactgcgtgtatgtgtgtatgttggtgtatgtgtgagtgtatgtgtgtatatgatagcatgtgggtatttgtgagtgtatgacagcgtgtgtttgtatatgtgtgtgactgcatgtgtgtgtatgttggtgtacgtgtgaatgcatgtgtgtgtatatgatagcatgtgtttgtgagtgtatgacagtgtgtgttcgtatgtgtggccgtgtgtctgtgagactgtggaactggcagtggcttggga

SEQ ID NO: 1882704 - DNA, 4001 bp, Homo sapiens
aggtgccgcagcctccgcgcgcaaaacccgccggcggggcccgggtcgcaccgtcccctcctgggccgagcacctgaaacccacctcgtccctccgtccccctccccaggggctgcaatgaggacgctgggagtttgaatggaaacgaaggccggggaggggggtccgcgcgggcgtgggttttttatccaagtcggtgacctcttggttaagtcagccctgcggtttcaacgcccaatccccccaaaaaagcctgtgggggtccacgtctccttgtgtcttccggggatccggcggagaatgtggcggggccgggcaggggggtcccagtcccacgccgggtgcgtcgtgccccgagtctccccagaaggcggctgtcgcgcggctgcacaagttttcgcctccctcgcgcggccgctgttgttgtggtcgccatggcgacgggtcgcggttttatttttaatagcggccggcgattagagagatgcctgcaccgctttcgcctaagctctgcgtcccccgcgggtgaagcacccacgccccgccccagcccccgcctcgctccagcgccccttgcacgtccccaggtggccctaaactctagctgggcgcacccgtagctccaggccgggcaggggagccgagggaagcagccatctaggccctcagaggcggcgaggacccccaggatccctcaagctgggagggacgggtaccccatccccaatacaacgcgaccttcctccttgccttccacaccgtcttaccgagtcctctaaccccacagaggtgtcctcgggccccctctgcgcgcgagcagtccgaggcccaggaagacaggatgcgcgccactccgggataactggccgaagaatgaggccggggtccggcctgcgtcctggccctgcgagtccggctctttccagaagccatgcagtgggtgtcccctcccaagccgcaagttccccctggagggacaaggcctggctttaaggggctcctccacgtttccaaggctcccctggttctgtcccggtcccgcttggtcctgaccacccagagggcatgcttgaccgcgggggtcgtggtgtggggctgcggccaacggaagggagagacgtggggagggggcctgcaggtgtgtggaagggcgcgtgtagacgcgacccactgggagcggagggagaggcgtcgctccccaaatatttgggggaaggggagagcccccgaagcgctctccggattcggcctttgaaatgctagagctggcctagctggggatgaaagaccgcccgcggggctgcgccttaacggcctttgtctggagggagggcgaccgcgacgggggcaggggtttaatcgacagggttgggggtgacggctgggccgggcgggattctccgctgctcacccaaggaagcgtctcctgggctccaggggcctaggccgtctagcctcggggtctgcacagcacgccaccccgctggacccggtaccaggacgcgtagaccccctggcagggcactgacgagcacctggacctgtagtcagggtccaatccctcctggtctagggaggcgaaatccatccagcccaggcgcacccgccctttctcggcgtgggagccgtctagccacgctcagacctcggcctccgcgcgcgttcctcccccgcatcgcgctctgagctgcgcctcggccggaggtggcgctctgtgcgccccacggatcccgacgcgggaggctcagaacccgggggaccctcaccggtggctcctttcccttccatcccctcgacttcccggctcagggcgcggccctgccttcggcgcgggagtgggggactggggggcgcggggtcccagggtggggacgaggcgggctgcaggccctttccccgactggagctcgctcccaagtggaaatgtgggtggagggtcctcattcagatgccccaggcctcggatcctgggcgggggcgcgtggcagccgccaggtgagtgccccaaacccgcccccctccttccccaaagactgactccccctccttttatggagagaggaaggctggggccctggatccgaaccgtggagagcggccggagcgccggggcgggggcggggaccggctctctggccctttttggcgcagcagctctgggcgctgcccgctgccgccgctggggcccgagagaggcgagccggcgacggcggcgcttctgcggcggcctcctccctccccacccggtgccgcaggattgcagctggcactggagggtgggcaagctcgagggaggggcgcggagccccggcgcggagccgggcgcggggctttgatggatttagctgcttgcgcgagcgcgtgtgtgctccctgccgcggcggcggcgcccgggccctgccgggtccgcacgaaccccgagcgcttccgaggtgcgggtcccaggcccggaatccgggggaggcggggggggggggcgggggcgggggcgggggaggggcgcggcggcggcgctataaccctctccccgccgccggccggctccacacgcgcgccctgcggagcccgcccaactccggcgagccgggcctgcgcctactcctcctcctcctctcccggcggcggctgcggcggaggcgccgactcggccttgcgcccgccctcaggcccgcgcgggcggcgcagcgaggccccgggcggcgggtggtggctgccaggcggctcggccgcgggcgctgcccggccccggcgagcggagggcggagcgcggcgccggagccgagggcgcgccgcggagggggtgctgggccgcgctgtgcccggccgggcggcggctgcaagaggaggccggaggcgagcgcggggccggcggtgggcgcgcagggcggctcgcagctcgcagccggggccgggccaggcgtccaggcaggtgatcggtgtggcggcggcggcggcggcggccccagactccctccggagttcttcttggggctgatgtccgcaaatatgcagaattaccggccgggtcgctcctgaagccagcgcggggagcgagcgcggcggcggccagcaccgggaacgcaccgaggaagaagcccagcccccgccctccgccccttccgtccccaccccctacccggcggcccaggaggctccccgcgctgcgggcgcgcactccctgtttctcctcctcctggctggcgctgcctgcctctccgcactcactgctcgcgccgggcgcgctccgccagctccgtgctccccgcgccaccctcctccgggccgcgctccctaagggatggtactgaatttcgccgccacaggagaccggctggagcgcccgccccgcggcctcgcctctcctccgagcagccagcgcctcgggacgcgatgaggaccttggcttgcctgctgctcctcggctgcggatacctcgcccatgttctggccgaggttggtgccgcccccgcgccccgtccctgcgccggctcctccggcgcacaccccccgccggctggggcgccacgggctctgcagagagcgttttggttcctgccagggtggtcgatgtttagattttcccaactgggttctattttctgccatgcctaagtgtgtgtggggagtttccagcgtgttgcgtcggtcgctctgcctcggggggaccggggagcagcgaggtggacgagtgggcagaaacttcggggggcgcagtgtcctctccggggaaggggagctggggcgcagcgggcgctgcagcagcggggtgcggggagcggggaagggggtgtgtgtgagccggcggagcctggggaggagagaagggcggcggataaataggtaggggcggctgctgcggaagcccctggccgggcagggtgggcagcgccaagctgcagccctcggttcccagtccccaagcccggcggggctcagggccggcgcagtcccgcccgcccgggcctgcttacaggtggctgagcgaggcgagctggggctgg

SEQ ID NO: 1882705 - DNA, 4001 bp, Homo sapiens
ttcgtaccctttccccctccatcctcctctgagaactcacccaggccacctagcgcaccttgcatggccaaagcctgcccaccagggagcgaagagtactccaggaataatcctcaagatcaagaaacttactggattttaatatgtggtggggaaaaaaaaaagtgtgtatgtgtgtggagggggggttagatggggggaacaggagccttacagatagcagctattaagtggtttaaatctgttggttaaaaagctgaataaacaaatacacacatgggtctaggtctttggggattccggattctgcggagcgtcccaagcggtggccaggtcgacctctcttgactcatccctgtgcaaaacgcgcactggctccgctttccaatccccagacttgcacccgttcttcccctcacgttccttctaatcaaagcgtcaccccatgcgccaggtgccctaagagacttacctaagagattccagagtctgagaatagtgagggtaacttttcctccctgctctagagaggccccaacacccacagcaagtgagggtccacactgaggtcgggtgtcagggcgcgttgcggcctcgcgggtgggcagaggcgcgcagaaaacgcgcgggtggcgcgcgcggccacccagtgggtcccgcccgcgccgccggcgccgccgccgccgccgcacgtgcgccgccgcgagcgcgaagggcgttcggacccgcgctctgcccgcccgcctgcccgccggggccactgtggacttccaggtaacagccaagtgagaagccctccctatcaccgaaaggtgtctgcgctcctcccacgtcccctcaccaagtgccgcgaggtgcgatttcaccccaaacccacccacaaacagccaggcgacctctctaaagcggaataaaagtaaaaccaggccagacaccgggggaagccggtcgtgctaacgcgtggacagggaaaggaacgcgatcaaggcagcagtcatccctgtgcacggttatcccgaagcgtcagtagggcccaggagtttcttgactccagaaacaggagtgtcccctttccatctctctccttcctggagaagtacttctgagatgaacgctgaagtgcccaacttagacgcgagaagcgtgcacttgcccaactgagtaaataaaggtcagcagttggatcaataaagtgtgtgcttctaaccgccagatgtttttactgttgtttctcctcccgaggttgggggtgggggtgcggggaggaaggggaaaagacaacaaacaattaaaaagaagagagtaaacaaacacacatctggtgtttcgacacacattctcctccagccgaggtctctccggacgaagcaacattttgcattatccaaactaaaaatcatccgtgagccaacagcaaatctcccctctccacccctttttcccccatcacaaagcaaaatgaaagagaacaacaagtggtgatgctgggtccggaatgcgaccccaacgccgagcccaaatttgacacatgtcacactcgccccggcaagcagggcgctgcctttggggcgaaactttgtcgccaccgcgggaggagcgcggagcagagtaaagtcgcagctcggcccagcgtggaggtggctgggacagggtggggtgcggaggtgtagcgcgccagagtgagggccaagaaacttaccgcgaccggggacgccgtgggcagcgtcccgggaggtggcacccgcggcggcgaggcagaagcccccaaacaacacacccacgcgcgagtccgggcagctgctgccgcgagtggggggcgcgcccggggagggggggggccgaggaagccgcagccagcggacgcggccgccgcataaataaccggggcgggcgttcgcgggcgggctgcgggtggcgcggggctagagctagggcgaagcggcggccgcggagctgcacgcgccggcgtgtctcgcgctttctcggaggctcgcgctgtctcgcgcagccgctccccccacccggatctgtgtgtgtgtgtgtgtgtgtgtgtgtgtctgtgtgtctgtgtgtgtgaatgtgcgctggcaggcgcgcgcacccggccgcgcgcgcgtgttgttggcaatgcgaactgtacacacactgctcgcggggctgcctctcctcggaggggcggggtgggggacaggacgccgcagaggattctgaagtaccgccggaccacttgtttgttttgttttactttgcgttgttattgtcgttgttgttgttgataggtttggaaccagctggttaggatgcctttctcccccgtccacctatctccccccgttccctaacttctttaaggagggggaaacgcggggaagaatattgttcggatttgcagcggagcctcctggctgacgtcaggtccacctgctatgtaaacaacccgctggagaacttgtttgtgctacgccagaccttcccccacccccacccttctccccacctcctgctccgccttctccagctcgccccagacggcgagtcagggaagggggtggggagggaggcgagaacaaaaccgtatgctgtattggcaaagccgagttgtgtctgctgcttcttggcagtccccaaagtacgtcctctcagcagacggagctgctggcaaatgaaacaggggattccacttgaagtgcagaaagcctcgaagggatccaaagccctcggtggcagggagttaaaagtacatggtagtcggaaagggagacccgagcgtgcgttaaagcgctgattggcctttcttttcacggtgtgcgcctctgcggcctggggtggagagaggccgagtgtctttctcttcattgttgccctggttcctgtctcacttgggccaaggagttctcgggcttcctcgtggtcgcgcagcccaggtcaccggggcgcggcttggaaggaaggggccgccaagctgggacttagagagtctgaggttttcgggaagggtcctatcagtgactgaggggagcaaaagtaaccggaaagaaaggaaagaagaaacggtcagagcctgctccgcgcgcacttcaaagccgaggcgcccgcgtgggggatgcacgggcccagccgccagccctgggtcccggcttctatccaccgggtgtgacccggctgggcggcctgcttgggacccagggcggtgacaggggaaaggccgagggaggagagagcgggccccggaggggacgcacgaccggaatcttggcgaggggcttcctccggagccccagcccagaggggggccagcgctccctccccgccgtctccctccggtccctcccctgcccgcgggccgggcgactcttcgccggccgccttttccgcgcgccgcagactgagcccgctgctttgctcgcaagtcagtcgcaaagcgtggcgttccgagaggcgctgaaactttcctccaaatagctgcggccaataggccgtggtgaacagagcctggcccccggctgcttcccggccctcctccctggggaaagaacggccaacttgaacccctccggtggcagaagagggaggggtggtggtggttggggagacgggcgaaccgcactaacttgtgcctttgaatctttcctttcctgaaagagcagcgcgccctttctctaaagggcagtcgcgagctcacacacacacttggcaccaaccctttccttcagaacccgcggctctcccagggaggaagcagccctggcacccacgtcggtaaacacaccgtcagggtttttttagtgaaaccaattaagtcaaaaagccatggggctggccctgggaagatggcccctgccaggaggaagaggaacgaggtagagttggactttgaattgcggttctttccctgagcttttcaactccggcagtcctcaagtgctgtgcctacagactgtgttctcactcttttttaaatcgtctattttgaaatgcaggctgaacagtggacaaataat

SEQ ID NO: 1882706 - DNA, 4001 bp, Homo sapiens; identical to SEQ ID NO: 586461

SEQ ID NO: 1882707 - DNA, 4001 bp, Homo sapiens; identical to SEQ ID NO: 586470

SEQ ID NO: 1882708 - DNA, 4001 bp, Homo sapiens; identical to SEQ ID NO: 586472

SEQ ID NO: 1882709 - DNA, 4001 bp, Homo sapiens; identical to SEQ ID NO: 586473

SEQ ID NO: 1882710 - DNA, 4001 bp, Homo sapiens; identical to SEQ ID NO: 586481

SEQ ID NO: 1882711 - DNA, 4001 bp, Homo sapiens
atctccacactgttttccatagtggttgtactactttacattcccaccagcagtgtagaagtgttcgcttttcaccatatcaacaccaacatctattatttttttgattttttttttattatggccattcttgcaggagtaatgtggtattgcattgtggttttgatttgcatttccctgatcattagtgatattgagcactttttcatatgtttgttggccatttgtatatcttcttttgagaattgtctattcatgtccttaggccagtttttgatgggattgtttttttcttgctaatttgagttcctcgtagattctggatgttagtcctttgtcggatgtatagattgggaagattttctcccactctgtgggttgtctgtttactctgcttactgttccttttgccgtgcaaaaggacagctaacattcttatagtttctttttttaatgtgccagtaaactctatgtggcttctcagttaatcttcccaacaccctataagatagatacttcgattatgaccattttctagatggagaaactgaggctcaagcaaggtaagtgacttgaccagagatagctagctagtagctggtgaaaactaggactcaagctgagataatgtggctgcagcccgtgctgttcatctctaatgcctgccggattctcactgcatatcatgacacctattggggcatcagtcaatttgattagtcagcttcagtgtcttcatttgtggggttgttggaaacagatgagacaggatctggctgagaaacagccccagaaacctcctctcccagaatggcaccaaccccccttccctgcctctgagcctggccactgggtggacttccagtccacatagtagactagatcacccccagtgcatgcaaaggcagagtgaaaggtataaacaacttagtcaaatcaagctgtacaatgaaaaacaaaaggaaataaaactattctggcgcacacctttttcttattaatttcaagttggctgccaatgtttacctgctttgttcttaaaataatccattctagaattttgctagagagcaacatcgtttagagattgtcatttatgaaactctcactctcattttcccctcttttgaaattaggacaacatctacccatgtctagttttctggggttattcattctcctcaatggcattcattcattcattcactcaacacatttacatagcacctgctgtgtcccagatactgtgctaggtaccagaaggagtcaaacatagtcaatgattctgcttttccattggcttggggcatccaggaacacattttctcaggcttggagatgtgaactccaatgggcagctgcctgcccttcccctccccttgcctgcacctttacagtaaggtctactcgccgctgcagcaggaagatcctccattaggagtaaaacagagctgtgaattcggctgccccaggaacagcccgatccttgttgctccagacacatccctactgtctttttgctgttctttgctttcggcatgagtttcaggtctttcagagctttgcctctgacactttcacagaaatcttttccacccgccttttcttagtcatctttacttcggacttcctgcttctgccttttgtccctgtagattctgaagtcctcaggaacaatccaagatcttctggtgtttcagatgcttccccttcacgttccttaggtggtggtttctgttctatcagttggggtttaaggaggaggcagggatcttgggcagtgggagaagcacctctgtagggagctgactgccaagatgggaaagtgtcagcctccaggtagtggcgcttgctgggatttaccgacgctggaagcacagactttatctgtagggctcacagtttcctccaggtcccacagagctgtccggagggtcacacagcaaacagataaaggaggccagcgcagattgggcggctctctggtaccttgcggtggctgagccactcaagacaaaccgggggaaagacgccctgatgacgaaatgctaattttgcatatctctttcccaggatgcttagcaacacgtctgattcttgttattcagtacgtttttccagctattgataaatagatgtgccagggaattcttagagtatatatatatcattaatattgtaaatatagtcatcagtaaactgaaaccagaatatcactgtaaggggaaaatgaacaaatttgggggctttaaatagttcaaacagtaggaggacttattggctggtccgaaggtagtgagttatctcaattgattgttcacagtcagttacagatcgaactccttgttctactctttccccccttctcactactgcacttgactagtcttttacgagagtttccactctcctggcatccctcgtttcttgttttcatctcaattttaaaatgttgaaagtcagcatcattaaataaagcatggaatacagggggaaaacgaagtactattcttttcttccagaaacaaacagtaaatttgggaaaacccatcacagacaagaaggaaaaagaaaacaaaaatcaaataaatagtaatagatactacggaccaattattggtaaagatggtatagtatgtcctaagagatcaaagacaggaaatgggatgagggtgaataggggtttttctttttcttgtactttttcttttcttttctttctttttttttttttttttttttttttttgagacaggctggagtctctgtcacccaggctggagtgcagtggtgtgatctcggctcactgcaacctccgcctcgtgggtccaagcgattatcttgccttagcctcctgagtagctgggactataggcgcgcgccaccacgcctggctaatttttctatttttgtaaagaccgaagtttcgccatgttggccaggctggtcttgaactcctaacctcaagtgatcctcctgcctcaacctcccaaagtgctgggattacaggcgtgagccaccgcgcacggccaggatttttttaatgttttaatatcagtaggattaaggactggtatttgatgatacaacactcaatggacaaaattaagaggcatttcaaagtcgacaatccagttaagttttgaagctaagagatgtgaacattttcagagagaaagtattttggaggaagacaaaccaagtccaagagtttgaaaatagagaaggcggaagagggcagagtacattgcgggatgctcaccacgtgaggcaccagagccactttctaatcctggttcagcccttaggttcttatgtagcctttagaaagccacgcagctgcctcctcatcagaaacaaagggtcattacactgatcttccttccctcttcgctacatggaagtatacattcctaacagcctcgaggcaaagtgttgtttgatgagattgtggtggtgttgcagtacagtgtgactgccacaaatgtgtatacaacaaaagaatatttaaatttttcttataggtgaaagtaacccaaggcaccttgagggcacatgtgggtttcccaagagcttccctgtggggttttttgttttttttttttctttctgagacggagtttcgctcttgttccccaggctggagcacaatggcgcgatctcggctcactgcaacctccgcttcccaggttcaagcgattctcctgcctcagcctcccgagtagctgggattacaggcatgtgccaccacgcccagctaattttttgtattttagtggagacggggttcctccatgttggtcaggctggtctcgaactcccgacctcaggtggtccgccaacctcgggctccaaagtgctgggaatacaggcaaaaaccaccacacccggccttgaattgtaattctcaggtgttgagggggaacctggtgagaggtaactgaatcaggaagtcaagacttaagggtctcctcaatctaagtcccgaggcttttcccgta

SEQ ID NO: 1882712 - DNA, 4001 bp, Homo sapiens; identical to SEQ ID NO: 586521

SEQ ID NO: 1882713 - DNA, 4001 bp, Homo sapiens
gtcaagcccggctagggagtggggggcagagggcaggcagaagcaggatctgaaggtgtcaatagccagagggggctttgtgtgaggggtgggggcgcggttcagaatccgagctgttggcttttgttttcaaatgacctgtttaatcattaccctttgcaatcaacggggagcacaggctccgtggcagaggcttggcgactatttcaaatctccatcccctactgagcagccggagacgaaagtaaacaagatgccaccggcaggtctggctccatctcgcaaacaatagccggactgagcacccggctcagacacacacatcaaagtgagatttccaagcaagaacttttcacaggcagataacaggctggaattatttccctgtgtccctagagctcagtgccaaagggggcagcctaagggggctgtcattttcacgctaaccttgacccgaaaagtattcattcattttgcagtgagggagagccaccaccgccccaaaccgcgaaaaaccaaccagtaacaactttatcattcctttttaacagtcacaatggtgggcaaatgagacttaagttacagcagctagctggcactcacactcccctcggctcaggctccttaaacaacaacaacaaaaccctaatgcaagcacccaccggggctcacaatgtcaaacccttacctggcatagggaaaatccaagtgagagagacagagagagagagagagagagagagagagagagagagagagagacagacagagagagagagagagagagagagtgtgtgtgtgtgtgtgtgtgtgtgtgtatgtgtgtgtgtgtgtgattccctcttttaccttccaaggccttcaactatttttccccctgcagcatccaagcccagcctcaaggcagatgcataaacatgcctgctcctccccttctacggttgggcaaaacacccccccaccccctttccaggaccccaaggagaaagaatcacgtcctctgcagcccctccctggccctcgcccaccccccgtttcccccccgcaattccaggccgtccgcagcaagcctcgtaggcaccttgagataaacacccactaatgattttatgattttctgctctgggtaaccgcgctcagcggaatccctccccccgccgtggcgacggggccggcccaaccgagggatggggggatgggggcgtttgttttttccacggcctcgtccccacacctgtttttcattcattcattcgttcgttccttcatccattcacggatccgtcactgcagccgccccagccccccggatttcggggagggggctgcgatgggggagggggtgggagatggggggacgacagaggtggggggtggcgcaccggggggtggaaggttgcgaggggtccgggagccaggaccctgcggctccggctttgtcagacgcgagcgaagcggcggcgggggcggggcgggggcgctcccggggcccgaagttgttttccgaggcgcggcggcgaggacagcggcccggggtgcgccccctttgtctgtccccggccggcgccgcgtccccgcgcgcttacctggtcttggaggacaggaaggcaagtttgatcaggccgtaggtgaacagcgggatactctccttggcgacgctggcaacttgcagccggtgctccaggatgtggagttccatcgtccgcccgcgccccgtccgcggcggctcatccgcggggggacgagccgcggcccccgccccctccgcgccctgccggcaccgacagccggcccggagacccgggagctcggcgccgggcgcggggggcggcggcggccgggccgggccggacaaaagggaggaggcccgccaagttgcaagggggagccgcggggcgagggaggcagcgccggcagagcagcagccgaggggccgagcggcggagcagcggcgcgcggcgcccggcgcggggggagcagctggtgttcgctgtaacaaacaacttgccactcaaacgccggtccccgctgcgcatgcgcggcccgcgcgcggcctgccgggacttgtagtccgcctgggggggctcccccggtgctgctgctgctgctgctgttgctgctgttgctgccgcgggggctgggcggccggagctaccggcagcccggtgcacgggaaatgcaggagcgcgggcaccctcaggactaaggggaaggccgaggggaggcacggggcgggtggagccagcctgagcctaggcgcgccctctggcacccagtcaggctcggtactaggtgcttggagtgtaaagcgagcaaaccagacgactccggtgctggagaaggcccgagtctgggagcgccaagatgtagggcaatcggtcatgagagtgcggagaagccaaaccgaaaagcttgctggggacccggagggaggggattgacaggtcaaagggggtgacccgggggaggggacactcaggctgggttttgaaggatgaatgggagttcctagcaagagagtgagggcgcgcggatggaggacagaggccttccaagctgcaggaacagcgtgtcctagggcacagaagcgtgaaagcccccacggtgctgtgtttggctttgttgcagcggaaaatgtgagggaggagagaaaagagataaggcaggcatagtcaccaggagtcaggtcgggagggtcatgtgtgcagagctaatgaggtggccatttatcccactggagagggggtgatggggactgcgaagggtgaattcggggaaaatgtaaagtgcgtctgaggcacttccaaccccagggcccacgcgcccggaccacagaggttcctccttcatggctgtctggttttgaaatgttctgggttaaagtgattggtgcttccacctttggcagagtaatctggggacgcgatgggtgagatctatctgccagggcaggctgagaactctttttcaggggaaaattgcagttgtgctccctcaccttccctcagccctcctctgttaggtaggaacatactaggttttgtcatttccacaaaagggtgaaaagcctgtaatctgtggtagatagatcttagagcatgcatatccccctcccactttattttcttttactctttttcttttatttatttattttttagagacagggtcttgctctgttggccaggatggagtgcaggggcgcaatcatagctcactacagcctcgaactcctgggcttaaaagatcctcccaccccagcttccccagcagttgggactacagttatgcctggctaatttttttttttttttaactttcttttttcccccccgagatggagtcttgctctgtcgcccaggctagagtgccatggcgcgatcttggcttactgcaacctcctcccccttggttcagcgattctcgtgccttggcctcccagctagctgggattacaggtgctggccaccacggctggctaatatttgtatttttcgcaatgttgcctaggctggtcttgaactcctgacctcaggtgatccacccacttcggcctcccaaactgctgggattacaggcataagccaccatgcctggccttttttttttttttttttttttttgagtcggaatcttgctccatcacccaggctgaagtgcagtggcacgatctcggctcactgcaacctccccctccgaggttcacgccattctcctgcctcagcctctcgagtagctgggactacaggtgcccgccaccacacccggctaatttttttgtatttttaatagagacagggtttcactgtgttagccaggatggtctcgatctcctgacctcatgatccgcccgcctcggcctcccaaattgctgggattacaggcgtgagccaccacacccggcctttttttttactttttgtagagaggggtgtctcactatgttgttcaggctagtctcgaactcccagcctcaagtgatcctccagcctcagcatttt

SEQ ID NO: 1882714 - DNA, 4001 bp, Homo sapiens
caaggctaggaaaaacaaggctgttctgttacctccaagctttggaacgtcaagcccggctagggagtggggggcagagggcaggcagaagcaggatctgaaggtgtcaacagccagagggggctttgtgtgaggggtgggggcgcggttcagaatccgagctgttggcttttgttttcaaatgacctgtttaatcattaccctttgcaatcaacggggagcacaggctccgtggcagaggcttggcgactatttcaaatctccatcccctactgagcagccggagaagaaagtaaacaagatgccaccggcaggtctggctccatctcgcaaacaatagccggactgagcacccggctcagacacacacatcaaagtgagatttccaagcaagaacttttcacaggcagataacaggctggaattatttccctgtgtccctagagctcagtgccaaagggggcagcctaagggggctgtcattttcacgctaaccttgacccgaaaagtattcattcattttgcagtgagggagagccaccaccgccccaaaccgcgaaaaaccaaccagtaacaactttatcattcctttttaacagtcacaatggtgggcaaatgagacttaagttacagcagctagctggcactcacactcccctcggctcaggctccttaaacaacaacaacaaaaccctaatgcaagcacccaccggggctcacaatgtcaaacccttacctggcatagggaaaatccaagtgagagagagagagagagagagagagagagagagagagagagtgtgtgtgtgtgtgtgtgtgtgtgtgtgtgtgtgtgattccctcttttaccttccaaggccttcaactatttttccccctgcagcatccaagcccagcctcaaggcagatgcataaacatgcctgctcctccccttctacggttgggcaaaacacccccccaccccctttccaggaccccaaggagaaagaatcacgtcctctgcagcccctccctggccctcgcccaccccccgtttcccccccgcaattccaggccgtccgcagcaagcctcgtaggcaccttgagataaacacccactaatgattttatgattttctgctctgggtaaccgcgctcagcggaatccctccccccgccgtggcgacggggccggcccaaccgagggatggggggatgggggcgtttgttttttccacggcctcgtccccacacctgtttttcattcattcattcgttcgttccttcatccattcacggatccgtcactgcagccgccccagccccccggatttcggggagggggctgcgatgggggagggggtgggagatgggggggacgacagaggtggggggtggcgcaccggggggtggaaggttgcgaggggtccgggagccaggaccctgcggctccggctttgtcagacgcgagcgaagcggcggcgggggcggggcgggggcgctcccggggcccgaagttgttttccgaggcgcggcggcgaggacagcggcccggggtgcgccccctttgtctgtccccggccggcgccgcgtccccgcgcgcttacctggtcttggaggacaggaaggcaagtttgatcaggccgtaggtgaacagcgggatactctccttggcgacgctggcaacttgcagccggtgctccaggatgtggagttccatcgtccgcccgcgccccgtccgcggcggctcatccgcggggggacgagccgcggcccccgccccctccgcgccctgccggcaccgacagccggcccggagacccgggagctcggcgccgggcgcggggggcggcggcggccgggccgggccggacaaaagggaggaggcccgccaagttgcaagggggagccgcggggcgagggaggcagcgccggcggagcagcagccgaggggccgagcggcggagcagcggcgcgcggcgcccggcgcggggagcagctggtgttcgctgtaacaaacaacttgccactcaaacgccggtccccgctgcgcatgcgcggcccgcgcgcggcctgccgggacttgtagtccgcctgggggggctcccccggtgctgctgctgctgttgctgctgttgctgccgcgggggctgggcggccggagctaccggcagcccggtgcacgggaaatgcaggagcgcgggcaccctcaggactaaggggaaggccgaggggaggcacggggcgggtggagccagcctgagcctaggcgcgccctctggcacccagtcaggctcggtactaggtgcttggagtgtaaagcgagcaaaccagacgactccggtgctggagaaggcccgagtctgggagcgccaagatgtagggcaatcggtcatgagagtgcggagaagccaaaccgaaaagcttgctggggacccggagggaggggattgacaggtcaaagggggtgacccgggggaggggacactcaggctgggttttgaaggatgaatgggagttcgtagcaagagagtgagggcgcgcggatggaggacagaggccttccaagctgcaggaacagcgtgtcctagggcacagaagcgtgaaagcccccacggtgctgtgtttggctttgttgcagcggaaaatgtgagggaggagagaaaagagataaggcaggcatagtcaccaggagtcaggtcgggagggtcatgtgtgcagagctaatgaggtggccatttatcccactggagagggggtgatggggactgcgaagggtgaattcggggaaaatgtaaagtgcgtctgaggcacttccaaccccagggcccacgcgcccggaccacagaggttcctccttcatggctgtctggttttgaaatgttctgggttaaagtgattggtgcttccacctttggcagagtaatctggggacgcgatgggtgagatctatctgccagggcaggctgagaactctctttcaggggaaaattgcagttgtgctccctcaccttccctcagccctcctctgttaggtaggaacatactaggttttgtcatttccacaaaagggtgaaaagcctgtaatctgtggtagatagatcttagagcatgcatatccccctcccactttattttcttttactctttttcttttatttatttattttttagagacagggtcttgctctgttggccaggatggagtgcaggggcgcaatcatagctcactacagcctcgaactcctgggcttaaaagatcctcccaccccagcttccccagcagttgggactacagttatgcctggctaatttttttttttttttaactttcttttttcccccccgagatggagtcttgctctgtcgcccaggctagagtgccatggcgcgatcttggcttactgcaacctcctcccccttggttcagcgattctcgtgccttggcctcccagctagctgggattacaggtgctggccaccacggctggctaatatttgtatttttcgcaatgttgcctaggctggtcttgaactcctgacctcaggtgatccacccacttcggcctcccaaactgctgggattacaggcataagccaccatgcctggcctttttttttttttttttttttttgagtcggaatcttgctccatcacccaggctgaagtgcagtggcacgatctcggctcactgcaacctccccctccgaggttcacgccattctcctgcctcagcctctcgagtagctgggactacaggtgcccgccaccacacccggctaatttttttgtatttttaatagagacagggtttcactgtgttagccaggatggtctcgatctcctgacctcatgatccgcccgcctcggcctcccaaattgctgggattacaggcgtgagccaccacacccggcctttttttttactttttgtagagaggggtgtctcactatgttgttcaggctagtctcgaactcccagcctcaagtgatcctccagcctcagcattttttttttaa

SEQ ID NO: 1882715 - DNA, 4001 bp, Homo sapiens
cagtggctcatgcctgtaatcccagcactttgggaggccgagtcgggtggatcatctgaggtcaggagttcaagaccagcctggtcaacaaagtgaaacctggtctctagtaaaaacacaaaaattagctgggtgtggtagtgggcacctgtaatcccagctactggggaggctgaggttggagaattgcttgaacccaggaggcagaggttgcagtgagccatgatcacgccactgcactccagcctggatgacagagcaagaatctgtctcgaaaacaaacaacaaaaaagtggatagcagcatctacctggaagaattgttgtgggatcaacagtgcagagaatctagcaagtataaaagaaaaaaaagtatcaggaccctctataaatttatcatgccaagagggaagttacaccctgaccgagtcacatagcatgtttgtaacttctgcttcttaaattataatttattccttccttattattttcattctgcaaatgactatgagagaccagagactagtcgtcctctccttacaatcacttatctttgttacagattaactgcctcctttattgttctgtacctaactcacaccagatggcacaaaagaccccatgacttacatcttcagtgtagaaggtaaaatacacctttcccggaaaaaagaccacctcgtctgggtgcagtcgctcatgcctgtaatcccagtactttgggaggccgaagtgagaggactgcttatgcccaggaatttgagactggcctgggcaatgtggtgaaaccctgtctctacaaaaaatacaaaaattagtcaggtgtgttggtgcacgcctgtagtcccagctcctagggatgcccaggtgggaggatcgcttgagccagggaggctgaggctgtaatgagttgcgattgcactactgcactccagcctgggtgacagagtgaaagaaagaccacctggaccaatcagattgttttaactatgtattaagccttaaacggagagatgctgaaattctgctaagcttccctaaactttgtctatgcaagtgatcccaaacttctaagccttggaacactgtcttccactcttgggtatctgtgcttcccaggtggccctccttaaactctgcatgaataaactccctttagattctgaccctgttgattatttgaggttgacacactgtgcaatatacatcagaataccaattttttttttttttagacggagtctctctctctgtcgcccaggctggagtgcagtggcgcgatctcgcctcactgcaacctccgcctcccgggttcaagcaattctctgcctctgcctcagtctcccaagtagctggtattacaggtgcccgctaccacgccaggctaatttttgtatttttggtagagacggggtttcaccatgctagccaggatggtcttgaattcctgacctcgtgatccacccgcctcggcctcccaaagtgctggattacaggcgtgaaccactgcgcccggcccgatcgcttatatttttaaaaagatgttttctgcgtttcctagccccttgtacccccgctacaaagttccaaaggctttaatgttgttgcaacggccatcagctgtcaagatggggggttcagctccctaaagcggggcagcctcagagggagccgagcctgcccaggatgagcggcgccgggcggcgggggacgctgcggggtccccggtccctggctggaggaggtgttggggggcgcacgtacccagcctcaggtgaggcgagtgtgcggcaacggctgcagccggagctagccggcttgcagtggccattaaggagcttctgcccgaccttctgtttgtgcccgccaggcgacaaccgcttggtgtgcagcgcctgctcgctcagcgtcaggcccttgctgcgccctacgctgcaggctgggaagtcgcgccggtagtagtagcacaggcagtgggaaagctcctccttgtagcttactggtgttggccgccgggtcggagcctgcgaacactgaccggccggctgtggccacgcgtctgcgcatgcgcgcttctggacgacccggcagccgctcctcgagttccgattggttccacatgaggggcgtggctctctgtcgtcactggggagcgccttcgctgacgtcacaggcgcgggccctcggcgacgcaatagcgccaggccttccgcgtcgtcagagtgacggtacagtgcctggagctgggctgttttgtcttcagagtggtgcctggtaaccgcgacttccccgccatgttctgtgtgttgctggctggagaagggtggttgacaaactctgacccagcacggtgtttctgtgggtcaaaactagaaaactatatccgggcgccgaggtgaaaggatcccttcaggccaggagttaaagagcagcctaggcaacgtggcgcgaccccatctctgtagtcccacctcagcttcccagatacttgaaccccaaagttcaaggctgcagtgagctatgatcccatcacagcactccagcctgcgagactgaggtaaaccctgtctaaaaaagtaaaaaaactatccaagtgtgcaacagggagggactgcttaaagaaaacagaattgtatgttcaaatacttttaacaagtgcaaaatgtataggctgaaataaatagagctggccgagcgcgtttgctcacgcctgtaatgccaacattttcggtgccctaggcaggccatcacttgaagtcaggaactcgaggccagcctggccaacatggtgaaaccccatgtctactaaaaatataaaaattaggccgggcaccttgcatcgtttcagggggctgacacctccctaagggcccggtaattgaatccctcggatttgagagtgagaaaccttggctcagttcttcccagggggatcagcccaggggtaagcgaggagaggccagaaagcaggacccatgagaaggaccccctcctggagtttgaggcccattccttcctgcccctgcgtctcctctttccaggactcctccctgctctgccgcactcctggggccatggccatggggggctgcatttgggtacaggccccagcggcaaccctgggcccaaaatgggcgggctcacctggaggggatcagagtaacatggcaagaagcaggaaaagccgcgctggaaccgcacctctctgccccctgatgtcagtgggtgcactcttccctcacctcactcaggcagcggcatgagttccatgggagcactgtcctgctccctctgctgcctctttttagtcttggggctaccataacactttcccttccccagccctgccaacctggtggcacattgggcttccctcttacacggtcctggggacaggcccgtcttgtatcatacctgcagcgagaccctttttttctccagggcctggggagcagccaggcttcctgagccaaatacagatctgaaccataccaagctgggattggggtacacactctcctcctctgaaaactagctaggggttcgaacttggtgagagggagagtgtgacagagccagaccagacaaggactgatcacctggaaaaacctgccatcaaagaccttgacgagtgctgggtgcggtggctcacgcctgtaatcccagcactttgggaggctgagagaggtggatcacttgaggccaggagttcaagtccagcctgggcaacatggcaaaaccattatctctactaaaaaaattagctaggtatgctacgctcctataatccctgctattcgggaggctgaggcaggagaatcgtttgaactggagaggtagaggttgaagtgagccaagatcgtggcactgtactccagcctgggagacagagtgaaactgtgtctcaaaaaaaagaaaaaagaaaatggctttggcagaggggctggcctggcagtgccttaccttgggtttctcctgggtaggcctctgccatgaggaggc

SEQ ID NO: 1882716 - DNA, 4001 bp, Homo sapiens; identical to SEQ ID NO: 586531

SEQ ID NO: 1882717 - DNA, 4001 bp, Homo sapiens
gccatgcccacccacccaccctgcctgctcctggctgcactgaccacgatatcataggagtgggcactgccaatcctcagcaccactcttgcacgcaggtcctgggtccatttctccggcagggtcacctcccattcgtacaacatccagctaacaaaatgccgcaggcgccagtcctggccaatgtcgttgaagctgaagggaaccagcacgtccagggtggggcctgactgcggagagaggggccaggctcagctcctaggtccccaaaaagatctggggccagtgtgctgcacagctgtgcccccccgcaggcctagcgcaagtcctgacatacagcaggaacccttggtggaacgtacagataacttgctgcaacaggtcaactgccagggcggtttgtgcacctgggccagtggggccaggagttcctcctcgggagtggatggggcccaatatctcccgagacagatgacctactgcctgtcacagggaggaaggctggttggggggatgggggagctttgcttaggacactctgagtggggtgcacgctagcacacagccctctcctcttcctcctgtactgaatgcctcaaagtcagaaaaagagaatgtagaataggcaaacgcagcccagacctcacctggtcccatttctctactgaccacatccaagtcagaaggggaacaggggtggcgtccttggcctgatgtcatgtcctgtcctctatctgaaccttgaaaaccaagggaccttcctgcctcggcagagctgacctcagaacgtctaaactgtcccctcctcccaatccccaggcccggctctgtgcagcacatgccactctggctagatgagtgtgtgggtaatcaaaagcctgtaatcagcactttgggaggtcaacgtgggaggatggcttgaggccaggaatttgagaccagcctgggcaatgcagtgagaccctgtatcttaaaaaaaaaaaaaagttttttcagtgttttttttaaacggagtctcactctgtcacccaggctggagtgcagtggtgttatctcggctcattgcaacctccgcctcctgggttcaagcgattttcttgcctcagtcttccaagtagctgggattacaggcatgaaccaaccacacctggctaatttttatatttttagtagaggcagtgtttcaccatgttggccaggctggtctcgaactcctggcctcaggtgatttgcccgcctgcgcctcccaaagtgctgggattacaggagtgagccacctagcctgtccaaggtttttttctgattagccaggcgtggtggccccagctaacttgcaaggctggggcaggagaatcacttgagctcaatggattgcaccactcagctccagcctgggtaacagggccaaacccagtctcaaaaaaatttataaattaaaaataaacattaaaaaggacactgcccaggctcacccttcacctcaggagggggctctgcaggagcacttcctcctcttcccacctcctctgccttggtcttcccggtttccccgggtccccatccactagtcccgctccaagcccattgacctttaacctcctttgggcccccagctccgggatgcccaggggaaggagcctgcagggggctggggctcctctctcccactgccgggcttccgggtgcctccaggccctgccccgagtcctcacctcctgcagtggccgcgggtaccacttctccttaaagccctggcgtcggttgtccaaatcggcagggaagctccagaggccacccagctccttgggctcccgcgacggactctccttggggtacagcatcccgccttgcagtgccagcacacagcaacagcggcccaaacgccgtgcaggccacacctgtccactaggtcacgctttccactccactgcttggccaccgtctgcagggctaagagcagtgcaggaggaggctgcggacaggtcgcatcaggtacctgagacgatccgcgccatctttgctgagggcgagtgccaggcctagaggggcgggatgggcctggcgctgcccagtggggcctgtggctggaaccccgggctaggcctttggggaagcgggaccctcactctcagccccagccaagaagggcaaggtcggttccccaccccagcacagtctggacgatccagggctgcaggccaggaaagaacccctgagatcggtgggatccccctgtttcttcaaggagcaccttctcttgctttccacagcaggaatttgagcaggccacagcagagcctcttccatgcctgttggatgcaatagagtgagattccaccttgggaggccaaggtgggcagattgcttgagtccaggagttcaagaccatggcaaaaccctgtctctactaaatatacaaaaatactaaataccaaaatacaaaaattaagactaggcatagtggctcacacctgtaatctcagcactttgggaggccaacgtgggaggatctcttgaggaaaggaatttgagaccaacctgggaaacacagtgagacccccatctctacaaaaaatataattaaggctgggcgtggtgggtcatgcctataatcctagcactttgggaggccaaggcaggcagatcacaagggcaggagttcgagaccagcctggtcaatatggtgaaatcccgtctgtactaaaaatacaaaaaaattagctgggtgtggtggcatgcgcctgtaatcccagctgctcaggaggctgagagaggagaaccacttgaatccaggaggcagacgctgcagtgagccgagatcacgccactgcactctagcctgggccacagagggacactgtctccaaaaaaaaaaaaataataagagaaaaaagaagaaatgagcagcctggtaggaagatggggcagccctgaaaggctcggtgaatgtaccagtctgaagctaacactccgcagatctgggatgctgccctccaagatgtggtacacgctgacagctttcttttccctcttcctcctcctcctcatttaaaggcaggagccagcgtgcctggctgtttattcctcttcctccttctcctttacaggcgtgagccatcaagcctggcttcctcctcctcctcctccacaggtgtgagccacctcctctggttctttgttgtcctcctcctcatttaaaggcgggagccactgcctggctattactttctcctcctcatcctcctttacagatgtgagccaccacgcctggctgtttcttcctcctcctcctctacagacctgagccacctcgccgggatgtttcctcctccttcccctcctttacagccatcggccacaactggctgttttttcctcctcctcctcctcttctacagacttgagccatcgcacctggctatttcctcctcctcctccactttcacaggcgtgagccaccacgactgttttctcctcctcctcttttacacacgtgagctgctgtttcctcctcctccttctcctcctttacaggcgtgagccatcacacctggctgtttccttttccttcctctcttcctcttcctcctttacaggcgtgaggcacatgactctgttttttcctcctttgcaggcgtgagccaccatgcctggctgtttcctcctcctccttctcctcctttaacaggcatgagccatgatgcctggctgtttccccctcctcctcctttacaggcgtgagcctccatgcctggctgtttcctcctcctccccctttaacagggatgagccacggcacctggcagtttcctcctcctcttcctttacaggcgtgagccaccacacctggctatttcctcctcctcctcctcttttacaggggtgagccaccaagcctagctgtttcctcatcctcctccttctcttttacaggcgtgagccaccacacctggctgtttcttcctcctccataagcatgagccacctcgcctggctgtttc

SEQ ID NO: 1882718 - DNA, 4001 bp, Homo sapiens
gctggtgctcccaaggaagccgcctccaggaggactgccttgcctttccccttctccagtcggaggattcccaggagccgaaactggggcaggggtggctgcccaaccccagaaagtgggcctttcctgcccgtgctccctcttaaccatgcttgggatggatcaaagtcacaaatactattctgaaaggaaatgtttggggagaatgtttcattgttactgagggagtccagagtcagcatgggttttttctcttgagaggacaggtttgggggaacttcggtacgtggagaacagaatacagaagactgaaagggtgactaacatatttgaaatgtaccttccttgaaaaaaaaaaaaccttccttgttctaacgggaggaaaggctgaagaggagtggaaaccccaaacccacatacattcattcactataaatttcatctgattccaacattgtacacatggttggagtaaaatttatacagcattgcttataatttatacagcaaagcttcctggacaagctctcgatttctcctacccaagactgcatcaattcttggtctccgtttggctttttctctctacaagcccagggttgacgtgaaacctaatagtaaacaacaatttaacgacctcagcagcctcagggaagtagggtgatgaggaacaggacccctggcctgggatgaggctcagatttgcatgtgtctctctagggaaggacttgaaggttctcataagcaactacacagccagttggaaaggggaggaggtgtcgttggggtaaagtgtcccgtccaccatcagccatttgtccaccgcccctcccacctgccagcccccacacccactctagacgtgcagcagaatgaggaaggttataaaaggaagctctctctctcttctaacattcccctccagaaaaagaggaacgcaacgaagggagttcagctactatgttggagctgtggaccggccctgtgaggcccacgcgggagcgcggaggctcctgggtctcagggcgccggcagatggcctgcagcgcaccgcccggcccccgcgctggccacgtccgccagcgtcatctctctcccccgcctcctacccctaaaaatccggcggtcgagtagctccgcatcccggagggctcccggtgcaaaactgagtgggaaagagaaaggggcggagagcgacgagagagggaaggtggggaagaagagcccggccgcccccggccttttccggcgagctctgagtttccagggctcatccgcccctccaagtcgaattacagaaactcctcattgccatgctaatgacgagaggggctgtggggagagggtttcgaagaccctcctggaagaagggaagtttcttttcttgccctcgtctccttcacgcccacccgagttcctcccagccagccctctgcgctcttccccctccattccgagcttgaagagccggtggcccagcctcgccctccaccacggttctatgcgctcctcacagccccacggtctcccagcccagcctcagaacagaggaggtggcctgggaacccggggcgcggtgtcagccggattccccgccttccggctgggcgcgctgcgggctgggccggcgtacttgcggccacccggcgagctctggcccactgattcccgccccgagagagccgggagccctcttcccttctcacctctcgccagttcatctttcattgaacggtggggagggggcgggagcgggggacgcctcccagcccccacctcccggaggcctggcggggcgggcagcggagtcgggcgcgcgcagaacgcagcttttgctcttcttcgctccagcactccaaatcggcctttgcagtcgccgcagcagctgccgccgcctaggctgcctgggggggcgactgcgcgtcacctagacggcggagcgccggggatttaaatgccactaaaacggtgatccatcactgcggaagccggcaaacttttgcaggaggctcagccattggctgacaccgtcacgtgcccctcctccagcgtcctccgccctcccgccccccctcttgcgcactgtacattcatatcatttttcttctccggccccatggaggaagtgagaaagttggcacagtcacgccgggcttcgcaggaccaggtcactcagtgacagatggacaatgcaagaatgaactccttcctggaataccccatacttagcagtggcgactcggggacctgctcagcccgagcctacccctcggaccataggattacaactttccagtcgtgcgcggtcagcgccaacagttgcggcggcgacgaccgcttcctagtgggcaggggggtgcagatcggttcgccccaccaccaccaccaccaccaccatcgccacccccagccggctacctaccagacttccgggaacctgggggtgtcctactcccactcaagttgtggtccaagctatggctcacagaacttcagtgcgccttacagcccctacgcgttaaatcaggaagcagacgtaagtggtgggtacccccagtgcgctcccgctgtttactctggaaatctctcatctcccatggtccagcatcaccaccaccaccagggttatgctgggggcgcggtgggctcgcctcaatacattcaccactcatatggacaggagcaccagagcctggccctggctacgtataataactccttgtcccctctccacgccagccaccaagaagcctgtcgctcccccgcatcggagacatcttctccagcgcagacttttgactggatgaaagtcaaaagaaaccctcccaaaacaggtcagtcctgctggttggtggatgctccttgattattctggaaggagctggtatgcttaatttccaaggaaattaataatgatcttttttttaaaaggcttttgtatcagactagtgttgtagtgcatggagagggtgcccagaggtgttggggcaaagaagtctcagggattggtgtgttttcaaggattttatacatttgggaaataggaagtatgtgggggtggttattgtgacggtagtgttctgttaatatcttgaggctccattaatcaccggtctgaccatgctaatggtttacatcaggttaacactttacacctcatcactcaccctccacagcccgatttgtgctgagttcttgatcttttctttacctgagtgttgccatgaagcgtgtggggaatctcaagtcgatttaaaaatttttacatttccgtctcatggcttcccactttgccccagggaaagttggagagtacggctacctgggtcaacccaacgcggtgcgcaccaacttcactaccaagcagctcacggaactggagaaggagttccacttcaacaagtacctgacgcgcgcccgcagggtggagatcgctgcatccctgcagctcaacgagacccaagtgaagatctggttccagaaccgccgaatgaagcaaaagaaacgtgagaaggagggtctcttgcccatctctccggccaccccgccaggaaacgacgagaaggccgaggaatcctcagagaagtccagctcttcgccctgcgttccttccccggggtcttctacctcagacactctgactacctcccactgaggcggctccagccccagacaacagcccaggcatctccttgggctgggacttcttacccaaagcacatgcttagcttatctttctttccatttacagtctctttcttcctttctaatcctatctggggagctcctggccaggataatatatttgcagataattctggaccagagacttggtgcggggttaacaccttcatccagattgggtgccagcatacattttctggtgggccttaacatccctcctgcttttaggagaattcacagaacctactgttcctttcagatgaccttttggaaaatagttccctttgccaacagaaacatgccagaaggaatcttct

SEQ ID NO: 1882719 - DNA, 4001 bp, Homo sapiens
agtgggggctccccaagctgtgttttcgtttttccgggtctggccggaaaaccgaagaggctcaaagccctggctgagcagggcggaggcagagaagagtcggtaaacaccgccccaaaaaccccacgaaggcaccaaaaaattctgggcagccgaacagagtcagaggcgagaattttaaaaagagagagaaaattaagagtgaggggatgtgggcaatgggccttttgctgctgcctgtgtctctacgctcgcatggcagttctcatgctggctggactgcaactttcaacttgaccttggcctccagccgtgtctgaccagtatgtaaaaccgccttcaagtccccaggaacaggggcctagaaccctactctgtctctttgtcactgtgagttttacaatgccacttggagggaggaaggggggtggtgaaacggccagaaagtaacagaaaaatcaagtccctacagaggctagttcctgagtctgcaaatggccagtcagggagaaggtaaactgggggcaaatcaatatttacccagaactgctaaaaagtcaagaaggaaagggcacacttggtgggggggtggctggtgtgggggtcatagaaggttttattgggcgacacttacattggtcaggacaaatccaggatcaggacagataaaagcccaagcccagccacattggtctggatcctgcaggaagcccaggggccttagacagcagatggtggggtgtgtgtgaggggtggtatgcgtgctgctctgagtttagggctgagtgtgcaagctaggagcagaggacaggtccaagcctggcttctcaccagtccgcctggggtggaaaagaatccagcactctccccagcactattccggtaatgtgcccactttcactttgaacgcttgttcctcttctaggcatctgaccagctcacagtagtgaatcaggaagtggaagtatgtggctctaaagcagcaggacccccagaacccctcgacaaaacatggcagctacaagacgggtcgctgcttggttcttcagcaccaacaccctaccatgctcccaagaaaaggttgcatttcccaggcacagaggaaaggcttcttggactggttcttgggcaaagaaggactaggcaccctctgcaggctggagatcctacttgaggggaaggcaggaagtggccccaaagagcccctttttcttgtcccaaaatagagtgaaatagcgggttcccagattcctggagagtcaggtccggtccacaaagaagcgtggctttagggcccagaaggggggtttaagtcccagccagaagcacagctggggcttgttcctcttaagccccttccagaactaagccagccatactggcgaggtgggagcatggatgaatggtgcacagggatcgctcgctctatctcaaagtctctggaggaggaagcgttgttaccaggtcagagcaaggatcaggctgtatacctaagtgtgcgaatgtgagtgtgtcagtgtacactgtgtgtgtgtgtgatgagtcgttctgagtctatgggtctaaatgcaaacatatgaaattgctcactaacagtgtggacagggaagggataggggctcctaaatgcagtccaagcctccagtggaatgtcctgggacccaggcatatccgcaggaaccgataagcagcaaacaccctgccactgtttccctggaaagagcaaaatcgcaactccatcgaagccgaaggcgccgatgtccgtcctgtggtctcactgcagaaatacgcgccggttcctggaaagaaaacagtcccagaggctccaagaaacacccattctgagctaggctggtcccgtcctccccactctcccatccctgaccgccggcagaattacctgacctgtccccactgctccagatcgcaacccaatcgcgcgcccacctcccctccccgcctggttgcgcgggtctgggccccactgggataaaggaagggaaggggggcggagatggggccgccttccttccctgccccacccgcacgttcctccgcctctcccccgggtgaatggtgcgcggccgcgcggctggcgctggggacggcgcgggccgcggcggggacgacgggtgcaccgtgcagagctggagtcggagccgcccgctttgcatacgccgtgggcggagcgggggggccgggccaatgggcggccgcctggcgcgaccccgcggggcgcgatccgcccccctcgctcgggccccggccccgcgccgcgcgctcttcacttcttgggggctttttaaaacagcgccactggggtcttctccatgcggctcgggctatgacagcctccgtgctcctccacccccgctggatcgagcccaccgtcatgtttctctacgacaacggcggcggcctggtggccgacgagctcaacaagaacatggaaggggcggcggcggctgcagcagcggctgcagcggcggcggctgccggggccgggggcgggggcttcccccacccggcggctgcggcggcagggggcaacttctcggtggcggcggcggccgcggctgcggcggcggccgcggccaaccagtgccgcaacctgatggcgcacccggcgcccttggcgccaggagccgcgtccgcctacagcagcgcccccggggaggcgcccccgtcggctgccgccgctgctgccgcggctgccgctgcagccgccgccgccgccgccgcgtcgtcctcgggaggtcccggcccggcgggcccggcgggcgcagaggccgccaagcaatgcagcccctgctcggcagcggcgcagagctcgtcggggcccgcggcgctgccctatggctacttcggcagcggctactacccgtgcgcccgcatgggcccgcaccccaacgccatcaagtcgtgcgcgcagcccgcctcggccgccgccgccgccgccttcgcggacaagtacatggataccgccggcccagctgccgaggagttcagctcccgcgctaaggagttcgccttctaccaccagggctacgcagccgggccttaccaccaccatcagcccatgcctggctacctggatatgccagtggtgccgggcctcgggggccccggcgagtcgcgccacgaacccttgggtcttcccatggaaagctaccagccctgggcgctgcccaacggctggaacggccaaatgtactgccccaaagagcaggcgcagcctccccacctctggaagtccactctgcccggtaaatgacgacctattcccagccctggtcttccggctctgctccagcttcttctccgctcgcacccgggcgatcccgggtgcgtttctgttctcttcctggtctgccctagcggctctgcacccctgggagcccgagcatggctggctgggtctgcctgcactgcctcgagttgagctggtccctggctctccctgggtgaggggtggcttgtggagacctcggctagcttccctctccctctgcgccccgccctccccagcccctgacaccaatttaaggatgagaaattgaccagaaaacagctccccaaattgcccctccctattcattctctcaaaaatggcttcagtgtagaagcttcgagtattgggacgggcacccagaaaggaggcaggcacagaagtgttgtaccttgagcctggcgctaaggtgtgggccgttggaccaggctatcactcgaggctgcctacgcgctgctcctgcaggatggccgggttggggaagtcactggagccctgggtgatttcatttcagttcagaactaactaccttccccactgaccctctaggctttagcagaagacaggattgtacagcgggtggcaaagagcagccgggcgctgcaaggcgggtggctcagatcgagctgtcgcctatgccctggctggggtccgatccctgtgtaacttgccttctcccttgtcttctagacgtggtctcccatccctcgga

SEQ ID NO: 1882720 - DNA, 4001 bp, Homo sapiens
gcttctcatatccatgcatttatgcatagttagaaaatttttccacaagcaatgatgttcttttcccattcatctttaagaatgtcaacattttcagggatatttgatgtgtctgttttgaatctatcaggtgcaatctattactaaacaacatacttttaaagttttctaaatccaaccattaagatggcccttcccctgttagggaagtgttggggccttttcacacaccctttgaattgcaatattcttagatttgttcataataaacagcctctggccttagaactggaggcggctctggcattgtagggagggctcccgctgcagagagcagctcactgggtgggcgctcatttcttgccttgttgctttgctccgtcatagtttgggagccagccttcaacaaagactagtaactatgataggcaaaatttacgcaacaaacaggcagtgcctactttctctgggattcaccccactcaccacgcactgtatatttgggaaaagaaaaagatgtgggaaactaatggaaaaatagtagaaaaaattaaatataggagaaagagggaatttgaatcgatccttcaaaatgtaatggaattttttcatttaaaatgtgtttgatgacaaccccaatggagtgattgctccgtcaaaatttatcctcggttccagctttttaaaaaagtattagtatttaccaatacatttttgcatatttgcaaaatatcttctacaaaagatctaattttcatatgtaagaaattgctgcgaaattgcagctgggtttataacagcgtactccaagtatgcaacacagagacttgtctggcactctcaaaaatcacatgcgacttctccgaattggcctttttcggaacaaaggttttctccaagctgccgggcagacatagagatgcacctagtaggaaaccagtgacctccaggacttctgcccctgggaataagctcgccttagcggccgcagacttctaccaccccattgtttagaatggaaactttgttttcctcaacccgcgatcacctttttttttttttttgccctcccacaaccccctatcgcagcacagctggaacactttcgcctagatgcctctcatccctagcccattctattctgtgtatttctacaaaatcgaaagattcgccttgagtgaaatgctggcgcaaggagctaaaatcctcaacttttctacttaggcctccccctgctttccaaccttagggagcaatggggtgggggctccctaccgcgtcaccccacaaacccagccacgttcccgagagccctgcttagacatcggccacctccccactcccgccccaccagactgaaattgctaaacttgtggcctcttaccttgacacatttccgaaatcactgccaagggacagctggcttctccgcgcggcgacgctcgcgaggcctagcgaatgcgcgttgctttaaattaccataccaatcacttcttgagggtgagtcccctttttctgttatgaaggggagcgggacaagtgaaataatgtaccgtgctgctcttagtatcagaagcgaacaaaggccaagaatcatgctggggttcccggctccccggcggctttgacattgatcggaagtgcgccatctcgtggcggctgcgcgcctaggttgggccggagttccagccccgagccgagagacggaaaccagctccgggcagagagagaaggagagaggagaggatgtgcccagcccgctgctattgagatctcatttttacatctaagaaatcgctgcaaaaccccagccgggtttatagcggcgcattccaaatatgcaaattggccggccccggacgggtttacgaccacattgtcacagccatcggaggatgggcttttatagggctcagaaatcaaacccgcgcccgcccgccgcccgcccgcgagcagtcctcctggctagactctctctagcaacttgagagactttggttaatctttaaccatcccaaaggaagtctttccctaaacccaggcttcccagcccgccccctccctgccccccaggagggcccttgttcatgtctgcgtgtctgcctatcaacctagacattcatctctagatctgtcccactaccctttcagctcgatttccccagtcgcgccagttagacaaacacacaaacaaataaacagagtggggtctggggcctctctccaaatgcgaccctatctgctgctctggccctgcctgggtggctgaagagagggtggggtgggcaacaaagggctctgtcctttcagcccttctcctcaaggttatgggtgatgtccaattttaaggcagaagttcaaaggcagcaaacaaagaggaaatcggcatcctttttttttcccccaaagggaaaaagcagcctcagctgggagctggggagaaagcacccttagaggctcctgggagtctgctctgccttggaacccagaccaggctccctcttgttgaagcctccacgggcccccggacggtcccactgcaggcctacctgtcctgaggtgagcgagggcagcctggggtctgacctgttggccacctcaggccccaaggccctctccagggctgagatcagtctgaggggataaagtcctatattccaggccctgagataccacccaggtccccacttcccacaaggacgtagccaaccaccttggtttcctaagcctggcttctgttgtagccaattcctgactcagtcaccttctcaccccctcaggggcctgataacttgctcctcaactaggtaaggcattttttgggggggtggggggaggggggcagacatttggtagtaaaaggcgatcagggagaggaatgtcacaccaggatactcaaatttccaccgtctttattttccttgtgcccagttgcctgtataagtgctgcaacacacacggtgggtaagaaccagaattgaggacaggccaacactcccagtacaaatggagccaacagacatttcttaacacagggaggcaaaggagattcaatgggagggtgcctggctttcccagatgagatccccaggccggccaggccgactgcctctgagcatttccctaactctttccaaatgttgcaagagattaaaaagaccattctcaataccttttccaccccctccaacaccctaaaggaaatcaactaatggcaaaagaaaaaagaaaaagagaaagaaagaaaagaaaattgattatggttcctttatttacaagttttttgaacaccatccctgtatgaagcatacattcaaatattcttagcagtgagcgagtttaaccacggaacactgtaaacagatagggcctttaaatattttcatcatctcttttcccctctacattgcatcttttaaaattcgctttggttccttcagggaaatatatatatatataatataatatttatcttttaaaataattccacctcactctcaggctcttggaaggtcaccagaagcttccaagctcagttcaagagccaatgagggctgagtgtggtgctggaacccggtgttttgggggactcaaggccctcatagccaaagctggggacctgctggccaggcccactgctctgcagccagacactgagcaaatccaagtttcattacgtgtggtggagagtttgccaaactgccacactccacagccatttcctgcagagatctcaggggccagtggcctggctgcagcctcttggcttttccacatctcccacctcagggaacagtccactctgtgtcgaggctttgggcctgagtggcaggctggaaccaagaccctcatttggtagaaagaaaagccaggtgggctgtaggaggcggtggctaggaactcagggctggatcagtgtggtgggtggctaggaggagtggaaagacactgatgccacctggaatcatagatttcttttcccacaaggatttgcagccctc

SEQ ID NO: 1882721 - DNA, 4001 bp, Homo sapiens
gagaagggagacattgtttggatttcctttatactgtgaagttacatgcataaaagggtcaaacctgtagatgcagaaaaagaaaaaaactataaatacaaatctgtataaatgtctattattatgaagaattgccaatcttgttttaagcaaatgcattctatcgttattataaatgttagttctagctctatttacttctaatcttaaatcagaataaattaatattgtattgctgctgtgcgtggaaaaagacgatgtttatgttcttatagaataaaagctgtggaatgaagctttttaattttacctcttttttgacttcttatcttcaccttccactttatcccgttcaccacttttacaacaggaggactaacccgagcccctgcaattactttaggcatctatttaaatattacctagacggtcgtaatttgtctgggccctatagccctggtgccgtaaggtttgtcggcttttgttcagttttatggcttgctagtatatctggattgtggctgtcttggaccagtgatttcagttgagaggggagctacatagacagaggaagccaaacaggatttctttcgggagccccagggaggcttgcagaggccggttattttgcgggtgtctgggtcacagatgaccctcaatctgaatcggggagcaggcctggcccacagcgcatctctagccgctggaggcagcggttaggtggacccgggctggactgcatgggggcctccccctcccccagtacggcctcccccacctggcggcactccttagggccacgcgtttcctgcttgccagagtggggggggcgggggctaaggggagggggcgcaggagcgcgcgccccggcgggcgggcagctaggagggagagggggagagcgagaggcgggaggccggggccagacagggagccgggatctgtaccgtccctggcgctttcgagccttccacggctaccgcctcttggcgccggctcgctgggctgcaagatttgggaaagcggcgcgcacactgcttctcggagctgctctcgtctcgcctgctccccgcctttattcctctctccctgcctttcctccctctcttttcctccctctccctcccaggaataccttactggggcctgtggcttccccttccttgacgcatttgcggccgcctggggcactctgttgcactggcgggcgcaggttgcctaggggctgggctgggccgggccaggcgcgatggcagggttctctccttggcggcggcggcagcggcggaggcggcggcggcggcgggcgaggcagcccttcgcgggcagcaccagaactggtcggtgatttaggtagtttcctgttgttgggatccacctttctctcgacagcacgacactgccttcattacttcagttgaaatcgtctccaggtacctctgcgcgcgggggtcgggccgggcggggcatcacggccctggtcgtgccaggcctgcggtggcaacctcggctttccctgctcaggagcctcgtgtctttctccgcagcgctttgccagccggccggctttccccttccaccacacacctccacctggtcacagcaggtagggttaggttggctgctccttcgcggacgccgggggcgtggtaggaattctgggctttgggccattcaaggtcaggggcgcccgcttccatcctgagcctcccactggaggcctgcgcctgcccagggacctcctgccattctcttgtaaggctggaacacacacacacacacacacacacacacacacacacacaccagtcccgggtgtgagctcaggaaagaacctccttccagtggagactcaggctggactaggaaggatagggcaggctgggatcctggccttgtcacttacccttctctctgtaagctcggccgctgctaggagtcgcctctcttttcttccttcttttccctgtcttcccttcctcttttatctcttctttctttttttcttctttcctttgctccttcctgctttcttttcttccgttggtctttttttcatcttccgtctctgccagattctatctcacctccttatctccttcccaaagcatccttggggaggggcccagagctggcttcaggagagcctagggggtctcactttcctctgcggctcaagtagaggttgggaagtctgccgaggaagggcccgcgtggggcggctgccgagggcggtgggtttgggcctggtgtgttactctgcagacaaggcctcggttatgatcacgaccggatggcggcagccttgcgtttcttcgcctgtcgctaacggctgactaggagatctgattaggggacattcgctgcagctttgtgtgcccatatcgagggcagggaggccttcgccagcctcactggggactggagctgaggcccaaccagcctcgctggagcctggccattcgctgggaagctcttagctggctcttcccggcctgccggtcacagcttggggtttgaccgcattgagggagactggctagggcaaagcttgactgcttgcttactagtggcttccattaggtacaaaatatgttccatacagcacctttgtgcagctgggtgctggagaaggggacccttccaagagccagtatgttttaaatgggcaaaaagaatcccaaattccagagccattgatataaacttgagtcatcgttccaaattgtagtctacagatgggagccagtctgaccattttccctacagaaaacagaaaacaaactatctctccctactcccaacacacacagttacagattcgtgcccacaaagctgtttcctttccctgcctggactggaggcccaggaactctttcgttgcacagccaccgacctgctgtctgaaaggaccacacaccccattcccttcaactcctccctgccattttctggaccagggcattggatttatttcagagatcacagtttcagaaatctcagtcgagaaggggccgctttaaattatactcatttattatttctttatgcatacgcaatctctttcacttcgaaaataaaagcagacaaaaaagtcagactattctggctccaaacctttgggctgaaggaagacaatatttggttttctgatttttctccgctttctaggcaccagtaacatctgcttaacactcaacgcctgctaattgttcagtaactctcttattttggggctaaggctgtttaaaggaacagcttttttacttaaaaaatactgaaataatcagtgtcttctcaggcataaaacgtggaaaaggcatccagacatgcccagcccatttgcagacacttaaaattgggagccagggtttcctccagggttaattttttaaatgaaaatctcagaggcctggcggactgcggggtatttaggacacggtggactgtggtgggggtgggcatgacctagaggaatttatggggcaaggaaaatattagggggagggagatgaggcggacaggacggggccatttcggagttcattgtgtcggccacttccctcttccaggcgcgggtgcaggaaggggcacccagtcggtatccgcgcggcttggcagcctcgctggtatttgggagtcccagccggaagtgtgtcagggtgtttgagggggggattactggaactgctggtgaggatgaaggcaaaagagagagagagagatggaagcgcccgaggccgccagcctcgccgccagggaagtgggctaatgaaaaacacactgttgcaggcacagtatccacacgtgaatttgattacccctgttctaggagtcgctgctttctgttaggaattgggggcagggggagtttccttccaattaacggagtggcggcgaccttttaatttacccccaacgggtgagaaataaacttccccaacgtggccaggcccaggaatgggactggagtcgatgcccttttacccctccccgttcta

SEQ ID NO: 1882722 - DNA, 4001 bp, Homo sapiens; identical to SEQ ID NO: 1882720

SEQ ID NO: 1882723 - DNA, 4001 bp, Homo sapiens
ccttccttcccactggaccttctcactcacagcactgctgccctctggacaagccacagtggacaaatatgtcaagctgaagatgcacaaataatttcaagttcagttctcagggattcaaaggacatgaaaattcttgtagcaaatcttgaataaagagttcattaaaccaatgtgtccaagtagcttgatttgtgataagcaatccttgtaaaggtggtggtggggggaggtggagagccacataaacattaatgctaataaattagtttactcgactacagagtaattacttcatattattgatatttacagcaggtattcaaatgcaatggtaggccattatttggagaaaatacataataagaatatttcttttccagtgcaatacacgattagatttgttattgagtcagttacagtcagctcagcaataaataaataaatcgatgttgacacttaaataccaaagatcttagagtttatactctaaatctccccaagatatgtaaataactttggctatttcctggagagggaaaaacaaaaggttatctttttacatatttttttattttccttcagcaacatcccagatccttccaagaagagagttgttgggaggcctcaggtctgggcccttctcagctcctggctctgcctggctgctctgtgctctgtgtcctctcctttctttcgcttcctccaaacattgctccttcaatcctgcaggatggggagcatattttgccttcttaatttattttttttcctcttctcaagaaagctagactcagagtattgctatggcctctctctatccttagcacaaacctagctttttaaagacatccctgtttccccaggtgcagggagttcgggaagcacctctcctttctctggtattgtattcctcctgtggaatgagcagtaggaaaggcacagagctctctgagtttttgccctgcacatcccttgctttcactctcacacattgcaaggaaggagagtaggagagtaggtgggttacccctttctcagccacctctccttggccctcagcccgtcctttccacctccattctccccacacccctggagctctgtaagcagcctgatgggccccccacgaagatgcagcatacccaggagaagtctcctcggatgtcagcgcctctaaagcagcccaaggcttgcctcaattgcatggtttcccgagtcctcagctccagaagaccaggcagatgggtggaccggtgagcagcagggcagcccctgtgcctctgtctctgccgagtcactccgaagcccggcaggcagcgaggaggagggagtttctccaaggacagaaggtgggatgaagaggtaggcagggaagatgaggggagaggtggatcccgggtaagacgaaggcccttccgggccctgcggatcagtgacaaaccgcggggagaagccgttctggctgttggcggtttagggacggaaggcactaaagcgcttcggaagtgaccatgaatgagagagtgtaatcaagtcaccgtgcaaatcggacaagccaccaggcaggcacatccacggcttcaaactctggccccgaaggggttccggctagggtcggaggcagaggcgcttcccagagcaagtctatgggagggggactgcgaagaagggggtgcaaatgcgagactccaggagaacagactccgagaccacaggccacacagcgacggactcccacctggctatccccagtccagggcatccctcacccacccggggagctgcgggtgggaggtggggacgagagttgagctctcaccgccctctgcacactcgagaacgaggaccctgcaattgagcacaagcatgctgcatgggggcgcaccccagcctctccgcgcgcgccgggaggccccccagccaacatgagttacaccggcgattacgtgctttcggtgagaacaccgagtgacgatctgttgcttcccctgaggtggctacaaagaaaggaagccgggagggaggggagaggaggaaaaaaaaaaaaggaaagggggggggaaaaggcccggactagctagcagcttgtcaatttcaacatcgggtcacatgaccagcacctccctgctaaggatggggatagatttccacgtcagcttacgtctccaaatttctacttcacggatccgcttcaaagaggcagctgcagtggagaatcatgttaagctcggctactgcggagagcccaaggtagcccaataatggattttgatgagcgtggtccctgctcctctaacatgtatttgccaagttgtacttactacgtctcgggtccagatttctccagcctcccttcttttctgccccagaccccgtcttcgcgcccaatgacatactcctactcctccaacctgccccaggtccaacccgtgcgcgaagtgaccttcagagagtacgccattgagcccgccactaaatggcacccccgcggcaatctggcccactgctactccgcggaggagctcgtgcacagagactgcctgcaggcgcccagcgcggccggcgtgcctggcgacgtgctggccaagagctcggccaacgtctaccaccaccccacccccgcagtctcgtccaatttctatagcaccgtgggcaggaacggcgtcctgccacaggctttcgaccagtttttcgagacagcctacggcaccccggaaaacctcgcctcctccgactaccccggggacaagagcgccgagaaggggcccccggcggccacggcgacctccgcggcggcggcggcggctgcaacgggcgcgccggcaacttcaagttcggacagcggcggcggcggcggctgccgggagacggcggcggcagcagaggagaaagagcggcggcggcgccccgagagcagcagcagccccgagtcgtcttccggccacactgaggacaaggccggcggctccagtacgtataaaggcagcgccctgcgctttatgaaaggggagttggaaatctagcgcagcaccgctgttaaatttttatatgctgttttataagcatataaggtttatgaagggcctttaggtttcccccaacaaaactttgttataaaaggcgggatcacgtggcgagtgctgaaattggccgtgaaatacccaccggccaaggcatgcctgcaaaaaaaaacaactccccttttcccttttttcccttctcagctcccaagcccagcagctcgaccccgctcggggccagctccaggctggggagccggaggtgggcgcctgtaaattccccctgcaagggcttcgggagcttttgatagcgaggtaatccggagatttttataaaagccatgtgttgcgccgggactccagtcccggccgggattcaaaggcgtcgctgtttaacgacggcgctaggagcgcgtttaacagataaagtagcccgcttagctctagcaatatattaaaagaacaaattaacccaaagttggcctttttgtccaaaggaagccattttcctctggcgtggtggcaattacgtgcctccttctgcccaactgcatgttattcacaattgttattcaatctgtcaaaagcgattttttttttgtcttgtgggtcttttttttttttttttttttttttttaaagggggagcaagtagagcctgcccgcagcttcgggaagccccctttcccttcaccctacctaagatagagccgctgctctgccgtgtgcaggatggccgtgtggccgtggtgctcagcgaaggcctagggtagggggcttccgccgccacctccccacctcggcggagccggaaggctggccggggaggcagaagctggtggccaggactcaggctgacaaagacccggcagccgccccagatgttaaggactgcccagtcttggccgcagccgggaaagactgggactggagccgcctttactgccttgggaaggggcagcccaggtgctggaaggt

SEQ ID NO: 1882724 - DNA, 4001 bp, Homo sapiens
tggggacacagaaagcaagtttgaacaagagaaagggggcgcagcgcgcagcgtggatcctgggtccttttcctttggtttgtgggggctacgggtcgaactgtggcagagcgcagctaccggtgtgcggccacttgttccacgtgctagggggctccgaagccaggggtcaggggactcctcagctatttgatatcccctcttagcgctatctacagaattgcgtgaaggcagacagacagcggagggctggtttggggcaggctggggtaagaggttacctgggtctgagtgaaggggtagtcggggcagggataggtctgtagacgcaaagggcccgcagagtcccagcggagcgcagaacttctccaagccagggtccggcgagcggacgattctttcctctttccccatcatctcccactcccagaaagctgactgccggctcggtgaccatttgctggttagagggcaagagagggttgcaaatactgtgagggacgagatttgagcagaatcaaggcatcagatcggcttgtggccgttgcgcaaggccaggcaggagcagggcccctgagcaggtattgtaccagccggcgtccctctcagtttccagcagccttagctggcctgctctgagggactaggtgctgcggtagccccgccagcccactaggacctaaaaggaacgcacccagagttgaataaaccagaacacaaatcctcccaagactgcctctggccagtggaatgaacccgggtctgatttcgcgcctacagaaatgaacacatattagtgaggtttcaggagagtccgtgattgaatgctcccagacaaggcttccttttgttaggaaaggaaaataaagcaagcattcacattctccaagttgtggtgcctgaggagagagctctctgaaagcagcccacaccaccagcaaagccacttccaccttctcagcttcctctgtttgcttcatgtcctttccttccccactcccccgccaaaaaaaagaaagaaaaaggagaaagtatgggtgtggagatggagtatgtatttattttacaaaaataaatcaccatcttcggaccatttgtagactggaacatttcgagcaatgagtgcgccacacggacgagtgccctggtgactccctgatgttcgcgtcacccccagggccaccttggcgcccgcatgagcctcgcttcccactcccggcctccaactcccttccctcgcagccgccattcaccttctgctgtttatttgtctgcagagcgcctggacaccggaaaaggcgattccctgagcgcctggagttggagacaattcctggttcagaatttaaacatctttctaggtaagcgctgctccaaaactcttcgccgcgtgggactttgcaccagggcggttgggaggagttggccctccacggttcctggcaaccgcggcctgttgaaagaggttctggtcaatatttaacttcggaggagtttggagttggattcctttaagcttcttgccctgcgagtgcggggcctcaggcagacaaagagcctaccccaaaaccagcgatgggcaggagaagcggttgcagaaggcaaagatgggttgtggagagtcagagggagtgtgtttgtttcttcctgcaagccccaaacaaaccactacactgaacttcagggcaaaagcaagtaaaggccacgggcacgggcgcggcggccgctgcgtgggctgctctctttgtcgactaaggcgactgcggaggctgtgagttaagaaattgtcgccagtcccagctcgctgttgaggaaaacttgtatcacactcttgcagtttcttagaccattttgcctttccttcggcatgagaaaaattgctgtatttctaacctttaggccttcgcagacagcgggtcttcttccttctttcatcagggctcatcatcggttcttcctacgggaaaagcgtggttttctatgtcttggcgtttccttttcctatttgaaacaagggaaaactcttttaaattattttcaagttctgacttaatttgtcctcttagtttgggatgcagggaggtaattactgtggtttattaccttgtaaaagatccataaattacatgcctgtttgggggaggggctgctggaatagctttcagaagcatggtatgaaggaatgagtttgctttgttctttcaggaattacttctttttaaaaagttttgagattttgtattctatttcctaggcctccagtcttcccttaaatttgctcccaaatagatatcaggttgttaattaattgcaacatgatattcagtcgtgctataaggctgatatggtgttctggatacaattattttttccaatagaaggtaaacagagcaatagtcaagctgtgttactttctcagctactgtatgtctgtttatatcaaatatagatggaacatttcaggaatttgtaactctgtgtatatgatttccatctcagcaaacaacagaacaattgcatgtataaatagttgcaggaatttggggccttgtgtataacacaatatacacatccacacgtgtccagagaacttggcccatttctctactgcacttgcacccacaggaaatatctcatgttaaataagaatctatcatacacacacacacacacacacacacacacacacacacacacacgcacacagtgggctaagagagccttacctgatgctgagtagaaaatccactagatttaagtaatgggacaaaaatgttaagtgtacttttgacagagaaatcagattgcagtgtttgagtacagatatatctaatctgccaacagccttgcaaatattggctaacggtgtgtacccttggttgcctgctttttccaagccagctttccccctattttggctctggtgaccaggaccacagtatcagtcccagcgcaggccaagttggaggccggtgaagtgagtgaagagggactggcagctgggtttttaaaaggcccgtagctttgctccaggaaactggattgcagagtggcaaaggaggactgtcagctgctggttccccagataggctgcccaggccaagatctctcatagagaagctgttttttaacctcaaaagttaaatgtcttttgacttttcagatttttcccttctcatcccaccaaatcacccatcccaccccaagtcattaatgttaattgttaaacagcagttggagcattaactggatgttagcagccgtttggaggccccaggctggagctgagatgcctctgagctttgctggcgttaaggcatttctctgaagcagtaccaatgacttatttcattgatttatggcttttttttttttttttttttgacagagtcgcgctctgtcccaggctggagtgcagtggtacgatctcagctcactgcaacctctgccttctggtttcaagtgattttcccacctcagcctcccgactagctgggattacaggcatgcaccaccatgcctggctaatttttgtatttttagtacagacggggttgcaccatgttgttcaggctggtctcgaactgctgacctcatgatccacccacctcggcctcccaaagtgctgggattacaggcatgagccaccgcacccggacaatttatggctttaagagttttcatttgctcgactgttccaagagctttgaagggggccccttctcatctttgagttgatgcctcttcagaaacttgggggtagggaggaatttgccagcaatacctccaggtccctttctagggtatctggagagctcagtgtgaatgattggtgaggggtatgaggcaggcagcagtaagaatgagaggagtgagttcttgggggtcaggagaacgctttttggaaaccagcttctactcctgtcctctatcccccaaacctgagagaggcaggttttcacttggagttcttactttccagcttgtaacttagataggag

SEQ ID NO: 1882725 - DNA, 4001 bp, Homo sapiens
cggggcagggcggagggggcaggagaggggccagggaaagccggagtccgccgggacacggccccagcctcagatgggcagattgttcccagggtccaaatcgtattgttttctttctagaaaggaagagagaaggaaattcgggaggggtgtgcgggctggtaggcagaacttgttgagcttttcgcctgggttccctgctcatgacccaagcttgtccccctggcggactttggaagacaggagttggtggctaaaccgctgacttttctattgcagacaacataggcggcccggaaggcaaaagggcccggacggcctacacgcgctaccagaccctggagctggagaaggagttccacttcaaccgttacctgacccgcagaaggaggattgaaatagcacatgctctttgcctctccgagagacaaattaaaatctggttccaaaaccggagaatgaagtggaaaaaagataataagctgaaaagcatgagcatggccgcggcaggaggggccttccgtccctgagtatctgagcgtttaaagtactgagcagtattagcggatcccgcgtagtgtcagtactaaggtgactttctgaaactcccttgtgttccttctgtgaagaagccctgttctcgttgccctaattcatcttttaatcatgagcctgtttattgccattatagcgcctgtataagtagatctgctttctgttcatctctttgtcctgaatggctttgtcttgaaaaaaaatagatgttttaacttatttatatgaagcaagctgtgttacttgaagtaactataacaaaaaaagaaaagagaaaaaaaaacacacaaaaagtcccccttcaatctcgtttagtgccaatgttgtgtgttgcactcaagttgtttaactgtgcatgtgcgtggaagtgttcctgtctcaatagctccaagctgttaaagatatttttattcaaactacctatattccttgtgtaattaatgctgttgtagaggtgacttgatgagacacaacttgttcgacgtgtagtgactagtgactctgtgatgaaaactgtgactccaagcggtgtgtccctgcgtgcctttataggaccctttgcacgaactctggaagtggctcttataagcgcagcttcagtgatgtatgtttttgtgaacaaagttacaaatattgtccaagtctggctgttttaagcaaactgtgatcagcttttttttttttttttttttttttgtatttgtttttaaggaaaaaatactgactggaacaaaaaataaactttctattgtaagttctcttggtctggtttgtgccaaatagtgagcggctctgtctgcttttctgtctgtctgtgcagtcttggaagctgttgggtctgaggctacctgagcagatgacctgtgcagggagacctcataccaacactgtcccatcgcttccctacctctgacccattgcaaagttcagggcagaaggtggaaaaagctgtaggctgttccaaagccccagaacaccctgtccatctctgaggaaaccaagttaacttgctgggtacaaaaaagagagaaagagcaagaaaaaaggagaaaaaacccagggctttgttagccgccctcaggccacacagatcctgcctctttcctaaggctgtcctaggcctccacttgctgaagacgctgctatgtctgtctgtggaccccaaaccctctgcccttaacccatcccagcaccccttccccactcttcacccgggacccagttggcttcttttgctacaattaatttgctacaaattgaaggtacttaccccatcctagctcgattgggaaactcctcagagcagctaaagcgcaactagagatttgcacatttaccgactgcttacactgatgccgtctttccttttaaaagttataaaacagtaaactttataagccccagttccggctatatgacatttgggtgccaaatgaatagggttttgtctatgaattagatcgtaaaatcatccatagcacagacagatcggctcactggctataaaacgtcacgtggggccattaaagtaagttttatggttttggggagttgacatccaacattatataccacataacatataatctcactaacgctggactccatttgactcttttgcaggctacgtgtgccgcctggccattcaaactgtcaattttaggtccagaagtgtccaaaccacaagttctcaaaactctctgaaaaatggctccctccgagttaaggtaagctcgcctcctgagcgctttcaagtttatttgtactttggaaactttctctctctctctctctctctctctctctctggttcaataactcaggctgcctctgaattcgaaaaggcagagcaaactttccctctgcccaaaagagcagcgccaggagccaactctgcggaggcagcagagtgagcagcgcctgtggccgcgccgcatccccaggcctaactttaattgcagcacaaccgcggatgttaatgacttccgctgctcccgccggcgtgcaaaaagatgatttttgtgtgcgaatgggcctgtgtgtggggacctggcagggccgcacccccagtcccccgcgcaattgctgggccggccggggccagctcctgggggtcgcggagccctggggtcggggctgggagacagtggggcgccggccgcgggcgccgagggccgcgctgcgctcaggagtttgaaagaaaggccggggcagggccgaggcggactctggcgggattccttacggggctgtggcaatatgtcttcgcgggccggggtcatttggcagggctgaattgaggcggcggccttcggggccgggtttcaggctagctcgcgagagcgggagggtggcagaggccggcgaggctggggctgcacctccaggctgggcccccgggttgcaaggtggatcctgggctgctagcgcccactggaccctgaggaccaaggatccccaccctggtgtgggggggtgttcaggaccccctcccccgcacccgggaccaggccctgaaccctgtttgcctgcatgttctttttatttcggcgggactgttctcagccgcttgtgagtctgaagcaataaactttatggccggatttaactttagtctttgaatccccaggctaattgaaaggggttaaagcgctttcttttcttccgctttgcctttcttctccctctcttctttcctgttcctctccttctttgtagaattaaaaacatctacgcacaggaccctcagaaggcaacttaggcggccccctggataacattaagattggagaaattcactccccctcaacatacaggcgaattctctgttccaaactgtgctctaaagttttgggggaaattgaggtgtcttcagtgcccaacttaaaagtccccagagccattaggttgtttttcctgacacatcataaacggtagtttagggaagaaattggtcctttgtcagtaggagatttccgcctttcttttgttagttgctctttctgtttgatcccaggaaatttacataatctatgatttccagaacagtctccaaaattgcaccaatgggtgaagtaaggtgaaataagtttatcctgggcacaattccatattggccccagtcaccccttctggccccaaccccccatattcttcaatggcaaaacccaagcccagtgactggggactgtggcctgtcctgggatctttttctggatgggtacccacaagggacccagtagatttcctccaatcctattttaggaattaagccaaattctcctactgcattcagaaatgaaacaaaaaataggatctgcttttctccttaggagctgggcagttttcagcaagtattaattggtaaagatacctattaagtgcttaaagtgaaaaaattgaaagtatagatttggaatttcaataaacttattgtgcagaggcca

SEQ ID NO: 1882726 - DNA, 4001 bp, Homo sapiens
gtcaactatctcgaaggcacacctctcaggcaagagtgagcagctcaggacaggcttttaatgtcctgtctggggaccgccaggcctgggacagcagtgaaagcaattcaggatttctggagccggtgagactattcccggttccggagcgactgaggggcggcagccctccctgcggtcccaggaagggcagtaaagagggcggccccaggacagtgccggttgtcgggcgccccggaaaccgagcccatcaattatcccgcggccttgggccctgcagagctgccctctgtgcccagcttggccagggcctctgcgtcttctgtgcctctggaatgtggacagagagattccacatctggatttttatctgcctcagctctgagcggttctcgcagtggatgctgagtccccaggcgctaggcaggggagcaggtccctcggctgtcttaggagcccagtctcacggccactgctctgtcggtcctttcttgttgaaaccagtggtttctggcctttcaattccctgggttcaaaggtgggatggggacgcccagctggaaggagtgctttgacaccaggcaggcgcgggccattgagccccttgggactcaaacaggatgtgtatgtgggaggagggaatgggtgggaagaacctacgtttggctgagtcctggtcagctcgaggtgatccttcagctctgggctgcaaggcccaggcccctggtgctagcggagaaggagagaatgagggagttcaccgattcctaaggcgcacgagtgaagagcatagagtgaaggcctggtttctcatggcccttgctccagctcaagaactcgcacccacgaataggggagcgctaggggaggggcaactctgggccgtgcctggagtgcaggccggcagggagcaaagccacctttgtcactgcccctcctggagcaggaccttcaggtttcctgtttggaggaggaggggcggggaacccgcaaaattcaataaagcaaaaaggggaggaggaaggaggggacctggcggggcctttgaggcggcccaagcattagtgtccctactctggcctgatctgctcgccactgaaagggccgtgcccgccgctggcgttcgggaagagagccgggccggctagctgtgcgcgcccattaatctgccgggcgggcggcgggcgggcgggctgggggctgtttgtaactttgctgcctcggtcgccgcggtccccggggagcgggctccggcgttcgctcccattggccgccgccgcgtcagctggtgcgatttgctgctgtcgcttttggcgttcggccatccagaaacaaaccagttcgatgactactaatagttatagccagatgtactaatacacaacaaatcacagtcctgcagaggggcgcgcaaatgagttcctattttgtgaatcccactttccccgggagccttcccagcggccaggactccttcttgggccagctgcccctctaccaggctggctatgacgcgctgaggcccttcccggcctcgtacggggcgtcgagtctcccggacaagacgtacacctcaccttgtttctaccaacagtccaactcggtcctggcctgcaaccgggcgtcctacgagtacggggcctcgtgtttctattctgataaggacctcagtggcgcctcgccctcgggcagtggcaagcagaggggccccggggactacctgcacttttctcccgagcagcagtacaaacccgacagcagcagcgggcagggcaaagcactccatgacgaaggcgccgaccggaagtacacgagcccggtttacccttggatgcagcggatgaactcctgcgcgggtaagacatatcccaagacagtggagggagaggggaaaggaggcaggaaaagaaagaaagaaggaggaaacagagtagaaagaggaatagagagaaagaaaggatgaaagaaccagcaaagtttctttggcttcttaaaagagaagaaaaaatcagttcccaatggggctatcaggccatggcagaggaagggcaaggccccagtgtccatgtaagctgacaccttaggggaggatgggggcactggcacgtatatgagacctgtgacagggacagcctgaagagagagagaggctggtggggagggacagcctgtccatgcaccctgagtaccctgctcagcttcccaagccagagggccttttgcactgcgtcactgataaataccctttgcttcccaaccccctctcctttctgcccttcagaaacccgtacagagaggtggccatttggcctcttccagtgtctccccaaagccttggagggccacagccccagactcaggatttttttctctctcctccctcatctcccccggcttctactcaactgcccactcttagccaacttctgccctcttctgagcccatgcctgagcttcatacacctgtcttggagggaccccccaccacccttggggaactttggcaccagatcagacagcccaacacaatcctacattgccagaaatcctagactacctatagctccatctcttagcctctggtttccaaggactccacagggaatcccaaagactcctaggaattccctaggacagagcctaatgcggattgttaaaattataatgttttccattaacatccactttatccttgggggagttctgcatttctcagaagggtcatataatttgggagaatgtgtaaagattcaagagggctgaccatttttaactcttcaaaaaatgtgttgagttccgacatggctggtcacagtagcatcctcagagagaccactatgaattcagagtgtgtacactacttacatggttccacaccacccaccccagacacacacacacacacacacacaaacacacacacacaccctgcatccccacaaaaacacgacctgggcatcccaaattaagaatgctcattctgttattttgcttgtaatggttttcctatgaggcagatttttcaaaaacgataatgtccaccccaagtcgttataggtggaaaacatctcgcttggtatgaaataatctcccattcagtatgctttgggccccagacatagtgggagaggctggagtggaggcggggtggtttctagtctgggtgcctcttgtgggaggcactgggctgactgggtcaaccctccaggccctggcttaccggcgcccggccgtttctgctcgtaggtgctgtgtatgggagccatgggcgccgaggccgccagacctacacgcgctaccagacactggagctggagaaggagttccacttcaaccgctacctgacacggcgccgccgcatcgagatcgccaacgcgctctgcctcaccgagcgccagatcaagatctggttccagaaccgccgcatgaagtggaaaaaggaaaacaagctcatcaattccacgcagcccagcggggaggactcagaggcaaaggcgggcgagtagatgcctgggcagggaccaggccagcgctgcaacctccttcggctttgcccccttgccctcgcctgttccccaacttttctccccgcctgctcccatctgggggcttccgcagcttcaggggagcccggagctttgcaagcgtctgtgcatttatttcttacaaaacaaaacaaaacaaaacaaaacaaaacaaaacaaaacaaaacaaaacctcacacacagccaataccagcggtggagcggggcgcactgcacacacccagtcccgctccacaaggatgcccaaaccggctccggagttctggggtgcgccctgaatgcgtctggggctcctgtgctagtgtctctgagctccccgacctcgggacgcggggctgctggggaggaaagagccctgggccgagccccgtttcgtgtctgggcgtctctgcctaagtccctcgccagtaagtcccgaagggcatcatcaaatcatctctggccagtggaaagagg

SEQ ID NO: 1882727 - DNA, 4001 bp, Homo sapiens
cataaaattgatgcttttttccttctagttagaaggcttttaaacattccaaatattctatggtttgtctcttcatgtcagaactaagatatacctttcccatatttatcaacacgttagcaaaatatttacttaatcttgacaactgttttgattcattgaaaaaatgatttagaagagtacaaactgtgcaaaatgatataaaaataattttaattattcaactgaatgtaaatgtttaaactttactataaagaaaggttttcaaaaaatatctacacatatatacagaataatctcaaaatattgaacaccaatacagatgtgttgagtcagtggcacaaatactaatggttattgacatattttcccaaaatagcaaattattgaaagtgttccaagcaaaaatatatttccccagtacagccaggagttgtatatctggacaattcggtgtataataaatgattcaaaataaaatttactgataactaaaatggacagatagtctgggattaggtaattgtagacagtttttggcctatatgaatattccaggagacatttaattgtcatgtgggatgcatgacaattcataagcaagactttctccagtgtcatgggggcacttagaagccacatccatacccactaaatgcgctggcccctttcagtcactgggacgtgaaagagtcaagtgatttttcaaattttattctagggataatatgaccacttggaggatcaatcatttcataaaaacaaaaatcacagaagtaaaatatttcaatgtaaaaaaaaactagaaagtattaactaagggacttactgttaggtatgttctaggactaatatgatattgagggaaaccagttcacttttctcagctatgcttctactacagataggtggaacatctacaaatatgtaatactaaaaaattcatatccaagctcaaaactaggaaaggttgtccttatatcctaaaaatgaaggtggaacttaaatctagaaaaataatctagaaaaataagctttagcttcctatgcaggaaaactcgcaccaacacatacacagtgacacacagaggcacacacaggcagacacacacagtcatacatacagacacacatgcagacacacccacaagcacacacaaacatacacacaaacacacagacacactggcatgcacaggcacacacagacatacacacaaacacacacacagacacactggcatgcacaggcacacacacacacaggcatacacactgacatacacaggcacacacaggcatacacacacacacacaggcacacaggcatacacacagacacacacaggaatacacaggcacacacaggcatacacacagacacagacacacactcacacaggcatacacacacacacaggtacacacacagacacacacaggcatacacacagacacacatacaggcacagacaggaacacacagacacatacatagcaggacacatgcatacacacgagaatgcttgggcacacacacagtcgttgttatgggtggaaaggaggacaatggatatttattagaaaagaagatttattagaaaagaagatggatggagaagtaggtagtatatttaaattgataatttataatgggaaaatagatgcccaaaattgaagacaattgtataatacaaaatcttgagtagaatcagaaacaagctttatttgttatggacacagtatagtgaattttcttagcatcaaatgccacagaattttcaataccatcagagagaaaataaatattcccaaaatcataagataatatattacatcagactctcattagcaatgagagatgccagtagacagtgtattttatgtgttgaaattggtggaggagaataatgataaaactaaaattctatatccatatgaatcagattcatgacaaaaggtgaaataaaggtactttagagagaggctgaatttactttacacagatcattaatttggaaaaaatcataagtacaaatattattcaagaaacttgaaatggatctcttcaaattaggaagaaataagatgcaagaagcaaagcaagcatgagaatgattttagatttaaggacaagatcaggagttactaaaagattttaattctttttttttttaagagttgaaagtgttactaaaatccttcttattagccacacagagctgattttcccaagtatataacgagttcttcaaatatatactttcaagtctgatttttttcagggctgtgttcttcagttataatttttgccttttgctccatttctttagtgtgtccttccacatgtacgttaggtcagcacaggtgtcttgtacagctaccactttctatcaaatcttgattgcttgtgttttaatctctattttatttctcttttggcactatccctggtgttaattcactcttgtgttccttctactttattttttaaaaaaatttttatttatttcattagcaacatttacttagttctgtcagctctttttttcaaattccccctttctgtattcctcttacttgtatttgtgactccattgctgctttcagaaaatgtattgctttcataaaattcattgctttcttaatttattttacctcattttgaactattagattacagattgtatctcctctgaggccatgtctttctggtatggtatcattttgtaggactgtcattactctgtttactcttcataccgtttttataaaatctttatggaatctgactgtaatattttctattgtccatgtttcagtgatgtgggtttttctctgttcttagagggagactggaacttgataaccttctagactcatcactctagaactctcaagttctgaactcccacctattgttataattgttttcaaaaatatggctacaaactcagatattcaaactcagctccctctccaccctttgtctgaatcttttctctcttttgcttttcagtgttcctgtccttcttaccgtggattctactcacagaaacttcccctctgtgtggggcttttccttggagggttctttggctgatgaatttagagaagtcctgggactcagactgccccagcactgattgtttctacagcatccttcacgcacctgcaaatgcagcctgcaccattcatggccagttctgttgtcctctgctatccctctctttcactagtagaaatttgtgtgtggatgaatgttatgttctctggtttacaaggacattcgaaattgctttactttccctccccatctttattcacagttgttgaaatgatcctggtgtggtctgaggtttgtgtcaaccctcatgtgttttgagaaaggtagggctacccggtcaccacgtattattgtagatattgtctataggccactggctctgatgtcctgtagatagtgaagatggttttcctaatataatgtgtgtgggggggggcagggggtggatcaggaatgattttaaaactacgctgttgctgctgctgccttgtccatcacctcacctattcattttttactaattttttacggatgttttccttgcctttatttccttaaggattattaaactcatttgtttagggtactttttggggttttgtgtcattatttctagtgtgatttctcctggtttggttttgtttataaatataaatatatgtatatacatacaatgatagataaaattttaacatgtatatgtaacacatgtatgatttatatatatataaaattttgtttaaaaagtttagcttgaagtgtgagtttcatttttttcttttgctcatcccttcatttctgcaggttttgctgttacctctacccaaattctcaagctcctggatgaggttccagatgttatgatggcatcagagagctctcatcagcttgggttggcctggtttccaatttgggggctgtccatctgatttct

SEQ ID NO: 1882728 - DNA, 4001 bp, Homo sapiens
gggagagttaaattacctctttcttttgagtgagatggagctcttataataacttgtatcccaatttttccttctcaggaagcaaatttagtagggaccactggagactacccatctgccttatgactctgaggagataaagcattcttcagccattcctgttggagccaggtgaagcattctagctccaacacctcaaccatctctaggaacagcagcaactgctatctcgcctctcctcctttaaggaaaacaacccttaagggaagcaactgagagctgggtaagaagaaagcaatcacgtgctaaaatcttccggagaacaaaagttagtgaaactatcttagacccctaattcagaactcttgcaggaagagtaaatacttatggaaagctgagaaagcagtgtctagggcctccagtccacccctagagggacgtgtgggggtggctaggggaacgttttgaggaaagttcattggtcaacttgttcaacgtggcaaactcatttcaggcaagagaggcagcaccgtggacagcgccaaccctcctgctcccgggcggggcgaggtggcagcaccgcggacagcaccacatgtggtggcgcacactgggagccgccaggcgcggggagcgcagcagcaccgcggacagccccaaagccgcgcgctctgagccaggaggcggggagagatggccttatcagctgatggcttacgtagggctagatctccacttggataaggcaggtctcggtgggcgcgccagcattcgctctccggagctgcagcctccgaaggggtggcgggggcaacagggacagaaggcaggtcccagaaagcaggttcccccaaaactggcttccctagcacggagttaaggctgcagccggctgcctagagagaagggtgggcagggagacaacgcggtgagagcgactgctctgacgcaccagcccctctcctgcacccacacgctgctggccgcccagcttctccccgatctgggagatgctcggctctgggcggccaaacagcctttccaccaaggcgaggagccctgggctcctgacagcttaggcgggccctggctgcgacacgcagcccctcgcctctgcttccttagcctctgagggcttcagacctgccgcgcttgcagccacaccatctccaacggatgctcactagcaggaaattggggccaaattcacaggcactttccagaaactcccccactggccagaggttgcaaacatccggattggctctgggcacagtggccgccttaagtcctcctgaacaccccttctgcaagtaccccagggcggtctcctgacccagagatggatttacctgtgaacctaacctccttttccctctccaccccctcccctttggagaccaaccacagcctcggcaaagacgacctgcgccccagctcgcccctgctctcggtcttcggagtgcttattctcaccttgctgggctttctggtggcggcgacgttcgcctggaacctgctggtgctggcgaccatcctccgtgtacgcaccttccaccgcgtgccccacaacctggtggcatccatggccgtctcggatgtcctggtggccgcgctggtcatgccgctgagcctggtgcacgagctgtccgggcgccgctggcagctaggtcggaggctgtgccagctttggatcgcgtgcgacgtgctttgctgcacggccagcatctggaacgtgacggccatagccctggaccgctactggtccatcacgcgccacatggaatacacgctccgcacccgcaagtgcgtctccaacgtcatgatcgcgctcacctgggcactctccgctgtcatctctctggccccgctgctttttggctggggagagacgtactctgagggcagcgaggagtgccaggtaagccgcgagccttcctacgccgtgttctccaccgtaggcgccttctacctgccgctctgtgtggtgctcttcgtgtactggaagatctacaaggctgccaagttccgcgtgggctccaggaagaccaatagcgtctcacccatatccgaagctgtggaggtgggtatctcagcaatccttaaaaatactcgacttgcatctgtacaggctatatccccaggccacctgccccacccccacacttgtagaaaatggaactttttgtgtttgggagtggggggagtaaactgggagagtggaagaaagcatcagagatgtactttgctctgacatgttccctctcacagggctaatcatatcatgttccttctctaatgggttgtttgttaaatatacagaacacgaggagttcagactgcgtcattctgcagggtcccctttggcccccaaattctatggatctataacaccctttagaacatctgaataagctggtatctggggtacgctgattcagtacactggaaaaaactagcagcttccagcacttagaatgggggtgttccaggaggaggggaggcagggatgggagcatgatttgataagaagactgccatgagtcaggtgatgcaggttagcatttcatcctagtctattctttttctttgcaaattacagcagccggtttattaaaaatatggtatcacctaggttactgtcattctgtggcatcctcccgtcctgacgtaagactgaagatgttgactgcactagtcccggagcctgcatttgttatctgcttccactgccttagggtgttactttatgggtctatcccccacagccctattaggttgtaggtgtgactgaggaccacttgtctgccttcctgaacatgagtaaagctgcggaaggaaattaaaaatccaggaaagagaattccctagctctctatgagaggtatttactgcatgacaaccactatagcaacagcgagggagcttttctcatcttctcccactcctgtttttttgttaactcttaataatctgaccctacgactcatgattctgcaggctgctcccccttcattaccaaggaagattccttgaatctaattcacacatttaggttagaccagaagtctacacagtccccattttctgttgttggctctgaaacaagaaagtagtttaaggaagcatatggagtgcatactatgggtttggtgcaagaggtaagcgaatgatagagatgttgtctttgcccatgaagagtgtggtctagggagggaaatagacatccaccctgagctctgtatatgctttctagagtcagtagctaactctaaccatccccagtcagtcaaacttagagggaccagaggtgtagctagggaaaaaggggagagggcatcatcctagaggaaagaagaaaacgaggggtcagaggctacctgttcttttacctatatcagcatttctcagcgaagggtaatactgccctccaggaaacatttgggctgtctggagacattttggatgattaagaattgagggccaggtgcggtggctcacgcctgtaatcccagcactttgggaggccgaggcgggcagatcacaaggtcaggagatcgagaccattctggctaacatggtgaaaccccgtctctactaaatatacaaaaaaattagccaggcgtggtggcaggcgcctgtagtcccagctactcgggaggctgaggcaggagaacggagtgaacccgggaggcggagctggcagctagccgagattgcgccactgcactccagcctgggcgacagagtgagactctgtctcaagaaaaaaaaaaaaaagaattgaggatggggtgttaatggcatgtagtatagagaggtcagaaatgctgctaaatattgcacaatgcacaggacagcccctcaacagagaattgttcagaccaaaatgtcaatcgtactgaatttgggtaactctgatctattagatttctaagctgaacaaagagtgctgatgggtaagaacactgaagcttccatcaaactacctgaagtgaggt

SEQ ID NO: 1882729 - DNA, 4001 bp, Homo sapiens; identical to SEQ ID NO: 586563

SEQ ID NO: 1882730 - DNA, 4001 bp, Homo sapiens
ccttctaatataagaagtgcccccatcaaaaagtgttaaagtataagaaagggtttttatttgggtaggagatgggttagtgcccatgagattcttccaaatttttgtcataatgctatgattcttttccttctaaacttattgaatgaatagcccattctgaataatactgagtaatcctgcaaagatgaatatgtcaagtctaattaataattggattttattctgaaatatttaggaagaattgctactgcttttaaatggccttatctcaaacctaagtggtctaagtgagctgtgtattgtccatacaacagctctgcttctgtgttgggtactggcataaagtattgttggctctcaggtatagatggagatttgaggattttcttatctagccacctatccaatgattgaatccttacaagaatgtcctatgtgacaatctagttaaagtttggacacttgccatgtcttcaaacttattatcttctaaacaagctcatctccacatctgtaggcttccagctttgtgttcagtctaaagacaatatctgtctccttatataaaccagttttaatgccttgacaataaccactagattgcattgttgactgttaaagacaaaatcaagagaacctatgtaatttttttagttagcctagctaattaaaacatacaaatgcaatataatgagaaatgtagttggttaataatttaccctaagctctatgttgcacgtttttgatttggaaaattgctgttaccttttcatattaagaagttagttctaaaatttctctctggttaaaattaatctgtctgttacattatttaaatcaagtttaacctctgttctgtaggaaactcctgtgaatgctaagctggtaagaatcattatccaaaagtgttaagtgtacatctaattgtcagtgacatttttcagaattgagttgacatttgaagaaatatacatgtttaataagagaacagcattgtattgctaagggaaaataaatatcctaaaacatttatgtataggctttatatagttattctaccaaatttccattttttttaaatgtgagtgactgtgcttttccttacctgtgacagagcttcagtactatgcaaataaaatggtctggaaaaaataaaaactggcaaaacatagtcatgtctagccatttcagcaaccctcatggcttctctaactcgatagtgaacaaatttcaaagcatttaagcttgacttcagtattttatccaaatgtattgaaggataaagtgctgcgcttttttcccacagccacaatttggacaattacctgtgtacgtctctggatttattctgtaatcataattgtagcagtctggatagagataaaagccccataaacattttggtctcatttctaaagccaatgtgagagtaatgttcatgaaattttttccagcattttcaaattcctctcgggcaactgtttccactttcatttctgaccaataaggatgatggtttctagtgaaggctaaagagtggtttttatatattattctgctgccctgatttctatcccattggggtttccaactttcccagtcaataacaacaagttcttctgatctccaccaagggacaccttctccaatgtcatcagcagttttcctaaggtgttcagaaaggctcacattctgcggtattcctccattaaaggattttccatcttgagataagtaagggtaataccctaattcatttggataaaatatggcaatttttgacccactctgagtctctaaaggatttgatataatgttaaatacttgaagatttatatccacgttgaaggaaggcatacaatacattgttggggctgcccagaaaatgttgaaaggctggctcttgatcaccggaggcattgctggtttgagggctgcctgagttaataggataaagagtggtagcactcctaaccacgccacccatgggttacacatggcttgaggttttcagcattacagcagtctccttgaaaataataagcaaaatatcatacataatggagtcaaatgtctcttaagttttgtggtatacaatgaatagaccaaatattttaaaatatctttgaggcttattaatatctatgccaatttatagtgaaatgtgaaaaaaatatatactcaataaaaactataaaaagtttcacacatttgtcagctatgcaaactctagctgctagccattctggttttaatttcctatgattctgaatacgctaacccaaaccttcttgtactgacaagccttcactggctctaagaggaactagaaaagaagtctgaatggattgtcatatctccttattgattacttacaaagtgactccaagaacatgcccacttgaaaattaacaaatattgggattttaactaatattaaatagaacaaaaagaaataactaactgtactaacagtaagtaatactttacatgcaatttgaaatgcactggcttcaaatgtttatttttaaaacagagagcagttacccttggaactagcataggctgaaataaaaaacaagtagaaatgttaattaccctgtgttgattatggattttggtgctatcatcttcttaggcatataaacaagcctaaaatcctattagttctttaactccagtggttttcctataaagaaactggattgtatattcagcagttaaaccctaaataaaacttgtctctttaggcccctttaactagtctgttgggacgaaaactgccaaagaatcttcccagaatataaggactatctaatagttgatgcattccagccaacaagatctcatcctgaaagcaatatggtttcagttacatatcaaaattatcttatcgtatggatttttttaaataaaggaatttattttaaacagatttttctctgatataattaaactcagtttctttttaagaatcatacattgtttctcatgtagttcttggtgtctttatttaacgtactaaattcaggaaagacaccaaccaaaattgtacgctaactctcacaacatagcaccccaagtttgtaaagaaacttgagttcaagtcgtatgctctctgtacactgaatttttaaattaacaaatgtgaacgataatttactcttttaaataaattggatattattgagacaattgccttcatgtggagtgtgtattatagcaccagatgaatctctaagctatcagagatggtttttctcccatcactcttctctaatcatgggatcttaatttgactcccactcccccacaaaaatataaaggcaaatcttcttcattctttatttgttgttcagggaaaatgaaagaatatctactctccataaatattattctttacctccctctggtcatgactgcacattgcgtatatatatgcctaataaactgacacccttgggaacaaaaaacacctttttaaaatgtcatatcacaataaattttttagagccaaagggcctaaaaatacaaaatattgtactttagtaaaatactgttacaaatttcctcttctaggagattttcattatgttttccatgtatataaatgatacacaatcatctatttttctagctagcctatggaaaaattattttggcattattttggtccctagtctacattttataacagacttctactacagtaacaaaaatatgcattataatggtatgcatttttaaatataatgaattctttctacatgctgctgagattttattttttctagctatttttattattcaaaatataaaactagatctacatttttccacttataaaatatatatactaatacatgcatacatatatacacacatacacttgaatttttgttcaacaaatctgatatgtttcaggcaagtagccaggtctagtgaagcagtggggaaagcaacataattccacacattgtaaaaaggtatagatacca

SEQ ID NO: 1882731 - DNA, 4001 bp, Homo sapiens
ctagaaagaattcaaatgtttgattcagatgaggaaaagctgaaacacagtggtaagaaatatcctcagaccaggcaccgtcccagcattgtgggaggcttaggcaggaagatccctggggacgagggactcgtgaccagcctggccaacatagaccttgtctccacaaaaaatgtaaaaaatagccaggaatggtgtcacatgcctgtagtcctagctacaggaggctgaggagggagagctgcttgagcccaggagttaagaggttgcagtgagctatgatcacaccacaccgcactccagcctgggcgacagagccagactccctctttcccttaacaaaaaaaaaaaaagtatcctcaattcacatagagcaaccagaggccacaataaattacatattttacatcttgataaagaatgaatttcatcaacatggagagcattcaaaataaagaggcacctaaaaaatgtaaaaaattgctgttttaagaatccctccctatggtcaattattaaatgtttaatacatgatcacgagtttttgagcttttttaaatgccagtttccaataacctttaacaacataaccccatatttacttttcttgtgaacaaaggcatatcattctgagtggcagccgtggcagaggggcaactgtgtccaaaaatacctgatggctaatagttccagtgtgataacgtcggagaatactccaatatttaactcctgtttaaatttctaaataaaatattacccaggttatttaatactcgatttgagtttattggggtctctcctagaagggccttccaattccaattggaatcctttttcttaaccatataataagtagaaaaccataagttcagttaagcacctactcatcccacccaggaaaagtttcaacttcgtagcgagggcacaataacctcaacttttagccaactgcaacctaagctcctcaccaccctgcctctctggggctcactgcagagaacatatagaatgcagcacaaaggagaacgcgtttcttccccccgtgagcaggaggtcgcctcgggtggtcgcagaggtgctagaggttcagggcttctgcaggtgccagttaggggaaggagcacagcctaggggggagaaagtggtccccccgcctccgacgccttcgcctggccaggtggacctgcgagacggaaagcttccccagcgcctctgcgtcaccccgggcccaccgcgcaaggcccaggccgcgtgacgcaagagcccgtccaaacccgccggacgtctggcatcccaggagctccatgttggagccagggtgtcaaaggcggccagtgacggcacgggctcaactccccgttcttccccacccgtggtcggggagagatcgggcgagatcgccgccgagaaaggaactctgacaatggttcctttcccgcccagctcccggtcagcccctgtcccgacacactctcaggcccaaggacccgttcctccctgcccccacggccggtgcccaagagtccggttcgcacgccagatctaaatcgcgcgaggagcagcgcccagggcacgctgggaattgtagttcagtagccaaaccacgcaccctggaaatgcaaatgtgtacatcagagaaagaactacaactcccaccgtgccgaagcatggaagactcgccagcctggccggcaactgggatgccggcggcggggataccccttacctgctgtcgccgccgtcgctgcggctgctcctgacccgccgccgccagcactgctaccgcggtggggagtgttccgcttcttgttcttcggcatcgtgggacgcccggtgccgcccagagtcggagcttagcgaggatcagccgatggagctgcactttttactcgtgcgtctgtgcggcgggcggctgagaggcgagtcttcggctaacaacagagtcgagaagcggcgggggtaagagtgggcggtggcggcagcagaaatccccgtgaagagctgtgatcgaaaacgatacatgtttctctctagcgcgggagctaaggcggggcaggggaggccacgacgccttaagtagcaataccgccacctgacgtcactctgtgggcggggcttgagcgcttcccaaccaatccctgcacacctccccactggacgcctccgtcgggcggggcgcggatcctacctacaaatcccatgcggccagtcttccgtccgcgcccagggagcctgtcttcgtggcctcactgaattctgggaaacgtagtaaggctggggccggggcctcctcccagccgtctcttcccaacgggcttttctgcccacttgcttttctcctggtgaccccacccctgcctcggcgcgcccccgccttggaactgggtgaggtaggcaccggcgatgcacagtggggcgagtatgccctatgacgagagtcggcttccagctggcagctatgcaatcacctttgcttctctttctccggaggctggtgttctccttaacctttcccctacttccctgcggcacctgccaggcacgcagccttacctctcctgggtaacatttccatggttttagttttaactagttccatgaactacttaagccatcatcagtactgtacctgtaattggaccgtggttcagggttatgtgccccccatccccccccccccccaaaaaaagggatgctttcgtctacttagttgtggagttcgtgtatatctcagattctagactaggaatatatgacgattcagcgttgtgggtttctatacaagaatgtgtcccttgacaatactacctgccagttctgagaatttcacagctggtaaaacaaacacaagttatacagatcaataatcgcagtgctgccttttttctcaaggcactcctagatctctgtcttccttgttaggacatttgtctagtatttagagcctgttattaggttcatatactatgcttatgacagatcaaagtccctgactcacctcaatgtaggtgagtcatccgccactccacctctcagctgagctctattctattttcaattgcctgtagcaaatttccaccagaatgttccacttgtgcctcaacccaacatctctgaaacgaatactatatttccttcttcctgtcttccctttgttcactgtactatttattatcctcccatatgttaaattccaaaactcaaattcatagtcttttttccctttgatgcaccaccccctccccacccgcaaagcaattagttttaaaatagcactcttaaattcctgtcctattctgtgatcacatgtgacctcagttcatgcctgggcattttaagcgatctcccagtcttttcatccatgtttcatgcacagtaatgctgccagatttatttgtgtgttccctattttactaatccacctgctttaatagttgctcaaaaacattccatggctcccatgactaactttaaatgccaacccttttagcctggccctgactccctttccagcctcatctttcactgcttcctcatacagttcttgttcttcagccaaacaggactgcttttcatttccaatacacggctctcttctcctacctccatttcctcattcatattctttcctgttcttgtaatgcctttcctcccatcttcaccttaagaaattttatccaccgttcaagatgtagctcatgctgccaccttcctgaagcctccagccagaagtttcttcctcctcacaactctttgacactcatcctaataatgccctaatggcacttattacctccccacacggcctactcaaagatgctatttaatgggcaacatttcagggttgcttttactttgtttaatcctgaagcagccagtaaactgcacagagcacagaaaccaaatacggaggcaggttgtgggggaggaagcagctcacactgactccttgtatctagaggcacactgcaactcagtgacagggcctatacagaatgaga

SEQ ID NO: 1882732 - DNA, 4001 bp, Homo sapiens
ttttcttgaaaacacatatttgtcttggcccctcttctgctaaaaaatacttgcacgtgatctcctagctgtagttctgaattcttcgtactcgactggttcctaagtccaaaatgagaagtgccaaagttctcaggaactttggaagaagtctctgaaattttgtgggttaaaccttaagaatttttgctacttgtaggaacctaaaacccctttctcccaaaatatttaacctttttcatcaccactttaatggaagaggcatggatgatggacgtttgtgccagggcatttataaatcaataatggaccctaaggagggaaattaaagctaaaaaattaatcaagataatttatggccaaacctatagttctactgcaggaaagatcctctactgtaggtcaaaggaggaataaccttaagacctcacttgctgctttctgcagaaacccctggaagcagtccaaatgcaaagttagggcttcagagaatgcaccctgtaaatggtagttgtgtatacccttaccattgactataccatatctaggcacagtgaaatcttgatgaagaatggaaaattaaaggaacagacgctttttacagggaggcttcccccagcccccatcccatggtaagtttaaatgtgttctataaacaacgaggctttccacattcacattagagacataactattgcccatatgtaaaagagcaacatattttaagcaggaccctggtgaggaaaacaaaaccaaatcgaaacactgcatgtgtgtgttgcttatttaactgaaaatgttcatagacccacaaatctgagatgctggacttttggatgagtccagcattttgcatcttagtgtagggggagggaacaacaaggggcttagttgcttaacccttgccatgccttcatgattgacttattcaaaacatttttaaaattctgaaagcaaaggaaaatgtgctgcaaacacccttccagctatctttccttccagcttacacagtctctcctctgtccaatccttcccacccagcagcatttcagaggtattccctgtgaggtacaaaatttctctttgcccatttttctgcacctctttttctctctctttggtatgtgtccaccaagctcatagaggtttaagtgatgaaatattatcacccacatgggtttgcgtgggactttcttagtgaattactcaggcagagcaggctgtgatacagccttgctcacaagcctcgggagggaaaaaatagcacagaggatgaaaagaatattattagagagcaggtaatgaaaggttcgcaaagcaaccagctatatctggttagctaggtaatagtgcaggaacctaggtcgcacctgtacaaactaatgcagaacctgctcacggcgcactatgggaagacattcatttcaagagtttacagcatgagatatttgagtaaaacctgaaactgattagaaattgatcctgaacatcccagccttagtcaaccttccctttttcaaattgttatgcatggagattggaggattggggcatcttgaaagtgtcactgcagtatagcaatctctctcaggtaatatagagataaagggaatataataaattgacctgttatttattatctttttcatacctaggacattccgaggcttaatatatttctgaagcctacagccctgataaacatcaatcccacgtcagtttccagcagtctcatctccccacacccttctgcaatgaaagctaatgtaaaagaaagaaatatgcactgcttaataagtcagaatacaatagaacttgtaaaatgtacctgcatataaggtagacattaggaagacttgaatctctctcttccccctgttctcctgagcattatggcaacagcattttcatgaaattagatctgttttatattttttcctgataaaatatcatgcaatatacaaatagcagttccagaaatggacaccaggagaaggaggcgacaggcatgtcaattagtagggggaaaatccaaatgtcagaaatatgggggagagagaaagcacgcaggcagtggatgcaaatacagggaacagagtctttcaattcagataattaaacggatgcataaatcagcacccttgcctctctacaatacgcaggcgatgccatgcagttaattatcagccaagaccagcatgaaagtcattttatgatgactctctgatcctaatataacagcacctgacagattgagccccctctaatgagtactctctttgtacaatcctctctcaggaacactaaatcatttgcttccaagtacagctgcctgtgaagaaggggtggggctagatcatgcatcagaaacctgctcttgtgaaatcaggggctgtcctgtaggctgtgtgactggaagccagcagcctcagcctctctggccctaaaaaagcaatttgcacacggctgtccctaattctagtcagccaagtaaccctccctcggcacccccacctaaacatctgtagtcagccttgggtgttattcatggaaagtccactgcatgcgggtcagcactgctgtccatcggcttcaccctgaccccttctggcaggtgtggatgagagtagagcagagctcatggggatgagttaccccaaacctattaagcctccctatccggggcactagtcagacactccagttttacactctttcctagaaaaacaaaacccaaccttgtgccctctgggttctctaatttagcagctactatctgtctgtttttggagtgacaccctgtgcagtttaggatttcagaagctgtcctgcatagaggcagaagggaaaacagcaggtatcttgttaacattctctatggggcaaggcagatgtgcccaagctggaggaaacctgcacaccctccaggctagttatccaaggcttgggaggtttccctcggccttctcctaaggccttggcaggaccctgccaccctaaaatcaactgctgattgcctttttagatttaaatgattaagctctgcttatgggaatcttcttctcttttattttgttaagaaacaaacaacaacaacaaaacccacaccaattcttagcaaaggggaatatcgaattcagattttgaaaaaataagtcatcatgcttcctaaaataagacagcttctccctctaactgctctctctgctctggtattctatctaatcataaacccagctttattattcatttcaactcctgccaaagacatgaggtcggagtcagaggaactccccttaccaccgccaccatcatcatggccagcatcctcgtaagtttatagaaagatgccagagaacctttcctatccatctgcagccctgcttggcccttgcctcagtgaatttaccactatcataatcacagtgtgcagagtgtgttaaattaagaacagaatccacagtacgcaatgcacagaaaagcctgccttctgctgcagagaacttgaaactgtgcctaaaatttatagtaccgtaaacatctcagggcctcgagtgataagtatggctggatttccgttaactatagaaatccaggcagggagatcctcccagggagttgcaagttctaagatgaacttcttgaagattgttcccagatttgtgcatgggatacatgtacagcagacagttgtaaggaggtccacggtcatggaaaagaggatatgtttctatatgccaccaagtgggaaaaatggaagtgagggaaaatatttgattaatcaaaaaattttagtttggatacctgctttcatagtaattgttgctgtgtcattaaacatacagttgcttaggaaaagagaaggaaataggtgactttctaattttagagttaggctggaactgagtggttgctaaattcaactgccctgacaatgtggggatttcctgtccattagcagcgattgctatttgacatatgtttctggtgcccattaatct

SEQ ID NO: 1882733 - DNA, 4001 bp, Homo sapiens
ttaaagaactgcagtaataccttcccaggcacttttcttgaaaacacatatttgtcttggcccctcttctgctaaaaaatacttgcacgtgatctcctagctgtagttctgaattcttcgtactcgactggttcctaagtccaaaatgagaagtgccaaagttctcaggaactttggaagaagtctctgaaattttgtgggttaaaccttaagaatttttgctacttgtaggaacctaaaacccctttctcccaaaatatttaacctttttcatcaccactttaatggaagaggcatggatgatggacgtttgtgccagggcatttataaatcaataatggaccctaaggagggaaattaaagctaaaaaattaatcaagataatttatggccaaacctatagttctactgcaggaaagatcctctactgtaggtcaaaggaggaataaccttaagacctcacttgctgctttctgcagaaacccctggaagcagtccaaatgcaaagttagggcttcagagaatgcaccctgtaaatggtagttgtgtatacccttaccattgactataccatatctaggcacagtgaaatcttgatgaagaatggaaaattaaaggaacagacgctttttacagggaggcttcccccagcccccatcccatggtaagtttaaatgtgttctataaacaacgaggctttccacattcacattagagacataactattgcccatatgtaaaagagcaacatattttaagcaggaccctggtgaggaaaacaaaaccaaatcgaaacactgcatgtgtgtgttgcttatttaactgaaaatgttcatagacccacaaatctgagatgctggacttttggatgagtccagcattttgcatcttagtgtagggggagggaacaacaaggggcttagttgcttaacccttgccatgccttcatgattgacttattcaaaacatttttaaaattctgaaagcaaaggaaaatgtgctgcaaacacccttccagctatctttccttccagcttacacagtctctcctctgtccaatccttcccacccagcagcatttcagaggtattccctgtgaggtacaaaatttctctttgcccatttttctgcacctctttttctctctctttggtatgtgtccaccaagctcatagaggtttaagtgatgaaatattatcacccacatgggtttgcgtgggactttcttagtgaattactcaggcagagcaggctgtgatacagccttgctcacaagcctcgggagggaaaaaatagcacagaggatgaaaagaatattattagagagcaggtaatgaaaggttcgcaaagcaaccagctatatctggttagctaggtaatagtgcaggaacctaggtcgcacctgtacaaactaatgcagaacctgctcacggcgcactatgggaagacattcatttcaagagtttacagcatgagatatttgagtaaaacctgaaactgattagaaattgatcctgaacatcccagccttagtcaaccttccctttttcaaattgttatgcatggagattggaggattggggcatcttgaaagtgtcactgcagtatagcaatctctctcaggtaatatagagataaagggaatataataaattgacctgttatttattatctttttcatacctaggacattccgaggcttaatatatttctgaagcctacagccctgataaacatcaatcccacgtcagtttccagcagtctcatctccccacacccttctgcaatgaaagctaatgtaaaagaaagaaatatgcactgcttaataagtcagaatacaatagaacttgtaaaatgtacctgcatataaggtagacattaggaagacttgaatctctctcttccccctgttctcctgagcattatggcaacagcattttcatgaaattagatctgttttatattttttcctgataaaatatcatgcaatatacaaatagcagttccagaaatggacaccaggagaaggaggcgacaggcatgtcaattagtagggggaaaatccaaatgtcagaaatatgggggagagagaaagcacgcaggcagtggatgcaaatacagggaacagagtctttcaattcagataattaaacggatgcataaatcagcacccttgcctctctacaatacgcaggcgatgccatgcagttaattatcagccaagaccagcatgaaagtcattttatgatgactctctgatcctaatataacagcacctgacagattgagccccctctaatgagtactctctttgtacaatcctctctcaggaacactaaatcatttgcttccaagtacagctgcctgtgaagaaggggtggggctagatcatgcatcagaaacctgctcttgtgaaatcaggggctgtcctgtaggctgtgtgactggaagccagcagcctcagcctctctggccctaaaaaagcaatttgcacacggctgtccctaattctagtcagccaagtaaccctccctcggcacccccacctaaacatctgtagtcagccttgggtgttattcatggaaagtccactgcatgcgggtcagcactgctgtccatcggcttcaccctgaccccttctggcaggtgtggatgagagtagagcagagctcatggggatgagttaccccaaacctattaagcctccctatccggggcactagtcagacactccagttttacactctttcctagaaaaacaaaacccaaccttgtgccctctgggttctctaatttagcagctactatctgtctgtttttggagtgacaccctgtgcagtttaggatttcagaagctgtcctgcatagaggcagaagggaaaacagcaggtatcttgttaacattctctatggggcaaggcagatgtgcccaagctggaggaaacctgcacaccctccaggctagttatccaaggcttgggaggtttccctcggccttctcctaaggccttggcaggaccctgccaccctaaaatcaactgctgattgcctttttagatttaaatgattaagctctgcttatgggaatcttcttctcttttattttgttaagaaacaaacaacaacaacaaaacccacaccaattcttagcaaaggggaatatcgaattcagattttgaaaaaataagtcatcatgcttcctaaaataagacagcttctccctctaactgctctctctgctctggtattctatctaatcataaacccagctttattattcatttcaactcctgccaaagacatgaggtcggagtcagaggaactccccttaccaccgccaccatcatcatggccagcatcctcgtaagtttatagaaagatgccagagaacctttcctatccatctgcagccctgcttggcccttgcctcagtgaatttaccactatcataatcacagtgtgcagagtgtgttaaattaagaacagaatccacagtacgcaatgcacagaaaagcctgccttctgctgcagagaacttgaaactgtgcctaaaatttatagtaccgtaaacatctcagggcctcgagtgataagtatggctggatttccgttaactatagaaatccaggcagggagatcctcccagggagttgcaagttctaagatgaacttcttgaagattgttcccagatttgtgcatgggatacatgtacagcagacagttgtaaggaggtccacggtcatggaaaagaggatatgtttctatatgccaccaagtgggaaaaatggaagtgagggaaaatatttgattaatcaaaaaattttagtttggatacctgctttcatagtaattgttgctgtgtcattaaacatacagttgcttaggaaaagagaaggaaataggtgactttctaattttagagttaggctggaactgagtggttgctaaattcaactgccctgacaatgtggggatttcctgtccattagcagcgattgct

SEQ ID NO: 1882734 - DNA, 4001 bp, Homo sapiens; identical to SEQ ID NO: 586586

SEQ ID NO: 1882735 - DNA, 4001 bp, Homo sapiens
ctgagacactgtgcccggccttaaacacaaatcttaattcattcttacaactatcctgaggttagaaaaatggaaggggaagaaaaatggcaagcaggcaggctgacttcggcttcattatttggaaggacagtttgcttggttaaaacacactactgcccacaaaggccaagacaacagaaaaatacagacttatataaatagattttatatgtgacagcagtttgaatggagactttttcaatgcaaatgacaaacagctgtccttgggaataaatgacaacgaatttttttatctcaacagctgtcctgagagcacgtctctacatctctacctgcattctggaaaccgggagaaagccaaaacggatgacaagacactagatcagccgtgtccaaccctgtgactacaaggacttttccgcctatctttggtggtgggtatcatcaaaattctgcacaaaccttttttttttttttttttttaagctcattagctgttgttagcattagtgtattttatgtgtggcccaggagcattcttcttccaatgtgggcctgagaagccaaaagactggacacctgtgcactaaatcaaaaggctattccttctggaagcaattgtaaagaatttctcacattatcttgacatgaaaaccaatgcatagtgggacagaatgcaaaatcttcaagaatttttgttgttgttgttgttgtttttgagtcaaggtcttgctctgtggcccaggctggagtacactggtgagatcacagctcagtgcaggctcaagtgctcctcccgcctcagccacagtactagctgggactacagatgcgcacagccacccctggctaatattttatcttttgtagagacggggtctcactgtattgtccaggttggtctcaaactctttgactcaagggatccaggacaggataacaggtgtgagccaccacacctggccatgtgcatgaacttttaagacaaacacaaggccccacaaaaggtaaggttttcccacctaatttccaggggatcttttggtgcaaggatgagaagcccttaaaagtacacagacaactccaaagattcaagacagttcattcgggctgagccagcccactgggcagacagaccttcaagaaaggcccacgcatgacatacaccagatggctctccaagaatcgcttcagtcctcagggtccctaaggtactggacagagctaggaaagcaaacccatttgcttcttcctgcacgaaaccccttgaggtcaagaccccacaatcagacgaggatggagtggctcaccctcagtcaacaggccagactcaaggtggtataatgacttaaccaagggtgtgggactccaggtctgactcccaactcagttctcctttaataaccacactttggtaattctccttaacaggggttcctggcaagtcagttctccctcaggcctttggtttcctcacctacaagatgagagggccggaccagatggaaattcggggggtaaggggatgtccgcgcgcagcccacccccacccccccgacccgccccacgggaccctagcgcctccatcccagttcccaccaagcacccgccccacaaatcctgcccaaggtgagggctggtcccgggtctctcggctgccgcatcagcgagtgcaggagggaggggaagcctccaagggcgcgacgcgggctcaaggatgcaactcggccaggagtgaactggggcctcaagggaggtgtccgggccgctcctcgagcccagcccgggtccccaaaccccttacctccagggtccgtatctcctgctcggtgaggtcgttggacacagcgcacttggtgcccagcccgcgcaggctgccaatggagatgccgatgagcttctggagctgtccgcactgctgcagccccgggctggccggggcccctgcgccaccctcagcggccgctgcatcacccccgccaccgccctccttcttctctcccatcgcctccgcgcgcagtgccgccctatgcaggccacagcggccgaggcagggagcccggggctcgggcgcctaggcaaggaacccccgagccgggagagctggaccgggagcgcccctcggcgctgcccttgccaggacgccagtagagctggcagcggagtctgccgctcccgccctcagagccgcggcggcgggagcagaaagccgcggcggcaaaaagccgcggcgacggggggcaaaaagccgcggcggcgcaggcaaaaagcttaggcggcgggggcaaaaagccgcggcggcaaaaatgcgcggcggcggggcaaaaagccgcggcggaagaaagccgccggggcgggggcaaaaagccgcggcgggggggacaaaaagcagtgggagctggggcaaaaaaaccacaaaaagccgcggcggcggggaccaaaacgccgcggcggcggaggcaaaaagctgcaaaagccgcggtgtgggggcagaaagccgcagcgggagaaagtctcactccaaattcccttgcttcagtaagcttctctaggccaatgttccttcggcattacccattttcttcctgtgaatgcaaatcacataaacatggaagtacatttgaccattttaattgtttaacattccatgtcacacgaccttccacaatagaatcaatgtattaaaatgtgttaacgaccacacattttacacaaatgccatgaatccttaaggtgttccaatttataaaatatgtctgcaaatcatactttatgatgctttgtattctgtcggtaattggatgtcatatatttaaattctattaaactgcttattaaaatgtccagtgcctcttttcttgcatggccacaaatattgtcactttaaatcagcacctttcaaagttagtttcatgacgactcaagatactttaaactattttagaaagtctcaaaataattcaaaaataattcatttagttaacatattttgtaaatatacatattctatgtattaatttaaatttggaataagtcaaggaagagatataaaatgtctttaaaaggtattacaactgtaagtaatcaaagaaggaaaaacaaacaaacagaataaactgttaaagggccagaatactaggaagaacttaaaaagtagtaagcaatacatacttcctcacctatataatatcaaagagtttgggatacccacagaagcgactgtgaaaacctctgagaccatcctctgtgttggtgtctccttaaatcaatgggataaatactgaaaatcttgtccaatagcaatccaatttaagaagtcaccataggtataaatagcaaacaattatatgttccccatcatggccaaatgtatcatgtgagccatatgtgagccatctacaaaatcaattattcagcaattcagttcatttcattgagacaatattaataaaaggatcaaaagaactatcgtctgattatgtcatacacaataaatcaccaactatttatcaaaaactgttctttccattctacctctgtggttattgccttaggtcagacaccatcacctctcacctgaattaatgtattaagtttttaatgggtctccctatctccaatctcaccaaccccagattaccctttaatgatttcacattaccttgaaaataactaggcacttatttttgtgctctggtacaaaaatgcctttgtctgttgccacacaggccattatctcatggaaaacctgttttccagctgtgttgaattcagtagtattcatagacccaacacaatctcttcttgtctttaatgtgacgtttatcctgaaaagagtgcttttctctcacactccctgtatatctggttggcttatccttgaataccctactcaaactttaccttccccaagcacagttttccatggtctcctcaatgctgagctgcccttctctgtggtccttttgcaacagctaccaagccatttcttacatggc

SEQ ID NO: 1882736 - DNA, 4001 bp, Homo sapiens; identical to SEQ ID NO: 586590

SEQ ID NO: 1882737 - DNA, 4001 bp, Homo sapiens; identical to SEQ ID NO: 586591

SEQ ID NO: 1882738 - DNA, 4001 bp, Homo sapiens
gacgtcttgatcaaagtacagtggaagacagtgggggagttaggatccatcagaagaaggctgaggagcatattaaatgtggcagcatggtaaggagtgtgtatcgttttagcccatcattttctcttatttcttccccactaaactgtcatttcacttacttataatatagtgggaaatagaacttttgaaagcaatgtagcttagtcagtattttaattggatggggacattggaaaggatggcactaattggcagacctgcaaaaaccaagccacggagaagccatgggataaagcagaggcactctcttaccctctcccttagcctgaattctacgttttcttttgttcctacgactgcagatctaggagacatacaaataagaaagttaccaaagcagttctctacatttttgtttttttaaaaaaaaatttgtaaaagatttgtgagaattattataaaaatctccaaaataggatatagaacaataaaataaatatttttggtaacaaaattaaattatataaagctgtatgtattggtcttgtatcacaagtataaaccatattgctctactcgatgacgtaagtacaattgttcttctctattgtctgggctttgaaggttttctgtgcactgtaaaggacatccaagaaacattcttgattgtgaaactccttgtaattaccttaggtcaactgataatgatataggaacagttttctattacagctttggtcctaaagatctgaatgtatagggtaccactgacatccattttttcatctcaaaggtccgcatttactctgtgtccactagatagaggaatcatcctttaagtatgcatgatcctttggagaacaaatgggtgtatgctgtcggttagcagaacactgtttttttttatggtaatcatgggtgaggttagacttagaagttcaactttctgcaatgaacaattacttggaatttaaatgggaattatttactaaacacacaaaactttccatggcaccgaatcatatggcagacgtaccaaacatgcaacaccaaatctgtttacagaaacccataataccctcttcaaagtaatcaggcttttttgatgtgggaatgtttatgagaccagatatttttcactttcaatattgttttgacttttattgtttagacttagtcattctttgggaaaatacaaaggtcataaaatatgttttcaaaaatttgtaattttgaaaaaaattgtttttatagagtttggttagcttacttggcagactcattagagaatggcggtaagcttgttttacttagatatatgtaaatgaaatgcaatattaaacacacaccttctgctacagatttttttgtcaatacaaaatgcacgtattttcagggtacatttggtaatttgatccattcacatcatgtgtaaaaataaaattggggtaatcaggatattcatcaccttgaatatttatcttttctttgtgctaggaacattttagttatgctcttctagctattttgaaatgtacagtagattgttaactattgtcaccctactgatgtattgaacagtaggttttatttctatctgacagtatgtttgcacccagatctttccttttttttttttctggataaaagaagctactttctgtatgtaaatgaagagaagcatcctctaacttaaggagggtactgccatggaaatttttaatgagcgaatttctttaaacagtgcatttgttagctattactatataacccaacatttattatctcgcagtttctgtgggtcctcaagctctgggtctccatcaaggatgcaaccatctcaaagctctcctggaaattttcccaagtagctcactcacctggctgttgaaataattcatttcctcatgagctattgcactgaggcctcagttcatgatttcatgagctcctggctggaggcttgcctctgttctttgcacagagtgtctggaaacatcatagaatgcaagagagaaccagaagatggaagtcacagtcttctgtgacatcagcgactgacatcccatcccctttgctgtactgggttcgccagaggcaaatcactatgctccacccacactcaggggaggtgactacacaagggttatcattgggaaccatatcaaatgctgcctaccacactaacactggagtgcagatattgtaggctaagtatttcttgctactcacccccattaagattaagggatttatagggtgaatagggctagacatgtttaaatataaaaaagcatacaaattatatacatgtatctatccatacacacatgtatatatgtatatgcttttttattgcatgtagagtgataatatctggaagagggcatagggtgttagaaaggcaaaacttatttttacattatctgtaaaattgtttttaaagagcttgatttggatcagatccatatcaaacccattggtgcaattatatcattttctaatttttattaaagagagggaaattgcatgtaagtgaaaaaaatgtggatgtaatattgaaatgggcatcttcagccatagctttaagttcttgttcttcagtaaccttgtggccattctcaagttactaaaatttgtctttctgtatttgattataaaatggccatatgcttttagataccaaacttaaatttttaaaaaatctaatgaaatgaatattttgtttagtagcgtgttcttatatacattcctaaaagatctcattctgtagtggttgtatttcagatggtacaacctaaaattttgtgttttagatttgctttctttttttgtgtgaatctttctttttttgtgtgaatgtaaactcaagattttattttattcataataaaacaaaagatgacacttagggctgggcgccatggctcacgcctgcaatcccaacactttgggaagctgaggcttgcagatcacctgaggtcaggagttcgagaccaatctggccaacattgtgaaaccccgtctctactaaacgtacaaaaattagccgattgtggtggggagcacctgtaatcccagctactggggaggctgaagcaagacaatcacttgaatccctgggaagtagaggctgcagtgagccgagattgccactgccctccagcctgggcaacagagcgagactcgtctcaaaaaaaaaaaaaaaaagacacttagaaccgtattacttggccgtgtctcttcttaccaccttccagttcaaaatgcttgcatcttttgatagctagcattctcttagatctgcggttggtctgggcttaatgcactaagccttagcacaatcttctttgtagttttagctttttctggataattggcttagtctgcccaccagagccaccctgctatctgtcataacaccacttcccctgggcatacagaaaatccttgcccttcttgccctgtgtcacttcatggggttggtgcttgccacacttctcacagaaaatttggtggattttaggaatgttcaccacgtttgtgggaatgctattggcatggaaagactcaaatctttctattcattctaagtccaaacatccagcttattttctaagtgcccaatgtcattatatacaacataatgtgccagccactaaggggtagtatgaacttccaacaaggtttcagtcctcaaggaattcatatacctggagatgatatccttcaaaattacccaggcatacatatgaagaatgggtgatatacacttattctctaccttgttctaccaaatttttaagatgaattagccaaagatagccttctttgataagggtgggacacacaatagtataggaggagttgagaagaggacggctaatgttcaccccgcctgccatgctctctcacctggtgcagggcagcttctgtgtgtcataaagggaggttccatagagacaccataatttagaagatctttatgaagtgagaaa

SEQ ID NO: 1882739 - DNA, 4001 bp, Homo sapiens
ttttggcatcatttttggctgaagttttgtattgcatttccatgtcatttggtgtggtgtgtgcctgccagatattctgcctgctctcagctgaaggccttcccagattgggcagctgaatgtactgcacagctgccaaaattctaattcaagatctagaattctaactcctgctctttagacccttgtctggccttggcctcagtcccctgccaactcggtccctggctcattatcaggcccaccagggccctgcccccaccctcattgggcccatgaaaccattcttggcaccaaactgaacttcaagacacagctgccccagccccacccaagccgaatctcatctcagcaagtttgtcaccttgtgagctgcaagacagaagagatgagaagagaaaatgccaccggtgatggtcagatcataaaacttcctgtagcaacagacatattacatgtgcctttactctaagcacttacatgaaaagcaaacaatcccattattagaaataacactagacagagatgcatagagtttatggagggaggaatactatttctccatgcatctgcaccagagggtaagtgaaatttgccctaaggaaaaatgctaaattcagtatgcatatattaatattaataaaaaaaatgtactgttgggtcataaactgctgataatgtgtaatatttcttagacacctggaaaagtgctactggaaaatacacactttacagaagaaatatgactgcaactggaggagggggtggggacaagaaagtaattgattctcagcaaaatgctggttttcagggaagctactaaattcaccttaagtggttacctggtcaacattatgctttaaatgctcacaggatgaaatcgcttcctttttaaatgaagagtcactatgtcccttgccgttgtttccgctccttctagccttaaccaatgcactgtcctttctgcagtggctgaaacgaggatgggttaattaccagacctgagatggtggagtgggtgcagtagggtgctgtaatttcgggtgatgaaattattttagtttttgttttcctagaaggagcagggagtataaaaaacgtggcacatatgtaaaacacaggcaaatgcacttgacaaccaagcactctattttgaaatttaaataaagctaagatttttttctggcctagagggaaagcttcattaaaatcaattagttagtacaaacctccggagaatgtgtactttttctaaagaaggtttaaagaagaaggtgcacacaattacctttcctgggtcccctgtgaatgtgtcacacctagacaggtggctgagtacaaaaaaatgtccctgagagggaccagggtaactccctgagttctcctcgcagggaggtaggtgtaattaatcgatgtgggtgtattaagaacgtcatatacataaccaaggaggctccaaacagatggcacggatggcaagccgtaaagggcaggcctagcgagataaagttggtggcagggctcgcaggtgaggcctgggtccgcgcgctgaggttggggccgcacagctgtagccgcgcgccctggtccctcctcccagctgcggcggccttccccccccgcccccgcccccgccctccccccgccgctcccgacgccgccgccgcagccgccgcctcccctctgcctcccggtggctcctcgctctccttccatctctctcgccccctctccctccgtcccgtcctcgccgctcccctcaccccgcctctctccccctcccccagcccctcctctcctcaccccacccggcctccctccctccctcgcccgcccggcgctcgcagagccgacaccaggggggctctcgatgtagcaccatgacaggcatcgccgccgcctccttcttctccaatacctgccgattcgggggctgcggactccacttccccaccctggccgacctcatcgagcacatcgaggacaaccacatcggtaaatggcccgggggtgggcgggggtgccaggcgcgcggaaactcctgcccgggcggggagccccggaatggccaggggtggccggcggggagggaggcggcagggcggggagggcgcgtgcgagccccgaggtgggggtggcgggatgcgggggcgcgaggtgccggggggcggggagcgggctcgggtgggggagggggcgggcgccccgaggtgccgcgggcgggcgggcgggcggctgggggactcaggggcgtgcacgcgggctgcgaagtggtgggagcggggagcgccgcggcggggcggcggggttgcggcggcggggccgagtgccggcgcgcggggcgcggggcggagggcgcggcgggcggcgggagctgggcgctgggcagggtcgcggagttagttggcccgggtggtcggagtagcccgaggcgctgagggcagcggggggcgggcgctgcacgccgccgggcgcttccgccccggctcgagctgtcagggctcggcggcggctgcagccgcggggaggtggagcgggggggcgggggtggctccaccgcggcagccattccgcttcctcctcccgccgccgccgccgccactgcgtcctgtcagcgccggttgctaggtgtggtgcgtcgggagggggccggggccggcggccgcgggcgggggccggggagcttgccctctccctgggaggcggccgaggggcccgggcggggccggggacgcgggcccgggggctctgggtgccctcccctgccccggcctggcgcggacgcccgggcgctgcgggctgaggtcttgggtgcgcccgcgggccgcgcccagcgccccggggtcgacgcgccctggaggcccctgcggcggcgcccgctggagagacacccccagggcccatggccgggcatttaaatgcaccccggctctgcgatttgcctttctaatggtgctaggcccgaggtgcgctggctgcgccctgggatcggcggcggcctgcgcagcgccccgggcccgggagacgccggggagggggcgccccgcagggtggctgctttcccttcacgcctggacccctggacctttcaacaagtcctctgatttgcagaagtcattgcacacattttcacacttctattcggaacccctgctaagggaggtgggccgggtgcatctggcttaggcggtccaaccacctgcggaaggtgtgaccgacgccagcgagttgtcctgcgtgggctagaaggtgaagggtccgagcgatgtcccaatggggctgtctaatccagagaacctgtaaattgcccccaggaagtccaaatgaatgccatggattcagccatgtggatgcagctcacgtttctacaaagttgagagaataaatcacgactgctgtgtatttatgcaggaataaaatgaggcagaaccctatgctcctttgcttagtatagtgctgtctctgcacacagtggctgcttaataagtgttgaatgcctgtttagaatgtgatttgatgggccatccggaataggagataatcatgggaaacgtctacaaaatgtctttcagaggaaaatgctgttgagtaattgtccaggttttgaaacttttcaagttttcaggcgtccttgtaatagcttcttccatttcctctgctaaaggtatgacagaagagctgggcaagttttggtagtcttaaaagcagtttaatggagcaaccaatttgctgattcatatcatgattgaatagtcataactgaaagtgcttgaaagtattaaatcagatttttcatgatggctagtttaaaataaagcgaaaacaccggtactgtgaagttctggtagaaatgttactagttcaagttcttccccttactcccaataataagtaaaaaataaatatagataatgctatacattaatatgtatgatataagtaatataaataaataatttctcttgacttacagaaggctgtcattgcatatcccatccatt

SEQ ID NO: 1882740 - DNA, 4001 bp, Homo sapiens
tcattgttgctgctgcctcctgctctgctgggcttccttcttcatacccctgcctagtccctccatgttaacatagcaagtccaggtggcccccagaggacatcccacaacaggctgctttggtgctctttagccagactccaacaagacagctttgcatgccttctcttcactgctgtattgtctcgacaacacacaccttcaacaaagtacatttaaaaatacattgtctttttgctccatgtaaaacctctgtgagataattaaggcattactagccatattttttctttcaacagatcatcagtgatctagttcaggagaaatggagtgactggcccgaggtcacagattatagaaagcaggacctgagtgcatgggtctttccactccagcaatatgtgatgcctatgccaaaattacagtacctttttttctccagtagaaatatgtttcaagcttaatcagtgtgtggtcaactaatttccagcctttccttttcccgctatatatatgccaaacagtgatgtgatagaaaaacgaatagttgcagaattgagacacttaaaaacttcagttacagctctaatatatgagacttcagtcaagttactagctttcctcaactataaaaaggagattaggcaggacttggtggctcacgcctgtaatcccagcactttgagaggccgaggcgggcggatcacttgaggtcaggagttcaaacagcctggccaacatggtgaaaccccgtctctattaaaaatacaaaattacccgggtgcggtggcgtgcgcctgtaatcccagctacttgggaggctgaggcaggaggatccctcgaacccgggaggtggaagttgcaatgagccgagatcacagcactgcactgcactccagcgcgggcaacaagaacgaaactccgtttcaaagaaagaaaggaaagaaaggaaaggaaaggaaaggaaagggagggagggaaggaaggaaggaaggaaggaaggaaggaaggaaggaaggaaggaaagaaaggaaagaaagaaagaaatggagaattagatcagcgactctttgcctgggggtgggtgacagaacaacacttcttcctcccctaacaaaaattacctatggagctgtgagggctttccccactgatagaaatgccagcagaaattcagctacaaatactcaatccaataatccttaacatcacttccaatccacagttatgattccaacgcaatcttttctatacagtatttgtcagctgtttttattcttcagtttatcatcttatatttggctctcaatttcacccataaattattgatggcttattatacgccaagtaccctgcgctccgctttttgtggtatccctcttcggagcgagaagtcacttagaattttaccccatcttccccacttgggaatcggaagggttcatagctaagttttgttatttataagcacgccggctcttctctatccctctctccaccaaccccatttcaaggttggtccctcccagcggacgacagtgatgaattcctcttggggacagccctcccgcaactaacggtggctccatcgacgctctggtctccttgctgctcgctgggaattcgggtgggacgttttccaaagtttggattccacggcacattcctccctcggaaaggcacaaccggctcggcgtgtcagctcagctggactcacgccggtgcggggccgcagctccggttctcgctgggcggctgcggagggctgggcgattctctcagcgtcgcgaggcgacccgggcagcagcaaacttctccgcttcccctcttcgggacgcggcacctcttctgcccttgagcactccgcaggaacttcccccggcctcggctctcgctccgaaataaccgagccagctcctcgcacgctcccgccgtcctcctccggctgcggccgcgcgcccgccgccaccgccaccaccgcgcgtgtcctcacggggcctcagctccctccgcccccgcagccgcctgcgtgcccttcaacagctccctccgcccggccgtcgcggagaggagcggggagcgcgcgccggcgccagagacgtgcgcgagacgcacggccccgcgccgagcgccggaagcagccgagtctgggcctcgcgcgtcgcgcgcgcctcctccccctccgccagccgccgcggcctcgcgcgcgcgcactgaggcgccgccgccgccgcggctgctgcaggaggcggcgctggctggcggctgcgctcgctccagtcggcgagcggagtagcgagcgagcgtgtgtgtgttttttaaagatggccggagcggcggcggcggtggccgcgggagcagcagctggagccgccgcggcagccgtgtcggtggcggctcccggccgggcctcggcgcctccgccgcccccgcccgtgtactgtgtgtgccggcagccgtacgacgtgaaccgcttcatgatcgagtgcgatatctgcaaggactggttccacggcaggtaaataaaccccctccagccccgcagccgccaccgccggccaccgaccaaccgccgccgccgccggccgcccgcgcctccctcgggccgggccgccgcgccgcgcccagctttcagggggccccggtgcctagccccccggccgggcagtggggcgcgcggtgccccgggttcgccgggcgggctccagaggggagccggtgggctcgcctggcccgggcgaagagtcgccacaacaaacacgaacaaagagggccggcggataagttggcagggggagcctggggcgaggggacgcggccgggcgggcgcggcgggggcgtcgggcggagcgccggccgggtccgcagcccctcgccagcccgggccgccgccgccccgccccgccccgccgcgcccggggctccggccggagtcgccggccgccccgccgctctgcccggccggccgacgcgcctgccttccttccgggcggcgatggggtcgccccggccccgcgtctcctccgcgccgcgggtccctgtcgcgcccccttccccgtctttatcaaacttcctgggccagtgggacgggggcagcggcgggccggagaggcgaccgcgccagccagctcggcggggctccgcggagtaaacagagcaacagatgaggcactcgctctcggggacttgaaaggtgccggggaagttggggccgggcccccggcgggcggcaggttgacccgggtcgcggtcctgggcccccgcacacacccgggtcgccgggactggggcagatggagtgggttgcggcggcccgaagggaacgcttctccggaccccctgcgttgccctcgcgccgcggcttaaactttacaaagagtgcagttgccatcgctcgaagctggcgacaccgggaccgcctgcggctgtgcccgggcgccggtgccggcgaacttgagtcggccgggcggacgctgcggggccggctggcggcggcggcggacgctgccctctgattcagccgccgccgcgctccgggtttgacgtttgagagctcgggccgcctccgcagccaggccgccgactcgtgtgttttgtaatcaaagtgtgaggctaataaagggcggcgccacagcctcttgactccggcgtgggagggattcacaggcatttaaacaaagaaactagttggggttgggctcccaaagtccttatttgggtgttgtggcaaagcctgcggtcacctttagttgaagccggtttcccgggccccgtttggtgttgtctcttggcgagagcacgctcacgagtaatagcagatatggtgactgtgattgtaggaagtgtcttttgattgacagcaggacatttaaatacagcctccgctccccccctccccaattttacagaaacactacaagaccaggccagatgtcttagtctccctctactggtccagggagagaaaaccatgtaaatcacaatgttctttgcagtgttta

SEQ ID NO: 1882741 - DNA, 4001 bp, Homo sapiens
tgaccctttcccagtccaagagaagcagcagttggcagggatgtggccaaattcttccccataccatggtgagcggggtgcttcaaagtatttctcggtcccccgatgtgtctgcctcctctttctctcacagaccagcatttgactttggtcactttgtaagcccaacagactgagattggattcccagagaccctgggaggaccacggggtggaaaggaagagaaagagagagtgagagtgagcaagagagagagcttgttctctttctgtcttttccaacccttttccccctcctgctggcccattttagagccacgttgtcacacattggcaccccatctgagggcagagagagggaatgacaggagatgaacaaaatcacagctgtattagagacttctgatttttaaaaaggatgtggaaagaggttgaaactaagctgctttctcttggaagatggttgcagtaagttcaggggcaggtttttagcatctgaacatattagctaaagtatttgaatataatgcgctatgctgcatggtggagtggaaaggggccaaggataggtgggatatttggagtggtcttgggcaagccatttcacctctctaggcctcagttttctcatcttccccaggtacacattgagccagacaatccctgaggtttcagaggaaagcagtgaggagcagggtggcacacagtactggagtcagctgagtggcctgaaccttagctcgagctgtgtgacctgggttgagttactcaccttctacgaggcttagtttccacctctgtgaaatggggataaagtgtctgcctcaaagggtcattaagggggctagattggtgaatgcacaggcagcttctggagaaggaattttcccaggactaggaagaagaactggtgagtgggaggctttgaaggtgagtgagggatgataacaggtctatgaagaagttcaggctgggagaggtctggccttggagtgggttgggggtgctctgggcaacccttttcaagggaggagaaaatggagtaaccgtcaggacagaaaacagggtgccttggtgctaagttccagggggacattgccttgggggaagaaaaagacatcttggaacccctatctgtttactactgttcatttcttaattctttatttgtaatgaagatgggaaggtttacaaccttgacagttccatttatttctaccattttcacctaaaacaatacaaggaacatcaattatttccaccctggtttcaactgcaactggataaagtcggcttaattaaacatgttcagtgtctgagggtctgttttgtttctctgtctgtctgtctgtctgtatctttctttctcttctaccaaccaccacaccatccctgtccccttcttccttctcctctccgttttctagcctcacagctgggcacaggaaaacacggaataaggacccagtgaactaaaggggctgaagccatgactaggaatcatatgcatgaagaagcccagaagagccaatcctccccagaagggcacccggagaccactaaggaaggagggaggataccttctgttcccgtgttcaggctccaatgtatccaggtcacaggaggctgcctctccaggcagagaaactgatccgtccctatcagtgccaggcagagggcaggggatttcgcacctgagcaagggttgggatgactcccaagcttccattctccctggagttcctcccgagggtctctgtgacacagaggaggaagcaggagctttctttgcataatcatggtcaaatatttatatttgtttaggatttgcttctataggatgttttcgtcattcaaatctatttccaaaataaatctggatctcttttataagaaaatgcaatgaaaacaccagaatgatagagtaagaaaatagaactgaaattactgaaaaggagctgaggaattagatgttgccaggcatctgagatgagatgattaaaacagccaggtggctctgagctaaggcaaaaggcagaatctggggcaacacagtttatatcatctgacaacataaagcatgcacatcctttgtgtcaagccgcactgcttcctggaacaaactcaaggcagaatttattacctgggttcctgtttaagtgcatgtcgaatgaccagttgatgaaagccttcaaataaagttttgcaaaagaacaaagaatgagacgtggagtactgaccctctctgaaaggataccagaattaagactacagaagccgacccaacatttgctcactaccttttaaattggacttaatgccatattttaaaaaataaccacttttaaaataatttttgcttatatcaaaagtaatacaggtgaatttcaggaaatttgtaaaatacagcttcaaagagagaggtggagagagagagagagagagaaatctatcatctatcactcaccactattaacattttagtgtcatcttcccatgtttttgtttatgcatagatatgcatatctattttgcaaagataagaaattactatatcttttaaacgtttttatttgataatgtactatgaatatttcccattcaattaaatacctctacagtgacactgaatgcttatgatactgtattgatattaatattgtagaatacatcaggaagatattattacaatatgtttaaccaatcccctggatgctagatatttgggtttctaacatttcatctttttaaataattctgtgatgaacatctgttcgcagggtaccctccatgaccagttgtgtttcagagaaggcagatctagtccattcaaggccaggatcccccggaggtcagtacattatttgcccagtgaactgtgggcatatctatactttttgcacttttccaggcaggaaggaggaagtagtactgagaacccactgtcttgggttaaggagcattctctgggctgcttaggggagaagatttctatcccaaggtcctgcagccttggggtaagatgggagcagagaagacagagtgtggggccactgtggaggcagcagggaggggttccttgtggccactgatcggagccctcatattccttgtggggaggctctaatttctccagagatgcttctctacttggaggtctgccctgtgtcgggagcattagtggccctgcagagaggtgggacgttatttggatactcttgctcgtagggagtttgttgcctcccaaaaggtgtgtggcatttgtaagttgttctccttttccatggttcttcagaagacttgaatatggtttgtaatctaggcaccaaaattgaaattccctccaaagagccacacaaataaatgacctcccataccattaagttctctctatgcatggcaatccctagttaacctcagacaggtaagaagagagagtgtttttcatcaatgacaaggaaagttttttctggctaatgtggtatagtagcaaatgcaactaaaaaggacacccccaagcatgtctttaattcatttgtacacatccaacaacatcacttttaagtacacataggtaggataaatatttagtcattaagtatctgaagttattgtaattctatttcagcactattcttttccctacattaaaaaaaaatttctagactgtgcttcaacctcaaaggacataccttggacagaatattccattaaagacattgttggagcaacttttattattcattagtgtgttttaaagtggacctgaacagaaatgctttttgctaaagtaaaaatacatccgtttctatgatctaattgtgcaattggttagaatttctatctatcagttcaaagggaaacttggtttcagtgaatttgtttttaataaaaatgtgctatctatgataaatatatttcactttgttcaaatggatttgattgggaaaacatattgagcagaagtactggtacagcttaatttcattgctttgagaaaa

SEQ ID NO: 1882742 - DNA, 4001 bp, Homo sapiens; identical to SEQ ID NO: 586619

SEQ ID NO: 1882743 - DNA, 4001 bp, Homo sapiens
ataatattattgcacacttaatagaccacagtatagtgtaaacataacttgcatatgttttgggaaaccaaaaaatttgtgtgattcactttactgcgatatttactttatgtggtggtctggaacagaacccaaaatatctctgaagtatgtgtgtattattaactcagtaaagtaattttaagtgtcttgtgctggcacccctctaagcatttttataaaccttacgccagttccatgtagtaggttctactttcacagataaggagactgaggcataacagaagttaatcaatttgcccaaagttgcacaactagaaagttgagatgtttgactttgcatccaggcaaagtctcatgcttaatccctgtactatataatctctgtggcctctttgagctctgaatcctatggctcttccatgaactttgatgttttatattcagcaatatgtaaaaagactgttctaacatcaaggactaaggatgctgttcctcgtttcttttttgccttattacaggacagcattctttttcatcacttacatttctgcctttgaatcacggatccttcatctcccaaggccttagagttagaagacagatttctacttcttttcaattaaaaaaaaaagaaaaaaatttattccgtttttcttcagtgtcctgggtcatttaataaagtgaatgaaaaattttctcatttataattttattaacaataaattattcctattgccagggttcacctgaaatccccaaatcaactagttaaaatagaggcacatctgagaacctctagattaatagaagaaagataaagagtacagagacataagtatcttactcttttgtaaaaattgaggcgtatatatagcttgctctttcatctggattatgctatatggtttgtcctcaacaagaaaagtatactgtgggccaggcctggccgctcattcctgtaatcccagcactttgggaggcctaggcgggaggattgcataacaccaggagttcgagacaagcctgggcaacatagtgtgacctcttcaccaccaccaccaccaccaccaccaccaccaaaaaaatttaaaaattaaaacttagcccagagtggtgttgcacgcctgtagtttcagctacttgggaggctgagatgggaggattgcttgagcccaggagtgctgaggcttcagtgagctatgattagccactgcaccgcacccccagcctgggcgacagggccgagaccctgcctccaaaaaaaaaaaaaaaagcctcaatggtgtaaattattttacataaaatgtctctgtatagtcctatatagaccgaggaggaaaaccaatgagatataaagttttcataatgttaaataatgtacaatttcaaataatcctgtatattactatacagtagaaagaatatggttacaaaaaacatttccatgagggctgtgattgagttccgtgttcccgtaaaacacttagagaagcctaactgaagatttctagaaccgactgacaactgatttcagttgtaaacacacagtaagccagcctagttaggcagacattcattgcacgccaaggagacaccaacgggactgtgtgctcttgcgttatgaatcccacgaaaataaatcttgtgctccgtgtaacatgactttaacttgcagtaatatcctttcatcatttaatatttattgagcgcctaccatacaccaggctcagatactgcactgaacaccgaccctgtcccatgaagccttacactgatgggagacacctttgcatgttccacaacccaattatcaaaaaaaaaaaaaaaaaaaagataatcacgtaaccgaaacctggaaatctgccttgggcacacaaaagagcaggcgcgacctcggaccagctccgaggcaaaattcactcagcgcgggacagcgacagggaatccggccgcacctgtgcctgcagtctcattgctcggaacggcgcgccactgtgacgtgtcaggccccgcccctgactctcctcatagtgcccccgcctccttgcgcgaagtgcgcaggctcctgggcagggctcgggttctgcccggggacgcagcccagttggtagcgtcgctccctgagcgtttctaagggggccgcccggccttgtctttcggcagtggccgagccaccgccgcctgccgcgcgttccagagctgggcgctgcagctgcactgccgatcgccgtgtttggtcgatagaatccccagtgtgcccagagagtgcgacccctcgcccggcccggcgagccccgggcgtgaaccgagctgagggaggatggcagcctctggggtggagaagagcagcaagaagaagaccgagaagaaacttgctgctcgggaagaagctaaattgttggcgggtttcatgggcgtcatgaataacatgcggaaacaggtaccgcctctgtgggagtgacggacgacggtgggaggtggtccggggctcgggcccctggttcccggggtggaaccccgcgccctgtggatcgcgcccctctttctctgtcctcgcccctccttccgttttcgcaggcgagcgattccgcagttggtagaggggcgcgtaaaacaattctcgagcaaaagtgcttctcgtctgccgaggatgtagctcccaagtcagactcctgggggactcctcaggctggctttcgccgtcgggtatcggttgtgtaacagctctgccctagttatctctttgtggggcgaggatccttccattggcgagccgttttaaggtgccgtgagatcttgtgtgaagaaacccgttggcatagcccaaaccgaagcccccaaagggaggagagttgctggcctgacatcagctgctcttaaataaggatccccgccccctcctgtgttccccggtggagctagttgaagaggagtcctcctgttcgtgctaatttagagcagaagcagccatcgataaataccatgccatcttctaagggcactgtgcgcctctgttattaagaggagctctttgttctgtccttggtgtgtggtgcattcgtgaaattctgcagcacatcggcgaaaggtgggttatgaaaagaacggattttaacgctggcgaaggtgaaacaaagaggctttttttttttttaattccataacatctacaccgataagcatagaaagtcactttttcctttctgtaagctttatttatagataatacacatctaagtagatttgtgggaatgtttgggttttgttgactgggatcctgtttcaaggggacaaagcaggatgtgagttatgtgtaactgcaaaacctagtttgctttgtctggtggttctgctgggaatatgggcaacagtagaggaatttaagatttttatgaagatattaacttctggtttctataagcaaacgctgactgctgggattttgtctttgttcaccagctcctgctacagtgcaccagtgcagtctgtgggaatgcttttaaatctttcctggcctggcctttgtgctgaagtactgtgaatgcctgaattcgttaatttatgtaactgactttcatgtatctattttcaaattcatgttcctttcatgtaaacctttttgtatctacaataccacagacttcaaattgctggtgcatttagctattgcctgcctgtaatggtagttgaacatagttaaccagggcttaaactcgttgaagactcattaggttccctcccactccctcgaatatatgttttcattcgtggatcatagcattgtaaagcattgccttaatccctaaatagggtgaaactggattgcagcagcaaatatttacttgaggagcagaggattatctgagactgtccgtttagctctttggatttaaaaagtgactcacatttcttagctttggagtatattaacatcacttatttaccgttacaatagaagtacaattactgaaaaatcagggttctgttactgagtagga

SEQ ID NO: 1882744 - DNA, 4001 bp, Homo sapiens
aatcccaccgacaaaactatattcttaagggatgtacagacagaaaactgaaataaagaacaggaatcacaggaggaaggaagagtctgaaaagggcccttaaattcagatggctgcttatgccttttcaaagcaattaaagtgttcctgggtgttatttacacctttaaatttgtttccaaactttggaaatacttttctatttcaatctgagaaactgtttcctcagaaagtaatcgatcctccttgacgttgtacccccagaagctggtctacccctcgctaggcctcccagaggccctcaaggactcctagttgattccgagtcccacgtcagggaactaccaccttacataagtatactttgcggggagaaaggcagataagaaaatagggcgccaaaccttctccaccaacagccgtcacaccccacgaggactgtcctgcgggggctttcccctgggagccgcagctgttctgccgtatgggggaggggaacgctttccaacagtcatctcttcctcttcaggccgccaacgccgaccgcaccacagtctcctccgcccaagccctgtcccctcccccgccccggcctgggtcggagccaaaccccacaggaatgcagcccggtcacatgcgctgcggcggtggacgtgcctctccccccgcgccccaaagagacccagcgccatcttgccctgacgcagttacaaaagtcacgggagaaatcctgtctcctcctccgcgccagcgccccaaagttttgcagaggccgagccggggccctcacctcgcgcagggacagtagaaaatggtcagggaagagccttgcgattcccttcgccactgcttgggttccatatcggccgcggcagcaacgatcaccatcgtcacttctccctctctacctttgcaacagcctccccctacggctttggccccacccgctgctgcaggatgaggtcatcgccagccaaccacgacgcgcccgacaggacacatcaggcgctgattggctgccgagaccgcctctgcctctccccactccgcttcccccagcgctctgggtcgctgcggggcaaggggaagacggaaaccatttcggggaaagacccccaaaacaagagccggaatcgccgtgtcattttagtggggaaacccttcttttattctttggtctcccccttttttcttcgagatcactgtctgtccctccctcgtttaatcaccgccatataaaggaattcccactcccctccccgcacattgtcccaccggtggggaaatccttccccgaggccaagagaagtataggaggcagcgacggcaactgcaccgacggcaacggcagctttttaccccgaagcacggtggcagggaggcggcgttgacggtggctgcatttttccggctgcttctccccccgacctcttccgtttcttgctcctccatcgagacagcactagactcgccagctccgcttttatccggtgcccggagcctgcgcactggagcctcctcagcccctagtgggcgtcgagtgacaccccaaccgggttcacccagcgctggaggccagactgggctgggggaggagggggagaggaacggggagacgggactggggttgtttgggagggggagaaggtgtatcgctttcggagggtgacgggagggagttcgttcccaagccctgctgtccttgttcgtgcacccaatactggcatgcccaagctcacctatatccagacttgagggccactgggggaaagggggaaagaaccagtcccaccgaataccgacacttcctcaaaccttcggtggattgttgaatgcatctgttgtcagaaagacagagattccgtccccctcaccgcctccagtttgctatcttcgagcctccgcggagaggcaacggcgggcggcagcccacaagcaaaatggcgccgggcagcttcatcccctccccctctgcccctgcggagcgggacgggcgtaccccgtgcacttgccgccgccgccgccgccgccgcggccgccgccgccgccgccgccattttcccagagcgagaggcagtgacactgagcgggcgcagggggccgagtcggagaccgtgccggagttcgggagcggcaacagagtgggcatagacactccgagcagcctcgccgtcgtctctgcgttcctgttgactgcctggctgccccctcccctactcctcggttcctggtgaagaggctgcgcgctgctgtttggggagggggtgtgtggagccgggtcctgtgtccgcagtggctgctgtcggggggtcgcctgttcgcggaggtgcggagagactccttgggggtcgagcacataacggggttcgggtgtctcgtgtgtgaacatcacaggttagtgcctgtcgtctccatgggagttcctggggcttgcggggttggggtacttgtgtttcaagggggagggaggtctctcatctttatccttaagctgggggagccgacgttgactctcaggtgtctttgccggcgcaagacgttgcttgcttaaatcgaatttattctttcttctccctgaccctagaaatggagcattatggcgggttttagggttgggaaaggggtaactggcagttaaacccccttgagagtgggggagttagggagggggcgcactcctcattggcagcgggttaaggccgcttgagtgaagacggaggcttgtgactgttagtagggtttgtgtcgaagtggtcccaggagctgccagcgctcccttttctcaaccgcgtcttgttcaggtgctgaaaagccatataggccccattttcttcttccatttcttgacgggcagtctctggtataatgtgcacatgaatacgaagggggtaagaagaacgccctgggcatctctctttgtgggagagcgagacagctagctcctcatcctctcctggagagggtaaacccgcccctgaagtggtcaccccagtacccagccttctcagtctcctcccccactccttttgcattaccgccgtcctttactgtgccggagccttaggatctacaatatggctcatttcagaaaagcttattttgaccaagggattggcacaaattctatggcagcagacacagatgagaaacaaacggttcactgtgctaaacggggtgggggtgagaaaaaaacaatccagagtgctctcttctactggccttagttccgtatagatccgtccttgctgggctctgtcttaagaacgatacaatttaaagtcaaagaggaatcgctagagttagctctagagtaaacctcgttttgcctattttgttccctttttagagatgtgaataaggtaaggtgtttggagttctggagaccttggagagaattaagtgaggtgcattcaactcgaggctggagacatgaatacctatttggaaaatagtctgtttttttccttcaatttctgagatggggagtaaaaactgaaatttccctcttttgtcctttacagattctaaaaatggcggccccaggctgatgttgtggtaatctaatcagctcgggtcctccacaccccatgcagtgcgtttgtctgcagcatattacaggcttattatgtttacatgaaaagactgggctgtttttccttccccgagccagttacaaaaatgtgttgattttttactgcaaattacagtgctgtgttttagctgattaatttgattcgtttttcctgaaaggcaaataaaatgtctccacttttgaaaaaaaaaaacagccttgcaaatttcagtggtgatgatgggtgcgcttcaacattaaaaaaaaattatttgggtaccaataatagtttttgtttggtttaatccaaccatcttttattcaatatgccaaagtagattaaaatgtttagtaactgtataagtatcatctattttatatgattaaatgtttcaatctagagtaagacatttcccaaccacctcttgac

SEQ ID NO: 1882745 - DNA, 4001 bp, Homo sapiens
gtgtttccccaaaattcatatgttggaacttaatccccaatgtgatagaatataggaggtgattaaaccatgagtgctctgtcctcatgaatggaattagtgcccttataaaagatgttgggccaggcacactggctcacacctgtattcccagcactttgggagggtgaggtgggcaaatcacttgagctcagatgtttgagaccagactgggcaacatggtgaaaccctgcctctacaaaaagtacaaaatcagctgagcatggtgacacccacctgtaatcccagatactggtgggggctgaggtgggaggattgcttgaacctggaagttcaaggctacaatgagctatgatagtgccagtgttccagcctgggcaagagagccaaccctatctcaaaaaaaaaaaaaaaaaaaaaaaagagagagagagcaagggaaggcagcttccctccccttccaccatgtgaggacagagagaaggtactagctataggaacaggcactgaatctgctagcactttgatcttggacttcccaggctctaaaattgtaagaaataaatttctgttgtttatcagttacccaggctaagatattctggtatagaacccaagtagaataagacaacacccatctaacagtagaccagcctgtagactgtatctgtgagctgtctcacatctaagttccatcctttccaaccccaatgccaatgccaagattcacactggtcatctcttacctggaggttataagcctgagtggtgtcccctcctctcggtcttctctttttaatgtgtcctcatccacattgcttgatctttctaaaatatgatgctctccagcttcaaaagctgcgctgactccctgtgaataaagggatattgaaactccaaagcttgtcccagaagcctcttcctaatctactcctgctctaacctcaatcttacatatcctctgccctctctcacacattccaagttcaagccatagcagttatttaccattcctataatggaccaagtgctttcacttcactaatctttgcacttgctatttaccttcaagatccagatccaacataccacttctttgacatcctctctaattcctttcactccccaagtcaaatttgtcaagaacccttttgttccctttacactatatacatgcctatggcaaccagaaagccacaagtaccagtttcaaatattctattctattcacgcattagaaagataaaagtctgtggaccatgctcctcaatttatagttccaaggccataaccatatgttccaaaatcgttattagcctttacgacattttatcatgatcttcagtttgcataactaaccccatacttgaattaaactcctaaagggcaagaaccacatgtgtgttcctctttgtagccacatctttctaccatgctcactccttccatcctactcagcttagcagaggaacaactggccagttagcaagttataaacatcactctctcctgggatgaaaccactcccacaccagggcaaatgtttggcaaatataaggaagacttggtttcagttcccttaccctcctgagtaggtacatttgtgcagtgcacaaactgcccaactatatgtaatagcccttggacctaacatgtaataagggcaaaatatatatttgctgatgaatgaacttgtctagggaatattccctacctttacccctcttaaattacacgaaccagatgtgcctattatttacatagttttggtattgcactatatccaataatcaaatattcttcagcatgccttgataaattaatgtcaggcttctgtcatcatgttaggaataattcacttacgacacagctggattcaggactggttcaacaaatagcatcaagactcaacatatcttttggttctccttctgctatgttactttcagtcttggacttcacatcttagcagacagaggcagcagctccagttcctagatcctctctagttttaagtcaacctgaaaaatagagcatatctttccaggattcccaagaaagtttccttgctcttcattggctcttgttgggtcacatgtgcatctgtaaactcaccactgtgaacccagacatgtgatatgctgattcgccagcttaagtcacttttcgacatctggggctgagactgccagaaacattgttgaaatggtggagggggctattcgtcaaaggaaaatctaggtataattaccagaaggaggaatggatagcaaccagaaaaaacaatggatgtctgccatcactttcttccacgtgatgggcaaactctagatgacccccagtgatctccacctcctggtgttctgcccttttgtaatgctcttcacccttgagggtgggcaagactttgtaacatgcttttaaccaatagaatatgtcaaaagggatgagatgtcacttccacgattaagttacataagattgtgatttccttcttcctaccaaactctctctattgccttctcagcttgcatgctttgatgaagcaagctgccatgttgggagaggcccacatggcaagaaactgaggatggctgccagctaaaaactgaggtcctcaatgcagtagctctcaaagtactgaatttagctaactactacatgaaaatggatcatttcctagtcaggctttcagatgagaaatcagccctgaccaatatcttgattgcattcttgtgagagatattgagacaatggatccagccatgtccaactcctgacctagaaactgagataacaaatgtgggctgttctaagccacgaggtttgtggtaatactgttatacaataatagatgactagcgcacttccttttctgctcccacaccccttttagaatctctcccagatctacttcactcccaccagccagcacccagtgccaatctggagcagccagagggctcccctcaggggcccccataggctcagatgccctgggaaaggcctagtgcttccttctcctcttgtatcccctcacttctccgtgtgctgacttccatttacctttcagagaaaccatctgactgggctaagtatcacagattcctcaggacttaacccaaaagaaaggacattgtttcattgacgatatctggggcccttcttagcatcccttaagttcaactacttaggggagtactagttaacataatatgaaggtgcagaactaaagggtatacaagcattttggaccccaaaataattgcttcctgaaagagatgcgactcaaatgaatgtgtagtccttgttaatggccaatgacaactatctgtagcaatgtagtgatgttgtcacctgttacaatttgaggtcctctcctatctggaagttgccgtgaatggccagagttgactacatggtcccacatcagccttctttctgtcttcagttccttcctattcccctgcttcgttcaccccttccagggtggcacagctgcagccccatagagcccagactgcagttgcactaaaggaggcttcacagagctgtacaaaagcttccagccaccaaagcacaaagcctttccttcagtcagcctccacagtctcccagctcttaggagagccataatcctacatgacagtcagatttatgctttcttatggggctttttaggcttatcccaaacccctctcttctcataccatctacagtttttagtctggatccctctagaacagccctcagggaataggatttactaggttaaccctagccacatcgctttgtctgaaccctgggctctcttcctctgtggattctgtgattccacagctcagtatagtatttcaaacacattgcactgtaaaccatgatacgtttcatgattaagcactaaaaagaagacaggtggtgcatttatggtaattaaagcctgctgcaggccgtgttttagtgcgtacgactgacaatgcaggaactacgacagtctttgg

SEQ ID NO: 1882746 - DNA, 4001 bp, Homo sapiens
agccgggcatggtggcacacgcctgtaatcctagctacttgggaggctgaggcaggagaatggcttgaacctgggaggcggaggttgcagtgagccaagattgtgccattgcactccagcctgggcaacaagagtgaaactcagtctcaaaaaaaaaaagaaaagaaaaagaaaaatagtctaagaaatcatctctgtcttaaaggaatttatagactttttaacataatatgaaaaccaaaatactggccaagcatagtggcttatgcctgtaatcccaatgcttttggaggccaatgcaggaggatcacttgaggtcatgagtttgagaccatcctgcacaacacagtgagacctcatctgtacaaaaagttaaaaaattgtgctggcattgtggtgggtgcctgtagtcccagctacttaggaggctggggcaagaggatcacttgaacccagaagttcaaggctgcagtgagctatgatcttgccactgcactccagcctgggcaacagagtgagaccctgtttcaattacaaaaaaaaagaaagaaagaggaatatcttacgctgtaagtgaagttgcaaggaagtaaatgactaaataacagcaaggtgaattggcttcaaatatgcagatcttaatctcagatttactgtttactagctttgtggattgaggtataatcacttacctatctgtgcctcaatttccccatctgtaaaattgggctaataaggtatgaggtatgcctcacagagttgctgtaaggaccaaatgaagttttatatatagaagtatgcacacacacacagagtgcctgatataggaaaagtactccatttctttttctttttttttttctgagatggagtcttgccctgtcacctagagctggagtgcaatggcttgatctcggctcactgcaacctctgactcccgggttcaagcaattatccagcctcagcctcccgagtagctgggattacaggccatcatgcccagctaatttttgtatttttagtagagacagggtttcaccatgttggccaggctggtctgaaactcctgacctcgtgatcccctcacctcggcctcccaaagtgctgggattacaggcgtgagccaccgtgcccagcccatttctaatatacataatacgtgtgggtatttgtttacgtgggggttataggctattgagaagagagggataaactgggttggagtgtggaatgtgctgggagatactgagaaagtacttcttgaatcagcctgaagaccaagctggctttagatggtctgggaggagagaggaatcccagagagatgggagaacccagcctactctgatgtaggggacatagccttaacatcttcctgccacaaaggcgctgccaccaataacaattccaccttgttaaataagaaataggccaggtgcagtggctcacgcctgtaatcccagcacttttggaggcagaggtggccagatcaggagttcgagaaggcaggagttcgagaccagctgggccaaataatcaagggtgcctgtctctacaaaaaaaaatagaaaaattagctgggcgtggtaacccacgcctgtaatcccagctactctggacgctgaggcaggagaatcacttgaacccaggaggcggaggttgtagtgagccgagattgcaccactgtactccagcctgggcaacagagctaaactctgtctcaagatagatagatagatagatagatagatagatagatagatagatagatagatagataatagaacaaataataagaatggcttacctaatgtagggctgaagactgtgtttattagctcatttcatcctcaaaacatgccatgaggtagtagtccactttcatccccattctgcagaggaagaaactgaagctcagagagcttaaataacttgcccaagatcatgtagctagtgagcagcaaaacggggcctcaaacctcagcagttttgctccagacccagggctcttaactgctgtaataaatttccactggttaatcagtgatacatttttcactctacttaacattttcccaccacctagccaaatccccagccaattgaacggaaatctcttaggaaaggtaaacttattttaaattagctaaagttaatactaaaccaatagaactttatctggattagtcacagagtaatgatttttaaccttaggggtcagggtctcccttcaaaaatctgacagtaaatagggcctctctccctaggaagatatacatcgccactcctaaaaacgtgtgcacagaatttcagggattccctgatgcccagggaggaaccctaagttatcacctctcgacctcacacttcccaaagccagataaagctcctccatgtgtaaatagtctgggggtcacactggggacccagactccccctccccagcccccgccccattagcacaaataatcaagtgtgctggggtgggaaactgttctgcccacacacatactcaaattacagactttcccttcagctgtgtgtgttttattgaatgagcacttgagttcttggtgagcctgtcgtctggggatgccaaagctttcctactgctaaggtagagcaggagcgggctgtgggcgggccctgctggagaaagccttcgcgaccagctggtattgctgctgagaagccacttccagcctaacagcccagaaaaagctagaattaacctaacccaggtcccatcctgaaacagctctgtcccatgtgttggtggaagccgaaagcatagtaaatagtctttgagtctctaggggtggcaacttgtgggaaggcaaataattggcagataaaggctggttaggagagctccttggtgtagatttcctccagtatcacctccaggcccaaacggtccaatgctgtctttagtagttaacctttgttctccctggtagaagaggaggccaggatatcttttgtctctggaaatctatgtcctgcttttaggcaaatagagggagggcagagagctttctccatctccttcttaattgtcttcagctcgacaatccttcatatttacgggaagcatattctggtctcctacatgtgcatgtgtaaataaatgacacttggcaaatattagccagtcctgaatttaggtgagggtgggtgcatggataggtatgtattctaccacatgtttaaatatcttcataagaagttagaaaaagaagacattgagggaaagctcagaggaacatgtacccacatgtgccagaaaggaagccggcaagctaccctggccacaccagggtgaacagaataaacttgttatgggctaaactgtgtcttcccataaattcatatgttgaagtcctaacccccactatctcagaatgtaaccatatttggggatggggttccgtaaaatggtaattaagttaaaatgatgttatttgggtggggcctaatttaacatgactagggtcctcataagaagaggaaatttgggctgggtgcggtggctcatgcctataatcccagcactttgggaggccgaggtgggtggatcacctgaggtcaggagttcaagaccagcctggccaacatggtgaaaccccatctctgctaaaaatacaaaaattagcagagcatggtggcaggtgcctgtaatcttagctacttgggagactgaggcaggagaatctcttgaacccgagaggcagagtttgcagtaagctgagatcgtgtcactgctctccagtctgggcaacagagcaagactgtctggaaaaaaaaaagaagaagaagaagaagaaatttggacacaaacacacatatgggggaaggtgatgtgaagacacagggagaaaacagccaaggagggaggcctacaagccaaggagggaggcctggaacggatccttcctcatagatctcagaagaaaccaaccctgctgacaccttgatcttaaacttctagcctccgcaac

SEQ ID NO: 1882747 - DNA, 4001 bp, Homo sapiens
agactggccttgaactcctgggcacaagtaatcctctggcccccacctcccaaagagctgggattacaggattgcaccaacacatcaggccctaacaaacacttcttgagctcctactaaataccaggcactataataggtgcccaggaaacagcagtgaacaaggtataagagtttctgcccttggccgggcgtggtggctcacgcctgtaatcccagcactttgggaagctgaggcaggtgaatcacctcaagtcaggagttcgagaccagcctgacaaacatggtgaaaccctgtctctactaaaagtacaaaaattagcaaggcatggttgtgcatgtctgtaatcccagctacagctactcgggaggctgaggcaggagaatcgcttcaacccaggaggcggaggttgcaatgagctgaggcgctgcactccagcctgggcaacaagagtgaaactccgtatcaaaaaaaaaaaaaaaaaaaaagtttctgccctcgcagagcttatagggtagcaggaaattgatatagcttgaacgtttgtctcttccaaatcttattgaaattgaatccctaatgttggaggtggggcctggtgggaggtgtgtgagtcatgagggcagatccctcatgaatggcttggtgccctccccaaggtaatgagtgagttctctctctactagttcacatgagagctgattgtttaaagagcctggcacctcctcccctctcccttgctccctcttctcaacaagtgacatgccggctcctccttcatcttccgccatgagaggaagcctcctgaggtcctcaccagcagatgctggtactatgcttttttttttttcctgagacagagtctcactctgacactcaggcgagagagcagtagtgtaattatggctcactgcaaccctgacatcccgggctaaagaggtctttttaccttagcctttcaagtagctgaaatcacaggcatgcatcagtgtaccatcatacttggctatttttttttttatttttagcagagacaagatcttatcatgtttcccaggctgcttttgaacttctgggctcaagcaatcctcctgcttcagcgtcccaaagtgccgggattacaggtgtgggccactgctcccagcctggcaccatgctacttgtatagtctgcaggactgtgagccaaataaactgtttttctttataaactacccagcctgaggtgtttccttacagcaatgcaaaatggactaacctaggaatcacaggccaacacttaccagactgtgatgagcacatgacaatagtacagactgggactgaaacattccccaggggcttcttgttgcatcatagagagtagggtgagacatcttggctgaggctaaagatgagcaaagatgagagtgaaagagtgatgatggaggtagggagagggattcctgaaggaccagtgaagtcccccaaggaaactgacattcctgtggctggagggtagggatttggggaggctggtgcaggataaaactgggaaggtgagcagaggccagctcttaccaggccctgtggccaaattagtttggactttgtcttaaaggcaatgggcagtcaccagcaggttttaatcaagaactattttgatccaaatttgccttttaggagaattcctctggcttcagtgaacaggccgaagtgagcaagcctaataggaagacaattggaggccctcacaataaaccagtgtaaaagagaatagggccgggcatggtggctcctgcctgtaatctcaaaactttagaagtccaaggtgggtggatggcttgagcccaggagtttgagaccagccagagcaatgtgatgaaacacatctctacaaaacacaaaaattagttgggcatgatggctcgtacctgttgtcccagctaccccagagtctgaggcagaaggatagcttgagcctgagaggttgagactgcagtgagccaagatcaaaccactgtgctccagcctgggcaacacaggaagactgtctcaaaaaaaaaaaaaaaaaagaaaagagaaaaagttcccattcttcacttattagtgccctaacattatcatgagaaccctggtgacacagtgaattcaactgtcatggtaattcagcaaccaacacgtttaataattattgattaccaattgatattgattaccaataatatcacccctgtggatacaagaaataaggaattgtgtttgtgctatcatgggagctctctggatctcagaccatgacttatgctgagaggtaaagacttgagctttttgcttttctctctgtaagtgctcaagtgcagcggtctccaattttggggggaccagggaccggttttgtggaagacagtttttccatagactaggggcagcgaaggtcagttttgggatatataaagcacattacatttattgtgcactttatttctattattattacattgtagcatataacaaaataattacataactcaccataatgtagaatgagtgggagtcttgaccttcttttcctgcaactagatggtcccatctgggggtgatgggagacaatgacagttcatcaggcattagattctcctaaggacagagcaagatagatcccttgcatgcacagttcacaatagggttcgtgctcacatgagaatctaatgttgccactgatctgacagaaggcagagatcaggtggtaatgtggggagcggctgtaaatacagatgaagcttcgctcacccacccttactcacctcctgttgtgtggcccagtacaggcctgtgacccagggatcaggggtccctgctgaagtgcatccaaaaggattcttcccacaccagtcttcatagtggtcaagtgcagcagccacttagctcccaaggcatgtgcctccactggcatttcatcacaatcaacagtaagtggtagcttgagtcattatgaggtcacttcctggaaatcaccagcatcccatttcccattggcaaggagctcagcgctgccccttggataaccaaacccatccccaaatcccagttgtctgggtctatctcccgggacccttcctagcatcaattctgtatttgtcagagtcctaacaggagacataaaccactcaaaagtttaaagtgttaaatttaaaataaaaaattattaattataacagggcaacagcataatgagagatttgctaccaaaaagtaaagagaatgctagagaatataggactagcagaggccaggcatggtggcacatgtttataatttcagcaatttgggaagccaagacaggaagattccttgaggccaggagtttgagaccagcctgggaaacacagtgagaccctgtctctacccaaacaaactaactaacaacaacaacaaaaaacctgggtgtggtggcacacacctatagtcctacgtacttaggagactgaggtgggaggattgctcgagccagggcagtcaaggctgcagtgaaccatgattttgccactgcacttcagcttgggcaacagagggagaccctgtctccaaaaagagtataggaccagctgatataacaagcagtaactgtccctactgtcccaatgctgagatactgtgatcaaggaaaagactcccccactatggctgagatccagcccccacttggagagagcacagtcatgggtaattcaatagcagaattgctgcattaccacatggtcgaacatgctagcaatctgccctctggaatttgctgaaaattcaccctctggggtgctagattaagctattaatgaacagttgtctcactacaaatccacccaggcaggtgcagagaaactgctggtcactgggtgctgctgagcaccgtgcagggcaagagcccggtactggagaagctcagtgcctgtggagattcgcacaccacaaccagaaagaaaagcctcttacaaggtccctctagtactatgtactgacaa

SEQ ID NO: 1882748 - DNA, 4001 bp, Homo sapiens
attcatctgtcgatggacacttaggttattccaaatctggactattgtgaatagtgctgcaataaacctgagaatgcaggtatcccttctgcatactgatttcatttcctttgggtctttcccccgctgtgggattgctggattgtatggtagtgctacttttaactttttgaggaacctccatgctgtcttccaaaatggctgtactagtttacattcctacacacaatgtgcaagcttcccccttccctacatccctgccaacacttgccatttgtgtttttcgtaataaccttctaacaggcgcgtggtgatatccagtggttttcatgtgcacctccctgctgacttgagaagttgtgcatctttaatgtacctgttggctgtgtgcatctcatcctttaagacgtgtctgtttggatcctttgcccattttgtaatcaggttctttgttttcttgctgcagggtagcttgagttcctcatgtattttggatgtttagcccctcaccagatggatggtttacggatattttctcattttgtggtttgcctcctcactctgtcgatcgtttcctttgcagcacacattccagttcttgcaaaagaattgtagatggtggatggttttggattttgattttattttaaaaatgagtgatatttattatataaaacattcgatgtaaaaacttgacaaaccccaggattattaaaatgatatgtaaagtagaaataagtttactgtaagtgaagcctcaagggctcgcttacaagcttttatgctttagccttttagggccatcctttccccatttcccttttcaacaaaaatgaaaatcctataaacaaaatcagcatttactttcacttgcacacgtgcacatacgcgcgcatgcacacacacacacacacactctggcatgtttcctgggtcacactgtgttacaggctgatgttttctgaattgggacggagagtggttggtatcagcctattcacattctcttggccgccgttgcacttgatgccaataggaaggagttatgagagaatgatcgaggttagtagtaggttccgggtatcaatactttttagaatttttgattgtattcggtaagtatttattgagtacctatcatagacacagccaaatagtagctgctgtgaagaatgtaaaagccatgaagccacggctgttgttctaggaggttgtaattcgttgagaaaggctatagtatagtgctaatcaaatcacattagaaccaactaagctggcttaagcccatcaacaaaataaaaagatatgaccatagaagaataatgactataaaaaaggatttttttctaatagcacattataatgttttaaaactcaacttcataatagcatacaatgtaaggatttccatagcatatcacttctatcctttcccaactctcctccacctgaaaattccacttagcacggcgggagctggtgatgccagtggaaccccaggggctggtgtttggcgttctgctctctggctggccttcatgccagcgccctgccacctgcttcctggcctgccacaccaccttgggaagaagccttctgtgcttctgactttctgcttcgtgtggctactatgtgaaacctggggtctccaggggcctgctcccacaggctcagtgagcagagggagtttcccagcctgcccatgactgcccccaccctctccctgcttctcatggggtcttcccaggtctggagtcgcaagctggtcctcatgtcttagcttgtcccatctatgctgttagctccatttaccttgggttgtgatattatttcccaatttcctgcatggtatttaatagcgaaacattagagaaaatcctgttaaaaacatagaaaaacacgaatgcctaggattcccgttattatttattactattctgaaaaatccaagcaattgcaagaacaatgtggtaactagaataaaattttaaaatggaggaaaaaaggaatcagtattttaaatattaggactgaaagttctaaaaggaatcaagttaaaaatgattgaatttgattgctggatgtgtaataactacacagatgtcaagattattactatatttgggaacaacttgtgggtaatacaatgaaagataaatcctgctatgataaatctttgtgtgatgtctaggaatgccattagccacgtctatcattttcagacctattgactgcacttttaagggccctgccgcctgtgcgttgccctggcaggggcgacctcggcgtcacatgatgcagacaccacactgctgcctggcggctctcctgcacctccctcatgtcccaaaccgatgggtcccggagcgaagtggctgacccacacctgccaccaattctctctctgctgaatttgaatgaagagacacagagactatacaggctagttcagtggtgatggtgggggggcgtggcacggaggtgaaaattcatgcagagttggtgggaaaatggaccacaacaaatcaaatccccgtgccaactaaattcacagagaagcagacacctcgagcaagccgagaagctggtctgaagagagacactcaggaccagagtggattcaccaagcagagcagagactgagacgttgtgtgtgtgttgctgggtggagggggaagaaggggagaggtggggagagagagagggacagagagagagagagaaggaggaggagggaggggagagagaggggagggagaggggagagagagagagaaagagatagagagagggagagagaagcagggggagggaggggaagagagagagagagagagagagagagagagagagagagagagagagaagagctttggccctggctatcttgttccagcccctggggtgcttgtctatattgtgtgttctgtctttgaattccttgagttccatgaggtatattctacaataaaatctctttttcttgttaatttgagtggcttttcttgtttattgaagccaaagattttcctgcctaaaataatattaagaaggaaagtatagaacatattagaggaaagcaatcatttattttaagaaaagatagaaacagaataaatggagaagcattccatgttgatgcagtgggagatgaatactatggagatggcagttttcctaaaattaattgttaggactaaaataatcaatgaaaatgggattaagcttcctcttcttcatgtttttgagattgccagaatgattttaaagttcatctgatggaataaacctaataagaaataatgctaataataacaatgaacgtttacttagtgactaccggtactagattctttttaactaatttccatgtgttcagaagagaatggccatgaataaacatgacattttaaaaaagaaagggcggtgaggagacacaaatgctacaaaatattaaagcctctataaaggtggtaatcaaacatttgtggtatctgttcaggagaataagttcaaaatcagagagtctcacaagtgctcattttgaatttatttatctttatattatgtaaaggaaaatgtcatatattctatatgttgcagttggctactaattttaaatattgtcttaaaaggtcaacttagatgctgactttattctcccaaatgaattacatttagatgaggtaaaaatgtaaaaaacatcaggccataaaaaatggaaaaatactctcatggtctcccccaaatcttctctgggccacacatttcatttcagctcagccacttttcattaattctgattcccagacttttctccattctgactacaccataaagggactttacccctcgatgaatgactttagctatcatctctcgaactgttttaaataggcaaatgtcattgaattatcactcatttgcaaaatggaaagtgacttggaggtggattatactgcaggcagaaagaccagccaggaaattactgtagtccagga

SEQ ID NO: 1882749 - DNA, 4001 bp, Homo sapiens
gtaaccttgtctttgggaatagtgaggacagagggaatgtaagagacagggtcccattttacagcagattacagtaaatctaacttttttcctattttattatttatttatttttgattgttgttgttgttgttgttgttgtttttgtttttttttttttttgagacggagtcttacactgtcacccaggctggagtgcagtgccatgatctcagctcactgcaacccccgcctcccaggtttcaagcaattcccctgcctcagcctccagagtaactgggattacaggcgtgcactatgcccggctaatttttgtttttgttttttttcaagaccgagtcttgctctgtcatctaggctggagtgcagtggcacgatctcagctcactacaatctccacctcctgggttcaagagattctcctgcctcagcctctcgagtagctgggattacaggcacacacactatgcctggctaatttttgtacttttagtagagacagggtttcaccatgttggccaggctggtctcgaacttctgacctcgtgatccgcccaccttggcctttcaaagtgctgggattacaggtgtgtgccactgtgcctggcctagggtaaatctatatataaaaaaactgatgcctggaacgggaaggagactagcaaattaaggtacagacctctcaagatctactggaggggagagtgaagtgaccagggtaagagagaagcaagctgaagccctaggaattccagaagtgggaggtgaggtggagagaggaagaccaggaagccagactagcttaaagaggaacgagttaacagaagaataagcattatgacccaacacagaatacaaatttaataagaacccattttctttattaaaaattaaagacataatggccatttattaaaagccatgtgtttggcactttttgtagtggtttcacataattctaggggcatcccactgaagaagggtttacaatcctcattctacaaatggggaagcagaggctctgaaggatctccttgtgaattgctaattagaagctctggaaattacctatgttctgactcagccacttcctcactgtgggacctggggcacgtcacttcatcttgaacccttgaaagacacctggcagctgagcgacccctctgactgggagtcacaggactctaggggttctaatgtccctccactgcactgtccccctgccccctgcattctgtcaaccttaaacaatgaagttcagaaaatgtaaataagcatagagtttatttaaacacaaagattgaggatggccatccaggaaagcgctgactccaaacaaatgatgtcagcgtttccaaggtgaagttaaggtttcaattatatagacggaggcagggacattccagcaggattacaaatgtgcatgcaagttgcatacctacaacgatgtggttggtttcagattgctacattccaaggaagattatgactgtgaggagggacaatgatctaaaggggtcttaccttggatgctacttggtcttcttaattatttacagcggaaaaaggcagaggttgcatctgcatgccacatgactcaggctgcatagccacattcctctcaaggctcgggatcatgtaaagttccagcagctttaagttgtaattcttttaagtttgatttaatttaacagttccaaaatccctgttttacaggtaaagaaactgaggccagcagcaagggcaggtctagcatccaggttccctcttaagtacctctgattctgaagcggaacctgcttacagaacatcacgggcggcttcagggtctatataagaaaaacagatgcccaagcgggaaggagactaggaggccgtgttgagaaaaccagacccagccactggccttgaagtccggatggaagcttggcgcttgcctcgcctcgtcttccttccgccctggtgctgagcggctagtccagagccggcaggatctgcgcttccggtttccgggttctccgggtgtagccgcctctgccccgggggatcccctctcctccagcaggccggggaggcctacgtgggcggcttcgttgcagccagcttgccgttgtcacggaaatctcctccggcgtctccagggaccacagcgggagaggaaatagccaccaacgagatagcgggggtctcgtgacgtcacggtagctgggcaggcttcacagcgttagcccgcgagctcagccgatccctggagtctcaggccgggggttggggttctgctacagggcgaggagtaagagtggcagtctgagagacgcagcttcgtcgcctccagggtgtcccaaggcacctcctatcaagttcctccaaaatgcacctctcccctccccctcacgtgctcctcctgaattccatttcgatgcaggcaccgctgtctactgtaagaggagcggcccttgggtgggggagagtggaagaggaactgtcgttggcagagaagacttcaggagaaatccggtccctggctttcgcttctgcagggccaggccgagtggggttcaggcagcgatgggagctcaggagaagaagggcttttcctaacgggggagggtgggaaagggaagtgccaccctggaaaactgctccactagttgcagtgtgcatggcgggaaggaggagaattggctagagctgagctgcagggagcctgaatgacaccttgtcttgctgcagatggccccaaaccctgcggtgctcttccgcaggtggtcataggacctggctcagtccagcttgaggagggtccccggaaggaagtcattcctccttcccttctcagaattaataagaaccaactatgagccaggtccttttccaaggcctggggatgcagtaatgaataagagaataaggttcctgccctcaaggagactggctctaggacgtgttaaaacttaaattccaaactctccaccccagcctctgctctggaagtgatcgtttgtactgaacaaagtgaacagattataaccagacatggccctagaaagggtatccattcttgatggtgccctgaccatatctggaaacctgctcctttgcagtgctcggggctgaggtctttgggccgcctcctgaggccccagcttggtgtccatcctgtcccatcctctctgtatgttctcttcaccttcagtttctgcttcaaggattcctccagaaagaacggggctgggctggaagtggtgtatcctaatctctcgtccccaggaaggagtacatgggcttgagacttacaaggtctcagggtttcaggcgtttggaggctgatcaagaaaaaagatagaaacactagaggcaggcacacagaagctttactgggcagtgcttggatagggatgcataagaggggaagttcctcatagcgtgagaccatccacagctttaagatgggggagccatcttccagaatgggagagtttaaggcatctcctgggggagagggtgaccagagagggggcttccctgtctaggtgatgtccctcagcagcatggcagggagtctccaaagggaagcagcagcttggggtcttataactacaaagctatgtcgtatctattgctagcaaatgtgtgtgaggttttgcagggtatgcaaagcaggcagcctctaagtggctaaaaatatgcttctttggaccattttaaaaaataactggatgtgtagaaatttgaatgtggcactggcaggcttttgagctaacaggtctcagcccatggtgaagaaattaacaacctagggacccacacacagaggccacctttggctcatcgatataacacatggactgaaggaagagagaaaggtctgctgctggccttgcctcttggcatgaccttgacccagggtcctctcggatagtacatgagggacatctcatagcaggcattcccaccctccaatgactcttaagcctgccattcaagtccttcatgatctg

SEQ ID NO: 1882750 - DNA, 4001 bp, Homo sapiens
tcggaattcctttcaccctgagtaagtttccaaagcaaaggggtcacccggtgagtgttggtgcagtcctcactgtttgtcctgcctcttgctacagaggacatctggcaaaagcagatcagaaaatgaaagaagtctgtcccagttctgccctccccaggtggtagaatttctcatgcgattgttgcttggggtgtgtcactctgtacttgagtaggtggagggtgaacagactgatcagctggctatgagatgagagcaggatgatgatcattcactgggatgtgtctggccaactgggaagagtcaggtagctcaaggcctggagattctcatcagggagagcacaatggggccaggcctatagctgaggtccaggcacagaggctgggctatgagaaccagtgtcctcagtgactgcgacaatgacatgtcctctgtcaccacctgctaccgtgaggccccagccccggctgacctgtagactcagatctgggcctgagagggaggcttgacttcagcccctctcatgaacagaatccacagcaccagggctgagagtggtggcagggcccaggaacagtgatatccagtagaataagtgtgacccaccccagccccccacaaaccagagggagtgctgagcacctccgcccagcctcaggcagctgacttcactaaaggaggccaaaaggaaagaaaaatgtgacaagtgtgttttgatggctgatgcgcaggctcccagagaaccttcagaaatcaggtgggagttggaaagatttttgaattgtcctcctgcaatagcatgttgaagaaaaactagctaaatatactttatgtgtaattccatgtccatatgcatgatttcttaggtggcaaccaaaggcaaggagttcctgtgcaaatggtattgccaatattaaggttctcaatacagtatatattttgttgtattcatttgctagggctgccagaacaaagttccacaaattggttgccttaaacaacaaaaatgcattgtctcacaatttctggaggacagaagtctaagatcaaggtgttggcagtgttgttccttctaaaggctgaaggagaatctgttgcaggcctctctccttggcttgaggacaaccatcttctctctgtgtctcttcccatcatcttccctccaggcatgtctgggtccaaatttcccctttttattattttttatgtatttattaattttttttttgagatggagtttcactcttgttgcccagcctggagtgcaatggcgcaatctcggctcactgcaacctctgcctcccgggttcaagcgattctgctgccttagcctcccaagtagctgggattacaggtgcctgccaccatgcccagctatttttttttcttgtatttttagtagagatagggtttctccatgttggccagactggtcttgaactcctgacctcaggtgatccacccacctcggcctcccaaagtgctgggattacaggcatgagccaccatgcccagccaaatctcctcttctttataaggacaccggtcatattggatgagtcatattggattacatgcccactctactctagtataacctcattttaatttgatcacattttcaaaaaccctgtttccaaatgcagttgcattctgaggtactaggggttaggacttggacatagacattttgggggacacaattcaacccttatttgccaaatcactttttagaatgattaaggcaattaatgatcttcttaaagtgaagaaacaacccacagaatgggagaaaatatttgcaaactacccatctgacaaggaattaataaccagaatatataaggagctcaaacaactcaacaggaaaacatctagtaatccaatcagaaatcaaaatctagtaatccaaataaaaaatcagaaatgaatagatatttctcaaaagaagacttacaaatggcaaacaggcatatgaaaaggtggtcatcgtcactgatcatcagagaaatgcaaatcaaaactacaatgagatatctcaccccagttaaaatggcttttatccaaaagacaggcaataacaaatgctggtgaggatgtggagaaaagggaacactagtatattgttagtgggaatgtaaattagtacaaccactatggagaacagttgggaggttcctcaaaaaactaaaaatagaactagcatatgatccagcaatcccagtgctgggtctatacccaaaaggaaggaaatcagtatattgaagagatatctgcactcccatgtttgttgcagcactgttcacaatagctaagacttagaagcaaatttacagtccatcaacagatgaacagataaagaaaatgtggtacatatacacaatggagtactattcagccataaaaagaatgagatcctgtcatttgcaacaacatggatggaacgaaactggaggacattatgttaagtgaaataagccaggcacagaaagacaaacatcacatgttctcacttatttgtgggatctaaaaatcgaaaccattgaaatcatggacatagagaataggaaggatgattaccagaggctgaaaaggatagtagaggactggggagataaggtgggaatggttcatgggtaccaaaaaaaaaaatagaagaatgaataatacctactatttgatagcacgacagggagactatagtcaataataatttaagtgtacattttaaaataattaaaagtataattggattgtttataccacaaagaataaatgcttgagggtatggataccccattcttcatgatgtgcctatttcacattgcatgcctgtattaaaacatcccacgtaccccataaatatatacccctactgtgtacccacaaaaattaaaaataaaaaattttttaatcttgtcaacagtgtattaggacattgtgttgttgcaatttccttagcatcaagttccgtctttaaaaaaaaaaaaaaaaagcttactgataggtttttagagcctggtaattcattcttttttgttttttgtttttgctccgttgcccagcctggagtgcagtggcacaatctgggctcactgcaacctccgccccctgggttcaagcaattcttctgcctcagcctcccaagtagctgggattttaggtgccagccaccacacccggctaatttttgtatttttagtagagatgaggttttgccatgttggccaggctggtctcaaactcctgacctcaggggatccacccgcttcagcctcccaaagtgctgggattacaggcatgagccactgtgcccggtcggtaattcattcttaagtaaactggccatatatgaattggccatttgagttctttcacaaaatataagactatttccccccttacagtagctattgttgaataagatgccaagaaggacagccagcaatagagaatcagtgcacagatgcactggcaggattaccgggtacatctccacctcactaacaccttctagaggtcaccatgagcgtggtgggaagcaatttagaatcagaagcacaggggttcaaatcccagctctgggactttctaaatgtgctctttttccaactttttgaagcctgtattatcttatacgaaaaatcttatcctcttcacccaacttttcaaggattaaaaaatcctcacatggcatattgctgcaccacactctgtggtgcattatggatgtccagtaaggtgcatggaccctaaagctgctctgaggaccagattctccccatggagtaaacaggccacaggttgttaagggaaccagatgctcgtgaacaacagaccattcatatggattagcgagtttctgcaaggaagaagagggcttgatcatctcattatttgtttcatgtgtcagaattgaatcacagtggagcattcattgacctaaaattaaattacttgtcatattttttattcaaccatttcctcctttcctt

SEQ ID NO: 1882751 - DNA, 4001 bp, Homo sapiens
catgtagagtacagataacacagttgtaaatttggaggacaggaatcactgagctggtggataagacagcctcatggtaagaagcaaaggagaagtcagtctccgagaaggcgtaagtgcagtcaggcgagggaagcaggaggcctcccgggaacctggctggctcactgtcccaaacatgttagcttcgtgctgtgaggacgcttgcaacaaccacatcagcgggcatccacaatggtgtgggataggaaccccactctcgcaaatggggggcatccgcaacagtgtgggataggaaccccgctcccgcaaagcgggggcatccgccatggtgtgggataggaaccccgctcccgcaaaggataattcacggaactggggaagtttcgacaggaaagaaaagatcttcctgtgttttcaggagagagaatgagaagcagcccatattaactattcaagtatgttgaaaagttgttactaggaaaagattattattgtccttgtcctgtaaccagaggaagaattaggacctgtggatacaaaccgcagggagagaggtttcagtgtggaaaatagaagctgtttcttgcaattagagctgaacaaaaataaatgggctgctcaagaagaagtgagctctccatcattggaggtgccaaaactaggtggcagaggcaggtgcaatgctgcattagcccagaaggccaagcatccacgtatcacacggaagacccagatcatctcaagaattcatcctgtccatgatttcgtaaaacagggtcatctcaaccccactgccaattcatgtgacccatccacttggtggcacctctgtaaccacccaagtcttcacacagagcccttgatattgtgagcctacagcttaagaaaacggatacaggtataatataattaccttttctgttgttttttcctcagatatgatggggtcaaggaaatggcaagttcctatggtcagcccttcttctggtaggatttttcctccactaggatgggtctgaatcggggatgaaagcgacttcgcttctgaaaatccagagcctttttaaagtaagccttcataaggaaaactgcgattgtccagtcgatggtttgttaacacacagaccccaggagactgaccaccaggctgggaagtgtaacggcaatgattgagggcgtcagacgtcctctgccaccaggtagggtgaggtcctcacaagatggaagccaagttgtcagcttaacagaaggaaagacgccctccatcttccaccattaaggtctccagcgttcaccttcttggcaggaaataatcattgaaagttatttctgaaatgttggtttgacatttaaagtagtaactggcatcttctgaaatatatttctggtcttttgggacttcatcattttcctgtgaagcttgacctttcaaatccagtgaacaaaagtcctgagatttgtaatgcatcacacctgtgacactttgtcacccatcagcatttttggcgttggcattttccgagtttgcctgatttctgaagaccatgcagataacaggttcagctcccagattctcactgcacgcaaccaaaagaaaaagctgcaatatcatttcagctcctttagatgagacgtgaactgcagttcttcaggctctccaaaccaacagctggctgcacagcagactgatggcgccaacggtgatggagacctcaggcagctgtagggccagatgcccggggaaggacgtcctgggacggtccctcttggtggagttgggaaaagaagcaagagtccatcccctgtgagaacaaagggttagagactgaggaaacctgggacacagcagcccaggggcatagccatctcactgacacactggctccctccagcagacactccgcaagggtgtcctggacacaccggctccctccagcaggcactccgcaagggcgtgcgggtcctggaaacccctccctgtaccaactaacatctcatttcagcaatcagatgtcccagattctaacacaatattaaaatacagaaagtaccacccgcttgccctcttaggagacccctagaaagctctggaaagcccagggctgagcggcaaagccaggaagaagagacaccaacagctggacaaacaaatccgctaacaagcattggaatcgcaggctcagagccagatggccttagagaccttcctagcagttttcaggctgatagaacattttgttcaaataaaattgaatgtggaccccggtttatagaatagacttgttggcctgattgatggaggatgaaagccccctgacttagtccagcccaggagggagaccctcagaaagcaatttgaaacaactgcatctggtccaccctcttttcacctcaaagaaacagccccaggaggccacgggacctgccgagcatgaagtctggcaggccacgtaagcttcacagggcaggtctgcagaccctggccctcagcagccggaaccagcacatctactgttttggtttatgtgctgtcagccaagaaagctgtttcgtgatgattactaattacgagcttggattttctcgccagctggttatggagcaattattacggtgcctgcctcacagggccttataaggattaaagtaagtgtgtgtgagctccagaggggaagccactggaaagaccccctcactgtcagcgcttgacccctctgcacccgccctccctggcatagctgggtcctctgtctctgcacctgccctccctggcatagctgggtcctctgtctctgcacccgccctccctggcatagctgggtcctctgtctctgcacctgccctccctggcaaagctgcgtcctctgtctctgtgcctgcctggccctctcgcctggcccctctgcacccgccctccatggtatagctgggtcctccgtctctgcgcccgccctccccagcgtggctgggtcctctgtctctgcgcccgccggccctttctcttctcaggctcctctttgtctcatctcgtcattcccatcttttgctctttctcacgtctgttgtatgtttgttccatttaccatttatctatctttcactgttaatcaattttaaatacaaataacattttgtttccttaaaacatttaaatttcactgttttacatttaagtgaacacaatctatccacctccatggtcaaggtcgttcagaagcaaactctgtcctcccacctgacccctctgaaggccgtggactcacacgcgagggtccccgtgcctgactgtgcagcgctgactctttcccgggcccctgagcaggccacgtgtgaggctgactcatcaggagccctagacacacgcctggagccctagacacatgccaggagccctacctgccctgagcacctggcccaggccacatagcccacacaggtggcaggactcctttcctccgtttgatctaacttggtttttccatgtctttctgggcaaaatgaagacaaaaccaatcgccaccaacctccctctgtggcgggaaggagtcgcaagtgtgggtgtgatgacactcaaaggagaacctcaggagcccagataaagccagcagcgcgcgggaggccgtcctcttcctgaggaagccggcagcgcgcgggaggccgtcctcttcctgaggaagccggcagcgcgcgggaggccgtcctcttcctgaggaagccggcagcgcgcgggaggccgtcctcttcctgtggaagccggcagcgcgcgggaggccgtcctcttcctgaggaagccggcagcgcgcgggaggccgtcctcttcctgaggaaaccggcagcgcgcgggaggccgtcctcttcctgaggaagcaggcagcgcgcgggaggccgtcctcttcctgaggaaaccggcagcgcgcgggaggccgtcctcttcctgaggaaaccggcagcaggcgggaggccgtcctcttcctgaggaagcaggcagcgcgcgggag

SEQ ID NO: 1882752 - DNA, 4001 bp, Homo sapiens
ccatcatcaacaaggtgtttgaggagaagtacgtggagctggaccccagcaaagtggaagttaaggatgtagggtgaggccgggggtaactccgggggggtgcggggcgcagcggcagcgggttgggatcaggccctgtcagcatgtgtgtttgtgcttctgcccacccgtgtattgtcccctgtgtccgtgtcccggctgctgtgagagccactgttcctgtcgtggccctggcgctgaccgtgacctcctctgccaacccgccccgttccacgcaggtgttccgggctgcaccgcccgcagaccgaggccgaggtgctggagcagagcgcgcagacgctgcgcgcccacctgggggccctgctgagcgcgctcagccgctcggttcccgcgtgccccgccgtggtgcgcgccaccttccgccagctcttccggcgcgtgcgcgagcgcttccccggcgcccagcacgaggtgcgccctccacccgctgggctaggctgggccgggttggactgggctggggcgaggggcgggcgaagagcggtggggaaccagggagcgctggggaggaccagggaggctgtgtcccggcgagggtcagggacggagcctaaggggagggggctgccaggagccctggtctgggggactccagcccgcgctcttccgcacccctccagaatgtaccgttcatcgccgtcaccagcttcctgtgcctgcgcttcttctctcccgccatcatgtcgcccaagctcttccacctgcgggagcgccacgcggacgcccgcaccagccgcaccctgctcctgttggccaaggtgcgggccttgcggccacgggcgggatgcacagctgggtgtcctaccggggccctggcctggactgcagagtgttccctaccggctccggcgaggccactggcacgcccacgtaggcactgcacttcacagtttgcaaagccttcctgtggccaccttgtccgagttccatctcatggataagggaacaggcctgcgaggggtcgggggttgccaaggccgcccatcctgtcggtggtgaatcgcgggaccttccaacccaggtctgcttactctcaggctgcacctatgtgcccggcaccggggtggggtatccagtgcagcagcgtcagttaaacctacagaggaaggcccaagtggtctcagttatcataaggcatcaaacttcatgatcctctcctccctgatccctagtggggctggagggggcccgtgggcatggcctctgtcgcctctgcctccatcgctacagctgagtagcaaagacttggggagggggggtgggagggggtgcagtggctaggcccctaacctagcagaacctggtccttcctgctgtcacctccaggcagtccagaacgtgggcaacatggacacgccggcttccagggccaaggaggcttggatggagccgctgcagcccaccgtgcgccagggcgtggcgcagctgaaggacttcatcaccaagctcgtggacatcgaggagaaggacggtgagcgccgccctgcacagacccgcccacagcctactgctgacgtttgctccgcccttgagccccacggccccacccaccgctgtttgttcctctcgtggccccacccaccgcctgctgttgacatttgccaggcccccaggccatagacccacgcaccactgtttgtgcttcctgtgaccctgcccactgcctgctgttgacgtttgccccacccctagacccatggcctcacctcccatcatctgtgcctgttgacatttgctccatccttgagctccatagccccgccgccacctgctactgacgcgtgtcccgcctccaagcccatggccctgccttcctcagtccacctgtcaccccgctcaccaccagctgttgatgtttgctccgcccttgagccccatgactacgtccactgcctgctgttcagatttgctcagcccttgagccccatggccccgcccactgctccgccccccccccccagtcccgccctcattccctgggctctctattcccctccctccctggcctggcagagctggacctgcagcggacgctgagtttgcaggcgccacctgtgaaggaggggccactcttcatccacaggaccaagggcaagggccccctcatgtcctcctccttcaagaagctctacttctccctcactaccgaggccctcagcttcgcgaagacgcccagctccaaggtgggtaaggagggaggccggcaagtggggctctgagaggccggcaagtggggcaccttagaggcacctgtccccttccttggagcccacttgaggtacccccggggtcagagaagaaagccaggtgtgtggcatctgtactgcttgtcagaacctaggagggccgggcacggtggctcacgcctgtaatcccaggactttgggaggccaaggcgggtggatcacttgaggttaggagtttgagaccagcctggccaacatggagaaaccccgtctctactaaaaatacaaaaaatcagccgggtgtggtggtgggtgcctgtagtcccagctactcgggagcctgaggcacgggaatcgcttgaacccgggaggcagaagttgcagtgagccgagatcgtgccactgcactccaacctgggcaacagagcaagactccgtctcaaaaaaaaaaatgaatatggaggaagttgatccgaccttaccaggttgttgaggattaaatgagatgatctccctaagggtcctgacccagggcctggcaggtagtactatttaggcaaatggtattattaaagatagtacatcacctgggctgctagatgagtaggaggctagggcaaacaggggaggcttcctggaacgggcaggaatatagaagcatggaatcttggtgtgggaggggatctcaaagatcaccttgtacagccctctctgagtcatgggtcacctctcctgcaagctctcttctcccaggaagggctgaggacatacttcctccatggacctggtgactgcttgctgtacacctgcccctagtcatgcaggctatggggatgatcttccaggagtacccagcctagccctgggcaggtgagagcaggctaggagtaggtgaaggagctcatcacccaccctgttctcaaccagctcaggggtcccaccagatgaggggcccgccccttccgaccaaagacccctcagatgatgataattattttttgagacagggtcttgctctgtcacccagactgtagtgcagtggtgcgatcatagctgactgcagcctcaaactcctgggctcaagcaatcttcctgcctcagcctcctgagtagctgggactacaggcacgtgccaccaagcccagctaattttctttaacattttttttttgcagagatggggtcttgctatgctgcccaggctgttctcaaactcctggcctcaggcaatcctcctgccccagcctcccaaagcactcagatgattattatacatcttccttgccagggttgaaagatttgactacatgggcattatttaattctggtcccatttttttttttttttttgagatggagtttcacttttgttgccccggccagagtgcaatggtgcgatcttggctcaccgcaacctccgcctcccgggttcaagcgattctcctgcctcagcctcccaagtagctgggattacaggcatgcaccaccatgcccggctaattttgtatttttagtagacacggagtttctccatgtttgtcaggctggtctcgaactcccaacctcaggtgatccgccttcctcggcctcccaaaatgctgggattacatgtgtgagccactgcgcccggtcaggatatgactgttagagcttgggactacaaaagcaagttggaaaattaataaatgcaaagtcacaaagccttggccacggctggattgactttgtagcccagggaatgctggctgtccagac

SEQ ID NO: 1882753 - DNA, 4001 bp, Homo sapiens
tacccaggaaggcagggcctggctgtccccaccagcaccccagacacccacctcagcccaaagaatggctcagagccacgctttctaggccatgaaaggagaggggccctttccctcgtgaccccagagcagatggcagaatacagtctaggaggaagttccaggaggaacatgagaaacctcacaagcctcgtgcagtttagtttctgataaccacttctctttctttgtctcatgtttcccttccttcgtgaagttcctagaaagtgtaaatttttccttacctttaattttttctttaatttttctttaccttttttttaagttgccatctaatctgcccttgaaatgctctattctgtgccagttgtccatttcaagatggagtcacttgtttcaaacccaagcaaagtagagtcaggagcctaagaagggagggtcctcatgcacatgcgcctacaataacaacgattacagccaaacacagtggctcacacctatggtcccagctacttgtgaggctgaggcgggaggatcactggagcccaggagttgagcccaggctacagtaaactatgatcacgttgctgcactccagcctgggcaacaaggcaagaccccatttctaaaaagaaaaggaaaaaaaaggactattacaaagactctctgaaggctgtgacacacatatgcctgtaataaggactatttccaagggccttcccaactgcagcctgccacaggagtcactggacggccggccacatgttggagcactctcacctcacatgccatctccactaagaatctgacctcaactcctgtgcccaagtaaccaatgttctctttgttcaaaaacaactcaacaactcctgtgcactcctccttttgcctttatttttttgagaccaagtttcgctcttattgccgaggctagagtgcaatggtacgatcttgactcattgcaacctctgcctcccaagttcaagcgattctcctgcctcagcctcccaggtagctgggattacaggcatgtgccatcatgcccagctaattttgtattttcagtagaaatggggtttcaccatgtttatcatgctggtcttgaactccggacctcaagtgatccacccgactcagcctcccaaagtgctgggattataggcgtgagtcaccacacccagtcttccttgtgcccttaaaagcttccccttgcctcagcctcctggatgcgcccatggctgctgtggcacgggcactccgcatcacaatcatgctgctcatttccaaataaattcatcatctttggagaatcgcttctgtttgttatttaggttgataattcttcaaaaaaaaaagtctatgacttcagtgacaaagagggaagctgggaggtcgggaggaaggtgtgttaggaagaatgtgtctgactctgtggttagttggggtggggacccttcagcctcctgagtaggagcggcaggcctgggaacaggggagtctccttcctaggtcctattgcctaggcccacatgatgcctacctgaggcatatgcacaaagaaaaagtccttaaaattttgtttttctctagaacaacctacagtcctagggacagacacaccatcctcctaagtcctatcacaccctggaaaattgtaacaaaaaggtgacagtctccttggggcattgcctgcagccttagctaggggccatcctagttatctcaattactcatccaatttgtgatcagccctaagttctggctcactctagctctctccttcgacttcctcatctcccaaatggaagtgactaccccgacctaccaggctgttgtgggaaccgaacgatgtggcagagagtccagctcagcttcctaccgttccacgagggccactgaaaggccagtcctcttcagcctgcaatgagagagattgaaagtggaagcaggtctaagctcacagaatcaggaagaaggtagaatgctgaatacacttcttcctccaatcccaaatgctagaactgtgtttctatcgaagttttgtcatcgactttttagaatcagaaaaatgattaagaaacatgagctgagatatgcaggttccttgagcaaataggattttgtacagcagacacctcctggtgtctcatttcctgagatccccaaagtgagagataagaaagctgtggccgcagcagagacttgaaacagtgaccagagaccaactcttccacaggaaggtgtctgcacagaagactcacaggggcagctgacaaagatctgtctatagcctggtccacaataaagatcaggggttggacagggtgagacacccaacacggtggctggagccaccccctgtaactatcaacaaacttgcagcccaaggtcgagcacaaataagtgggcacagaaagacacttcaggacacgagctacagagaggcagccacctggccatcctccagctgcctgaggtttgcagatgcccttgatgccaccccctatccctcccaagcactctcctctccgtgcacacagatgcttaacaagagcacctatgactctccacagaccagagcaccagggacacagtgcccctgggagatgctgccaccaaggccagatggaaagaacacccctgtgttcttgctccatggttggcatctgagacgtacctgccagggttccccagcaggatcaagctcagtggcccaaagtggaaatgaacttaccagtcatcctccagtggcctcctctctttctcactttcccactcccccaccagggtttctcgggatccactctcaaataaactacttgcccttgaatccttaattcagggggagtcaaaacaaagacgaccaatcagagacaaatattaaccataatgatgtctattactcagataggattgaaatcaactcagaagggcaggaatgtgtgaaatcttctccctttcccttctctgctgagtaattgactctcatgccctagagccttctctacccctctgtaagcacgtggattcaaaactgaatgtccaagttcaaacccaactccccacaacccaacgttcccaagtcatctagggaaatttgcttcacctcttcaagtctccatttctccaatgttaagacaggagagtctcagacagttcacagcgaccaacccacccctactcggccaccacccacataacatcttactgggagatttctcccattgagttcaagttcatagctggagaatatggaaactgcacactcaccatggaagataacaccaagaagtctttgtctttcctgtcttctgctttcatcatctgccccctcccaccagactgtgtttctccatgacaccctgtagtttggccacagccaagcggatctgaagaccattgcctccagaagttggcatgacgattctaagttctccaggtgggagaaggagggggatttacttatgtttttaaatgttctaggacttgtgtgtcctgttgaactccaagatctgtggaaaagggagtcacaagaaagacaaaattctcatagtccagcttcacaggcacagaagggcctcagcaccaccatggagcaggcccagacacagggctgaagtgggagctggagtctccccagcacctaagcaaagcctctcttccccacagctcaaggttccaacagcccctccttctcactccttttcccccttcaagtcttccaagtatgcactccagactggtgttggtattgagtgtgggccgatgaagggagagtggggtgacagagttggtctgtcccttttcaataactgccaagaggactgttgatgttctctctagaatgtgaggtacttgactgtcctcgactttgaatagaatattcaaagtgggaatacaagctttcccactcaaaagctaattacacctaggaaagaaaatcaacggtattttttataagcagtatacaaaatagttgcctaattttcttcttttcctta

SEQ ID NO: 1882754 - DNA, 4001 bp, Homo sapiens
ttgccaagtatatttgggataaccataagaaataccattataaaatctcagaagggaggtaggacttctggaatagccaaggaaatgcactcctccatgatgacaatgaaaatacttggaaaattatcaaaatcattttcttcaaaactttggaagttaaccaaaggtttacaacaatctaaagggcattaattcaagaaaagctgctgaacctctataagaacagcaaagtctgtggtgttttaacttgttctattccccacttttctctctccagctccatggtacccttgaaaacaagcaattccccaacgaaacaggggcacaggctgcgtttgcagctctggtaaaagctccatacccagagcagtgtctcccagctccctggtgaagtcttacgtatacatggggtgctggcacaggtgcctccagataagtctcctaggccatctagtagttcctaagtctgggcgcttgcaaagagcttgcaattcatcaagggttgagttgcacaatggggcttttagatgtgctgctgaggaagtgattgcctgcatttaatcgtcttctgatgaatgctagagaaactgatctagagtggcacctcttggttagaacgagctgaagcatactgtatatatttacttctttaaaaaatttcatataaaggaatagaatactaaaaagaaaaaaaaacaaaaaaggtcacaatattccataattccatcactcctaccaattaactgaagtaaaaaaaccctctcaagtctctccctttgcttgtcaagccctgctgcagagaggtaagctctgttcagaatttactttgtgtcctggattttttcctatgctcatagagacaggattagctggccatcttgctttctgtgctatcttttctagacatgtaaaataatacatttgaaatacttgttttaatggtattttataataaagcagcttttaataacttttctcttttccagccgtctttgtggcaattttacattggtaagatttagtttcagttcgaaatatttaaaaacatttgaattaaaaattgccatcactctttgcatacagtaaaacaataacttctggctatatttgtagaacatctttatgtacgccattttatacatatattttgcttttttacaaacctcatatgtgaaacagcatttacaaaatagatgcattgggggaatagtaacttatgaattaaaatattttggctttaccaaataattcaccacgtttttaaaaatatctagcttttctagtgtattttgcatgtgtagttcatttaaaaccctcctttgttttatggtaattatatgttgctagtgaaataacttttttttttttttttgagacagtcttgctctgtctcccaggctggagtgcagtggcgcgatcttgactcattgcaacctatgcctcccaggctcaagtgattctcgtgcctcagccttctgagtagctgggattacaggtatgcgccaccacacccagccaatttgttgtatttttagtggagatgaggtttcaccgtgttggccaggttggtgtcaaactcctggcctcaaatgatccacctgccttggcctcccaaagtgttgggattacaggcatgagccaccacgctcagctagtgaaataactttggtgataaagttttagtaacacccgccaattggaagtcaggtaaaaaagaagataaagattctgcagtggttatacagagttaaatggctttgactctttcagtgtgcaaggctgtgtacattattttacaaaagtgtttataaaaatttgtaaaataatatttccctctggaatattttatttttacctgtgctcagcgatttctacccttggaaggtatgagatctgcccctatgttctattgatacagtgctgctctagacatttagtctgcagggagattttggtattagaactgaggctgcaatgctagggaatattcctgcagtttttggtaccctggcatatgtcctacatgtaaagaagggttagtggaaaacagggttaatacatggaactttgctttattttcaacttcactggaaagtactgactacataagttagctatagcataattgttgaccacagctaattttgtttatcacatatgctcctttcttcactgcctacagctgctgagtttcactactaaaaggtcttcaagtacacacctgtattctttggcgcttgaaagttgatcctttatgtgatattatacttattgtaagtctgttttgatctaaagtaattttatttaaaattatattctgaacccttttcaacagttacggaggtatttcccaaggctggtacattagaatcacttgaaacttaaaaaacaaacactaacctgcctctgttctgatttagaggcctgggatggaaggaagggtgaaacaagccacaagaattttagatatacaattaagttggttttttttttttgagacagagtcttactctgtcgcccaggctggagtgcagtggcatgatctctgctcactgcaacctccgcctgctgggttcaagcaattcttctgcctcagcctccctagcagccaggattacagacatgcactaccatggctggctaatttttgtatttttagtagagacagggtttcaccatgttggccaggctggtctcaaactcctgacctcaagtgatctgcccgcctcgggctcccaaagtgctgggattacaggcatgagccaacgcacccggcaacaattaagtttaaaaaccactgagttaaggaatttcaggtgtgtgccatactgcattataaatgcctaaaaacatacgagttagtaagcaaattataaaaacaatattataacaatttattgtttccttttttatggctttcttacttatcgcttattttaatgttggttttgaaacttgttcttattgtaatatgatacttcattgcactgtttcataagctataacccaggtttattatttaaatagtaaagtgtttgagattatttttctgttacttcattatctctcaccctttcctaatgcagacttctttttaagataatgaagatgaattatagtagctgaggaaggaggacaaagaaagcactgaagaagtgataaaggggaatgaaatgagatgttatcagaaattgctttttctttggctacagttgggaggtcccatgttttactgggtcttttactgatgatgattattatttggttctcttttgatttcaagataatctcttttaagagatgacttttgatataatttttaaatatttttctgtttttcgatacttaatctttaaaatggagttttctgccatacacatctcacataattattgtgaggagtaaatgggatagcgaataccaaaattgtgcaattttacatttagaagacaccacaaccgtccatcttccagatctgctcccagctggtcgggggcctactgaagcattgaagctgactctcctcactctagccattgctttttgtttaaattatggtgaaatttagatttaagtttgtaatagaaaaatgtcaatggttatcatttaagcgtacaattcagtgacattaagtacattcgtgttgtcttgcaactattaccactgtccacatccagaactttttgctatcccaaacagaaactccacccactaaacactaatcacactcagctctattttctatctctatgattttgcctatgccaggcccctccgtcactgctttttaattttcatccctatattgcccctataaagtttcaaagcattggatacattaacatatgtatgacatttgaacattttaaagagaatatttaatatttccctaaatatagacttttgcatattagatatcctttaattattgtattgctttatcctcctaagcagaaaggaaaattctttatgaactcatattttgccaatcaactatgagg

SEQ ID NO: 1882755 - DNA, 4001 bp, Homo sapiens
gctgcccagttctcattatgtctcttcaagctaccgcaatcagttaacacaaggcatcctgcccttctccacttagctcatataaaaatccacaatggatacaaacagccccaaataagaaatggacacgaaacattaacttataacataatgggtttatatttaatatagtacttctcatcaggaggatgttactcagttaatataaagttttttttcaaaacattaaatctcttttccatgtcaatgtctatagtttttttttaacattaaatttttttccgcatttcagtattagatacactgaatacatttttctaaatgttttttccctagagataaaagttttcctttttgcctgactctctgatatctaaatataatattaacttgggagacaacaaaacaaaaatctaatttaaaagactcctcaacgattcaggaggcagtgattataaccgaacagtggtgatttcctaagattctgggcaagaacttccttcttcctatttcacatgctttgagagaattctaagattatgaaatattacttatgtaaatttcagccatcttacttctttgactacctaactagcaaattataggctgcatttttctgtgcattatttgttgtaaagaaaacatttttttttcaatttataaatgtatgtttgttgccatttcatggaaacaatgaaaaatgtgaaactcccttatttactgattcttggaacctttcacacaccaaatctcaggtttagcctctaaagcgcaaaggttttcagggtgaggtttgactcagtaggcctttcaaagtcacatctgtccatttctttttcgtgcatatacccccaagcaggcacaaatgcctgtaatgctgagaaccacacctaacaaaagggcgattgcatcaccggcttctactgcttccacaacaggcagcaccaaaagcagtgacatgaggactaaggacaactgtgttgaaactgaggtcatgatgttggaatcttgagggctgaaggttcctagaaattaaacatggaaacaaaaaggaaccattaaaaattcctcccttttcaaatgacaaaatgaacacatgacaaataacaggccagccaatcttttggatactttatgaatcatttccaatccatctcctcatcttataggtggaaaaacagagggacgttaaagacagtaatttgaggttcatctccctatctcgtgataacactctaaacccaggaattttccacgataatgccaacacctcgtgcatcaaccaaacaaaaattgaacaggagttcataattaagaacaaacagaaaaaaagcacgagccactaacttggaaacttaaaatatcctagtgggtaaaaattgtacattttcttagggtctctcccatccaagaaatgcagacaaatttggcaaaagtcacacaacatataactctgcgaagttgtggggaattaataagacttaccaaagaaatggtatatatagaattctatctgacttgaaattttcccttcctggagctccggatgctgagattaagaggttccacgtgacacgacctattattagcatggggggtggggagggggcggagagaaggatttaaaaattaattattattactattattattttaaagaggcagctagagtcagtgcagagcgtggaggccatatggacggtagggggataggtaatgagttgagaaaagtctgtccaacagggaactagacttaaaagttggtcagttcacccacacaagaaaaggtaaaaagaaacagaacagagataatttcatttcaggacttgatattaagatttgaaaaagaattcgtactttggcccggcaaggtccaaatttgctcctgttttacaaatacactggtgcaacctaagtatcctttggagacgagttcgtacattaccttctaggaagcagccattacaggaatggcgaggagggcggagtctccaaactacatttcccacaatccctgccgccgccgactcctatgatgccccggcgcgttccccctataagtagcagagggcgtgacggtcacgctctagcggaggcgaagagtcgcgaacgcgcgggacttcctttccctgcccaacgttttactattaaatagatggtttcgtgtgtttatataaaagctcacttcaaaataaaagaaatgatagcaagtgttttctaccctgttgagtctgtaaggcgcacatgtaattttgtctttttcttcgactgaaatgacacagcggggagagagaacccaagtacagccctctgttccgggtgcttttaaaccagtggcttccaacgtttctgaagcaggaaatctctgtcaccatcttcctaatgaaacatatgccatttattaattttttagtcaatggggaaaaagcgcggttaataagacatatcgtaaaaggttaaaaaacatttgtagtgcaaaataaagtttaggaaaaatgggtttagccctgttgcagaagatctctcaggattcaggtcctaaagtgacaatctattcaggagtgcactgcggtgattccttcccacctatgtttttgtgaaacctcagccccaaatgtccctacatatttgtgaaaagatgtaaaaatactgcttttaaatcataaaacaagaattagttatttgtatatgtaagtcgtaacctttctgaaaggcgctctttcaattgtctgctaattgtgaactccttactgaacctttctagtcatctgatcttctgaactctttcatatttactgatttgaaaatttatttgctatccttacattataaattattaatgatgagggttgggtgtgaagccacctgcctggtctgaaagtcccctggttcagtctgttagataatgcaggtacgttcagttcaatgccaataattagcatgtattcttgtgttgtcggttaccctttttcttacacgttcctagtctctctagcaaagatttatattcttggctcctaaccggcacccagcaggtgctcagtaatgttgcctaataataataatgatttgactagataaatatgccaacaagatcttatgagagaccgagaggtgccaaataaaccaaaccaaggtgactagaaaattggaaatctgagaataactgcacaataacgtcagcattgtttctctaaccttgattattttaacaaggttttgttcatttcatcctttgttttgagctactttcgtgcctttgtaatcaattatatttggaataggagttatatttttatagcttccaaaatattctctcatatcctactgtgaacattttgtttttccctacatgtttatttttccttatgtgtttattttagttagctgaagtcagcagagactactttaaagttagtattgttacagacttgtttctaggcacgtcaacattaaagataatggtttggttttaagtttaaagagtctgtaagtggcaagaaactttctctttaaattatgatggtttttattagtttgtgaaatatatattatattgggaaatgtcgatctcgggggcggggttccagtaatagctgatgtagttgcaaggattaatttctggagtaccatgaatatgataatctccttcactgctttgacctgctcctactgtgtgatttttaacatgccttcactctatctcagtgaactgttatttcctagctgtaaaccaggttagatattttggctagattgctgaccaggataataactgccatgttgtacatgtttggtctctcttctaaaaaaggcgatgatagatgagaagctgcttctgtgtccgtcatctgccaactacaagttctgcctgtgaacatctctggtagcaatgtgaaccaccaattttctgaagcaatgctacactcccatttttcccaagctgtatgaatgtttctacaggcttctatgtagttgttcttttgacactaagtgtctag

SEQ ID NO: 1882756 - DNA, 4001 bp, Homo sapiens
taaactgttctagcaaattattaaacccaagaagacagttatgggaacccctgatttgtaacaggtcggtcaaaagtacaggtgacaacttaggacttgccattggcatctgaagtgaggatggtctcgtgggactgagcccctaacttgtggggtctgtgctaactcgagatagtgtcagaataaagtcatgggatacccagttaatatccagagcactgaagaatctggtgtagaaactccatacacacattcagtcggaagtgtgtgagtagagacaaacatgggcttttctgtcacctgtctacctgcttaactgcataggagaggcaatacgtggtgctcatgaacaaagcaaacattaaagtcagaccagacccaacatctgactcagtcttaatatccaggtgagcttgggcaaatcattcattattcctaaggcttcatcactccattcataaaatggggataactgtggcacctacctgtgattctgtgagaattaatgaaatattatgcttggggttattgtgatcattatacctattccaaactatttgacaaggacagtgatggatgatgacatcaaaaaatcagaaactgcaatgaggtctctcaggcaaaattccacacaagcaaattactgtctctacaaagcattcctgccacacttaattcaccattccctgaacaaaatatgccatcttcgttgttcaggtctgtacagtgctggtttcccttcccgggcagtttgctccatcccatcccagcccattccccatccctccacctcccccttccctccccactctcatacaactcttcctcatctttcaggacttggcttcaatgtcaccttaactggaagcttctctcactctccagaagagcttcccattgcacttgatgcatgcactattatttgatcatttttgagttacagtccaaatctttttgtacctgaataacatgttgctcagtcagtctctcttcctggattcagaggtctttcatggtagatccagctggaagtgacaaaaagacatcttttgacataaagggatgacacagacagacataagttcttaaacatcttaaatgttatgtgaaaattaaacagaattcaaagacttaggagggaaagttactgcgaatgtcataaagggttaatttgcattttattttattttattttttgagacagtctcattctgtcacctaggctggagtgcagtggtgcaatcaggctcactgcagccttgaccacctgggctcaagtaatctcacttaatttttttttggtttaagaaagtcttggttgagggtggtggcttatgcctgtaatctcagcactttgggaggctgagagaggtatattacttgaggccaagagtttgagatcagcctgggcaatatattaagaccctgcctctaccaaaaaacagagtgaatgtgtggaagacaatttttccacagactgggagtgagggaataatttcaggatgattcaagtgcattacatatattgtgcactttatttctattattactacatagtaatatataatgaaatgattctacaactcactataacgtagactcagtgggatctctgagcttgttttcctgcaactagactgtccatctggggtgatgggaaacagtaacagaatatcaggcattagattctcataaggagtacacaacctagatccctcacatgcacacttcacaacagtttgtgcttctatgagaataatgctgctgctgatctgacaggacatggagctcaggtggtcatgcaagcgatgggaggggctagaaatacagatgaagtttcccttcactcgcctgctgctcacctccagctctgtggccctgtggttggagaccgctgctcaagtgcattcgaaaggatccatcccatgccattcttcagagtcatctttactgctgcagtggtcaacttgtagcacccctaagctcgcaggacaggtgcttcaactggcatttcatcacaatcaacagtatgtggtagcctgagtaattttgaggtcacttactggaaatcaccagcatcccatatcccattagcaaggagctcagcactgctccttggataaccaaacctattcccaaatcccatctgtgtgcgtctatctcctggtacccttcctagcatcaattctgtatttgcaggagtccaatcaggagacacaaaccactccaaagtttaaactagaatgagcaaggtggctcacacctgtaatcccagcactttgggaggccaaggtgggtggactgctttgagctcaggagtttgagaacagtctgggaaacatggcgaaacctcgtctctacaaaaaacacaaaaatcagctgggtgtggtggcacttacctgtaatcccagctactcgggaggctgaggcaggagaattgcttgagcctggcaggtggaggctgcagtgagcagaggttatgccactgtactccagcctgggtgacagtgtgagacccggtatcaaaaagaaaaaaatgtatatatatgtaaatttaatataaaaagtattaattttggccaggcacaatggctcatgcctgtaatcccagcactttgggaggccaaggcagatcacctgaggtcaggagtttgagaccagcctgaccagcatggagaaaccccatctctactaaaaatacaaaattagctgggcatggtggcacatgcctgtaatcccaattactcgggaggctgaggcaggagaatcgcttgaacccggcaggtggaggttgcgctgagccgagatagcgccattgcactccagcctgggcaacaagagtgaaactccatctcgaaaagaaaaaaaggtattaatttttacagaggattagcacaatgagggacacgctagcacaaagtaaagacaactctagagaatacagaactagcagaggccaggcattatggctcatgcctgtaatcccagcaatttgggaagcctaggcaggaggatcgcttgaggccaggagttggagaccaatcagcgcaaaatagtgagactctgtgtctaccaaaaaaagaaacattagccaggtgtggtggtggtgcacacccgtagttccagctacttgggagtctggggtgggagaatcccttgagcctgggaagcctacactacagtgagccaagattgtgccactgcactccagcctggacgacagagtgagaccctgtcttagaaagaaaaaagaaaagaaagtgttaatccccctatgggaatctcctcttctcctgccctctctggaacctcacttgtcagttcttcctcccactttcctgtatctttaacctatcccctacttttagctccttcccatcatcatttaaattactcaaacttcttctgttttaaaaacctctccctaaactcagtgagaggtctcctacacacccattgagccatctgctctccctggtgccttctctacagcagcctgagccatgtctctaatccattaatctcatcatgttactcccccatttacatcacttctccttgcctcagggattaagtccaaacccttcaacagcccctgctctgccctgccttgcaaggcagcctcattgcttgcccctctccatttcatctgctatggagtccaactgagcctcatctgccctttgaacacacactctttctcctctgggagtctctgaagtgggtgatatcctctgcttataatacgcttccccttaaacctctactctcttcctagctagcttcgactctgtcacttgtccgctttggcatcacctcctcatggaagacttctttgactccccagattctcaggagcatggcaggtgaggtgctcctcccatgaatggatggagattagggagtgtgtgttattcatgcttaattcaccagtgcttagctgagtacctggcataaaatactgtggtggccaaagtaataacccccacccccaccaattg

SEQ ID NO: 1882757 - DNA, 4001 bp, Homo sapiens
tatagatctatagagatctccatagatctatatatctatacatacatctatatagatctatagatatctctatagatctatatatctatacatttatctagatatataggtatctatatatatctatacatatatctatatagacctatatatagatatctatagatatatacttatatagacctagatatagatatctatatatctatatctttatatatctatatatatatatagatatagattttttttttttgagacggagtctcgctctgttgcccaggctggagtgcagtggcacaatcactgcaacctccgcctcccgggttcaagaaattttcccgtctcagcctcccaagcagctgggactgcaggcacccgccaccacgcccaggctcatttttgtacttttagtagagagtgggtttcaccatattggtcaggatagtttccaactcctgacctcaggtgatccgcctgcctcggcctcccaaagtgctgggattacatgcgtgacccacagcacccggccatattttctttctattttttgtaaataaaaaaacatacgtctgtacattccgtacatagtaatattttattttcttcccaatgtggtaactaaaatacatttaaacgaaggctagaatttaaaacaaaattcttttactgataagcacacttgcaaagtaatgaaaatgttacatgcattgctttgcatataaacgtccaagaagtatttgttgaccaaatgtctgaaaatgaagtatttttatctgttccgaaacgccataatattgcaaagaagcatttcaaattattgttgtgtgaaatgttcaaatttagcattcaaatttagcgttttcccacattttacccttcaatttacacaatttggaagaagagtagatgagttggtcattgttacttaaaacaatgcgtcaccttgttagggaaagaaattaacataatggtcaaggagtgataattaaacagaacatgacatttgctgtccattcaatgttaaagttctaagcaaattagcatggagaaaagggatgggtagaaataataacagagcactagttgattagtccgcctccacatccacgctgcaggcgttggacagatccggctttactgagtccaccatgcagggaaatggacgcgcgggctaagcggaatcccaggggcgcgatcgcaccggctggcgttccagcaaaccctgcatcccaggccctggattcaggctgccttctgagtctttgacttattttcctttgcctggaaacagaacgccgcggtccgtaccggagagggagaaagtgcaggacgacccgccgggaagacccgagcgcgtgcgccttccccgcggctccacgggcacaaaacggtggctccggagctcctagacccaggcagccccagctgcgcgcgcgcctccccccgagcgcggccgggctcccgcgggaaacaagcgaccgcggcacgcgtgggcgcggcgggtgggtgccggcgccaggttcctcccggctccccactgcggatcctcgcggctcctcccggctccgcccagcggctcaccccgcggacggggatccctccgcccaccgccggcccttccgcgccaagtagtgcgaccccggcccccgcagcttccgccaacccaggctcgcgaggacgagtccacggtcgcgggcgagaaggagcgacgcagagacggccgggggcgcggggcagtcccgaggttttccccgcgaggccgcggggggtctcccagtggccagggagagagcgcgcccaggtccgcggaaccacggctcctgccgcggcgagcgggccgggagtctacggtcggggcagagccgcccgggaagccgcgcgaggacggcggccggcggccggcggcggaggcaggtgtcccgaggcctgccccacccccactaccgcgggcaggaagaggaaggagccgcggccgtgcctggcgggcgggggtgcccgacccgcggagcgcgtgacctagttcgtcccaaagtggatttgacaggttgtcagctccactccccgcccccaccgccttccgggtctccctcctctcggggggaggcccaccgcccgcggtcctcggctcggcctcccattggctctctcgccgcctggcgccccgccctctcggtatcacccttccattggcttgggaccccgcccctgcccctaactcaccctcccactggcttcgtgccgcctggcaccccgcctcagcccagaggacccggcccgccctcccattggcctcgcaccgcctaattccccgccctcgccccggcccgccctcccattggcgtcgtttcgcctagtgccccgccctcgccccggcccgccctcccattggcctcgagccgcctggcgccccgccccttccgcgggccccgctcccagcgcagcccggctctctgcttgtctgcgggttcctgcgggcgttcctcagtgtctgccttcttccttccctcttgagtgttgctcctcttcctctccttttttccatgtctctcctttttctgatctcctcccgtttcggcagcccgagcgctcttgcccggttgcaccccgcagcctgagctgggctcccggtgccggctgcctgagctccaggacctgccctggggccccctacaaccttcccgccgctcccggaacctgacccctctgtgcttcacttctcggttttcttccctgaaataagcagcagcgaatcccttctccaggttttctcatgtgttcagtctgcaaggcttctccctttctccaccctgcgcctcggtttctcccccgcttccccgccctccctaaactcagccaagtggaacagatctcccagcaaaacaaggcagagggcgaggataaaaatgataaatgtcaatatcaacatttttattgctttaggtttttaaaacagaaaattagcaggaacgcccagatcgacccagacctaggatcaagatggagtttcttaaagtaccaagtgagactgcagtgacaaagtcgattatcccagcaatataatcagctttgcctggggaatttacttttactttgtttttatttgtttgtttgctttgagatggagtctcgctctgtcgcccaggctagagtgcagtggcgcgatctcagctcactgcaacctccgtctcctgggttcaagcaattctcctgcctcagcctcccaaatagctgggagtacaggcgcccaccaccatgcccagctaatttttgcatttttagtagagacggggtttctccatgttggtcaggctggtctcgaattcctgacctcaggtgatccgcccgcttcgacctcccaaagtgctgggattacaggcgtgagccactgcgcccggcctacttttagtttatgcagtattctggcgatttaaagtttgtattttttttttaattttctgagctcgttttgtaaatggctgctcttgaacgtaaggataaattgactgatgaggctgaggtttggagccaatccccgcacaaggcatttggcatcaaacacgagaaacccttggctattcaaatgaggaaactcaagtaactttcccagggtcactaaagtcggagacctcaaacgtggacccaggtcaggctccagaggtccaccaggacgacccatcatggctcatgaatgtatccgtaaaaatggcagaactgctctttccagctgccttcctacctatcatgggggtcctaaccgagctccccatcatgacattcaaggcctaccttataggatccctgccttacaggagcagtttcagtgcagcaggcacactgaccacctttctgccaagacctttttgccagagggcctttgcacttgaatttctttagacttttcgcctggcttagctcgtctgtcaccttggggaggcatttttctttctttctttgtttctttctcctttttttttttttgaaacggagtcttgccctgt

SEQ ID NO: 1882758 - DNA, 4001 bp, Homo sapiens
caatttttcaatggacagggcaaggggatggttttggcatgaaactcttccacctcagattatcaggcattagttagattctcataaggagagcacaacctagatccctcacacgtgcacttcacaattgggttctcacacctatgagaatctaatgcggccactgatctgacaggaggctgagctcagctatgatgttcactggcccatcactcacctcctgcaggtgcggccgatcaggggccgggattggggacctctatcttagagggttttaggcgaatcctaaatagtgtgtctccactaatatttgttaagtttatgcttaacatagcaagactgatatttgtgacagcccatagacacatctgctctcttaagatgtacaatgtttcacaggaattttaaggggtgttcttgtttatatatttggcagttgtgtaaactttggtcctaggaatagagagagatatgagtctccagggacagcaaaaacaatcaaatggtaaagaagagaggccatattttctttaacacccttaattccatccttatctctgctcttgggtgcttatacagcacattatttgtaactgtagtcactctaaattatcccttactgcctctttgatgaggaagaatgattaacacaatggaatgttggaaggtttaaagtctacacctcatctttcctggtatccttgaatttactagtcaggaggagttaaaatatagtcatctttaaaaaaatctctccccttttcacttcacagttctttattttatccatatactcttaagtgcaactgcattttcttttgccttaacagttaaagaatcccacagggaatgatcataggctactctggttttcaatttggggaaaccctatactttaacttgaataaaataacaaagtcctccaaactaatatgtgatttctgcccagagctctgaaagtcaaagtaaagaaattcaataaagtgagggtaacagggagtaaagatgactttcaaggtagccaaatgcctcaccatctaaataatgacgcccatcaatgaacaaacaagattcccactgtcccatctcctatccagtgaaacacagccaacttgataatttgtgcagggaaagactctgtttagcttataccttgaacctaagggaaattaaattgcacattttctgttcctggctaatcttctgaataatgtactgaacacagtaggagttaagaattaaaaatacctgtctgcagtttcagaaacaatcacacacaaaatatttgtttatttccagactgatgaaagactgaatttttggtctcatgtatttactgtattgtttcatatatttatctatatgctttggctgtattaacttgttgaaatagtttgtggttctttatatttagcttttataaataattgaaaatctaatgaatgcttacttaataaccaatctaaactggggacttcaaacatagggagtcaagtaatctggttgtgtaataaataagcaagttgttatctttcaggctgagggcatatcaaccaagctaaaagacgtgtgtgtattaaaaaaaaaaaaaagtctaccaaaccaccatatgatatccaaggttaactatataggaggtctaataacattcagaaggtgctagatgaatataccaaaaacatgcggaattaaatgatgaaaattatttactggcattaggacggaatttttaatgtcaaattttaaaaatggcccattaaagtcccagctcatgacatctaagtatctgaagacccactactattcctttttctttttctgagactgttactctgtcacccagggtggagtgcagtggcataatctcggcccactgcaacctctgcccctcgggttaaagcaattttcatgcctcagcctcctgagtagctacgattacaggtgtgtgccaccacacccagctaattcttacatttttagcagagacagggtttcaccatgttggccacgctggtctcatgacctcacgtgctccacctgtgtcagcctcccaaggtgctgggattacaggcctgagccaccacagcgagccagatctgctattcttttaagttactagtattaagtgatgcttctactcttgagttgcacctcaggatctcaagttattggtttgacctttagggaaaacagtaaccgtaataaaaagatcacaatgtctaaacatcttgcagtaattcattgtaaaagtagtagggtgaactcttactatgcttaaaataacagttgatagcccccctccacctttttaaaagatgcttatggctgggtgtggtggctcacacctgtaatcccagcactcttgagaggccgaggtgggcggatcacctgaggtcaggagttcgagaccagcttagccaacatactgaaaccccatctatactaaaaatacaaaaattagctgggtgtggtgacacaaacctgtaatcccagctactggggaggctgaggcaggagaaatgcttgaactcgggaggcaaagactgcagtgagccgagatcttgccagtgcattccagcctgggtgatagagcaagactttttctcaaaaaaaaaaaaaaaagatgcttatattaagtggggtgggggaaggagggatgtatagaagttggttaaatggtacaacagtaaagttagaaggagtaagttctactattttacagtacagtaggaaaattatagttaataatttatattgtatatttcaaaatagccagatttgtaatgttcccaacacaaagatgtttgaggtgatagctattccaactaccctgatttgatcattacacatggtatacaattatgaaaatatcacatgtgcccctaaaacatgcacaaatattatctatatcaataaaaagaaagaagtaaagtgttacattaagtggggagtttagaaataaagccttctcaggctgggcacggtggttcacgcctgtaatcccagcactttgggaggccaagcgggcagatcacaaggtcagcagatcaagaccattctggctaatacggtgaaaccccgtctctactaaaaaagaaataaagccttctctctctcaacaaatctaaacactcctaagaagagatactttctgggctaacaagactttacctgtttgacaagaaaagtttaggccatcagaatattctaattttcttaaaaagaaaaatcctctttcagcggtaggtaggtaagataaactcctagagttctgtaatttggtcacttttttttttggtttaggatttaatgtttgaaaaacacttctgctagagaggttctgcttttgacttcttaaaagaactaaaaccggccttaaagtttatgctgtaaacagaaaagctaaaatgggtattagacagtataactgagtttactcatagctaggcttcaaagtgcctgatttcaaggtgacttggaaatttactttgtgtctgcccctcatttaaaaaataaagaagccaagaagctggtttatttcaatctttaggcaactcctctaggccaatgattttacaatctaacattcatttattattctaagaattatgtatattattaataatatacacaagggtcaaatttatttgaatgtggaattttaaatacaggtgacccttgaacaacatgggtttaaaatgtacaagtccacttatacacaaattttcttctgcctctgccacccctgagaaagacccctcctcttcctcagcctactcaacgagattgaatacctttatgatccactcctacttaatgaacagtaaatatatttttttttcctcatcattgcaacctttgcttcccaggttcaagtaattctcctgcctcagcctcccgagtagctgagattacaggcgccaaccactatgcctggctaatttttatgtatttttagtagagacggggtttcaccatgttagctaggctggtcttgaact

SEQ ID NO: 1882759 - DNA, 4001 bp, Homo sapiens
agaagaagagaatcacacctcttaggtgctgggtgcagtgtaatgtcactatctttctgaaggcagggcccaggcacatgagtcatacctattaggttcttggcccaggtatatggcacaattttgtttgtgaactggacccagtctgcagagtcaaatcactcacatgttggacaaaggtatatgtgacaataacactgtggaaaggtccagtgataagtttcaccatcctgcacatatcttgactcccagtaaaagattcatcattgtgcttataatttggacacagatatatggcacaatacaacctgtggagagggagagaccagaaaagacacatcacttgggtgctggtccagagatatgtcacaatcccccttgtaggcagtaccctggcagaagagtcacatcacctggctgttgggcccagtgatatatcaaaatcccccctgtaggcagagcttaggcaggaaaggagactcgcttcacttaagttattagcctagacaggtgtcacagtggcccccatgggcacagccaaggcaggagagtgacatcaccttggccctgggctcagcaatgggtcacaatctctccagtgggcaggaaccaggcaagagaggagaatcacatcacctagatgctaggctaagtgataggttccaacgcttcctgtaggaagaactcagtcaggagagtcacattatgtgggtgcagtacccagctaaatgtcacaatgcactctaagcacagagccaaagcagtagaatgaagtcacatcacctacataatgaacccagaaataagtcacaatgctctttgtaggcaggtaccaggcaggagagtcacagcacctgggtggttgctggtcacactgaaatgtaaaaatgcccttggcaggcagggcccaggaaggagtttcacattatttaggtgggtggtccaggtatatgtcacaattttatctgtgggctgggcctgggaaagagtcagatcactcaggttctgggcaaaggtatatttcccaatcacacacttgggaatgtacagaaatgagtttcacagtttcacacgagtcctggcttcatgtatgagaggcaacccctcctgtgagtggggttcaagtaaaggagttacagtctcaacaatgcacaaaatccatgcacaacagccccaatctcacctgcagattgtgttctgatagggaactcacagcctcacaggtctgctgaatcatggtttgagagtcaccaaaccacctggaaaccagatccacatatgagagtaacaaatccaacttgcaactgtttttatgtgtgagattaagtgcctcattcgtaggctctgtttatgtgtaagaatgaagagcctgtcggctgggtctgcatacgagagtcacaatctcagctgttagctaggccctgttagaaactctctgtatcgctctagggcttcctgtgatcatcctgagtgttgtaatgttctgtgaactttatacatgtaagagatccaggacattacctgtggcctaagcctggctacagaaatcaaaatatctcccactggctgtgtccaggtaagagagtcattcttgtgcctctgagctggacccaggtatatgccacaattttacatttggacaggaacaaggcattaaagtcacatcacctgggtgctagacccagtgatatgtcacaatgcccactgtactcagggcacaggcaggagagtcacatcatctgagttcttggttgagcaatatgtcacaatcccttctgtatgtagaacccaggctgcaagaagagtcacattacctaggtgctgagcctggcaatatgtcacaatgctccctgctagcggggcccaggaaagagcacagagtcataccacatacctgactggcccagaaatttgtcataatcttcactgggacagaacacaggaagaaaaggagagtcacattacctaggttataggcccagtgatatgtcacagtccctactgagaccagggtccagaaatgagagaaaagccataccacttctgtgatgtgcccagagataggtcacaatgacccctttgggcttgcccacacaggcgatgagagtcacatcacttaggtaataaacccagagacatatcacaatttcccctgaaggcagggaaaatttcccagagtcatgtcacaatttcccctgaagacaggagagtcacaccacctaggttcttggcccagcaatatgtcacaatcccttctaagtgcacaagcagcgaagaagagtcacataacttaggtattgggcccagcaatatgtcacaattcccaatggaggccaagatgaggcaagaaagtagagtcacatcacataggtgaaaagtccaaagatatgttacaatgcaccctgtggtaaggcccaggctggagagttacatcacctaggtacttgatccaggtatatgtcacagtcccaactgttggctgggcccaagcaaattagtaaaataaattaggtgctgtgtgaaagtatacgccacaatcacacctgcgggaaggaccaggaataaatttcacagttctacatatttcccagctttaggtctgacagtcaacacctcttgtgagttgcatccaaatacacgagacacagtcttaacattggacaggatccgtccatgagagctctatctccactgcaaacagtgttcccataagataggcacagcctcaccagggtgctgaatcttggtctcagagtcactatcctacctgttgaccagatgcatgtacgtgagtcaaactttcaacttttcattgcctctgggcgtgagattcagaacctcaacagtgagctgtgtctatatgggagagtgaccatccttattgttggctgggtatgcataggagattcacaatttcctctgtgtttctggctgtgttatgacactctctgtaccatctgagattttcacataatatgcttgagagtggaattctgctctgtgaactttgtttgtatggctctaagatcttacctgttaccctaagcccaggcagaagtcaacacattttctcttgcctgggtccaggtatgagagtcatcaccatgtttgtgagctgggtccagaaatgagtcacaatcttacctgtggtcagatctgcatatgacagtcacaatttcaactgtgaaccctgtccacaaggcaaagtcaggacctcactaatgggatctgtccatgtgtgtgggtgacaattcttactgtcagctggctgtgcatatgagaataagtctcaactttgtattgggctgtgttgacactctctgtaccaccatagggcattatgctgtatgcatgagtgttgtgattttttgtgacatttgtgtgtgtagaaaaacccagaatcatccccatttcctaatcctaacaatgagagtcaacatctcttctactagcttggtccaagtataagagacaacactgtgcctgtgagttagtcaagaaatgacttccccttcgacctgtggccaaatccacatatgacagtaacaattccaactgtggtctgcatccatatgtgaggtttataacctcaccagtgggttgtgtctaggtttaagaatgataataccattgttggctggatgtgcctatgagagtcacaaactcacctgcttgttggactgtgttatgacacagctcataccacccaaaggctttataaaatatttgtgtcataatctcctgtgacattttataagaaaacccagaacttcacccacctcggctgggtgtggtagctcagagctgaggaagatggatcgcctgaggtcaggagttcaagaccagcctggataatatggtgaaaccctgtctctactaaaaatacagaaaattagccaggcatggtggcgagtgcctgtagtcccagctactctggaggctgaggcagaagaatcactcgaacctgggaggcagtggtcgcagtgagctgcagtcgtgcc

SEQ ID NO: 1882760 - DNA, 4001 bp, Homo sapiens
ctgggcactgagacctcacctgtgccctttgccatcacaggtcattgtgagccaatcactgaatcattagtgagaagtggccggtttcaagttctcagtctgggtcatgagcgttaagaaggaaggacaacgccaaatcataactggtcaaattgggtttgccactgtaggtccaggagttaggtgaggacagtgcaaaatggcaaagcccctgggaaagtgcctgagcagctccgatatgggaaaagggcatggacgtcttcgtgagcctctagaaagcgctacgcttggtgctgttaataggtgttttacctactgttacctcatttcgtactcataaccgcccccctccatgaatatgcccacactaggactgaggaatcttaggttagaaaagtcccagaatcctcaaaagaacaagacacagtccttgctttccaggccccaacactcgagtgaaggggttgcagctgacatgtgtgagctgggcacataaatcacaggcccgagtgccaaggcccccacagccaggtccactggtgatggtcacccactgcctgactggtttaacgagcactgagacaacaacccattcctgcagaattctggtaactttgcaatggaggcctaagcactatggccagcctgtccggtccactcaatcccttcacagctgagacccctgtggttctctgaccggcgtccacctaaggctcgcctggcagaggcacctgctttggaggactcctaagaggagtgtcataccatttctgaaaaccgcaccccaggacacctccttactgtcacatttaacctctgatggtaaacccccaaatttgaagagcaaatacaaccctaactctctgcttagttattggaagtccctattcaaaaaaaaacaaaaaaaaaaacaaaaaaccctctaccaaaaggagaagaaactcagcacccaatcttaaatttctatactggctctttcgcatttctctgacacatgccagcttaaacccaaactgaatgcaaaactcacattttgcaaactaaaactactgaaaagataacctgcccacctcctcctcagacaggccgcctcctttcccttgggtctctagcccatttctcctcctttaggattcctttaggctttgcattctcttcccaggaccaaaagagtcccctgtaaacctactatcctttcttttctgtttttttcataactagtgagggcacaaatggttaaagcaacgcgctgacaggaagccagcacccaattcaaggacagcctcttgcaagggcctggcccacccatcatccctgactctgaacagtgctctctgttcagcagtgctgatagtgaaattaattatcttccagcccagccgagaagctggggttgccacatggatgtgtctccagtcacttaccacacagggacttactcatcacaagtgctaagggtcttgaaaggatgcacattcctgagcaatatttgttcctatgctcatttgattttggaaaaaccaggcttcccccccggaagaaaggcaagtgagagaaagaagagcaagcttttgctaaaataaatgggaggaagaatccaattcaacttttcctcgtttcacggtttactctctgctttccattagggagttgaagagggactgccccttcacctgtttgtctctgtgacctcagacaaatccagttgacgacgacaaagcaccttctttgtccttatcatcagttaatttaaagggtgcatgtttactaacagcttaatctatttggtgcaaacactctttcacattcttttcctccatcaaaaacaaaaccccaaaaccttccaaaaactcacatggaaacttcccaagtctgaagtcggcctggatggcagcatcatagctacagaaatcttagccgctcaaccatgtctcagtcggttcatgagccttcctttccccgtgaaatgtcaggaccagaagctcgcattttgagtggctagtctcaacttttacaactctgcacactgcaaacactgaagtagcaatgagagctccctttgacccaaagaaactccttcctctgagaatcaaccgagaggaaatcaacttttatgtttcacacacacaaaagttgacaataaacttaattagacttggtatcttaaataagccaacaactgctggtaacttcacaaacagaatgaaccaagtttactttccttgagttattacctagctgtatcaggaaacatttgtttctaccaaagtaatcacttgcatgggagttttaacatcagttgcaagagaagtatggcataattttaatactgtacttgcttgtattttattttaaatacagagtaatatttcaaattgaatttaactataaaacttccataaaataaaaatgcatgatctcataaaatcaaatcagtctttaattgtaataataaaaattacatttaagtaatggtgtctctgagttaatagctccataaaatcgcccctgaaaagccaatctttgctacctgagtgactctttctttaacattctgcaattaaaagacaaagttctgccatgactcacgatgtgtctgccgtggaactcctattgggagtgaatttccaactgagctcgccagtgagtagtgaagggaatgtcggagcaaaggcgcattacctgggcccagaagattccactctccacgttttaactacaaaccacagaaaaagggcaacatgaaaccaggaaactttttaagaaaattctaaaatagctcccatctagagataaagtaatttttttttccagtgcacaccaggaataacatttccccagtgttatacaccattactactcatttgtggattgggggatttataaggatgatgtccatttttttaatgcatcttgaagtaaggcaagaggagattccaccttacaaatgcattttatttctaagaaaggcttcgtctgttcctttacatcttccaggtaacagacatcaagaaacacagcaccgcggacttagcacccaggcacacgttcgcatgttcctatttatttcacatgtgctgacctcctatcctgatgaggcctcaggtcccctgaagacagggactgtgtattttatcttccccatgcatttgctctaggactggatcttcaacacgtacaagcgggtgcggggagcgaggccctgaaaatcttcaccagcatcgacgcaacaggccaaagccaagctggtcttcagcatcagcctccaaaggccccccctcgtctccccagccttcgcctcctcccacgttccctccaccaatgcaccggggcttcctcagcctggaagtcgcctgcggacttatgactcacacagaattaggaatccagtcccatcaggcaattcccagctctccaagcccatgcgatgcctgtggatggggcagctgctgagctccctagggctgcggccacacactctcgtctgccagaaacctgctttaatctcagggttgtccacctacacacaagcctgattctagtaagtccctgacaaggaacctctgttaacttccttcacctgcagaataaagtggacccgccaaagcctccccaaggtctattgcttcctgttcctctcctctcactctccctcttcctagccttccccttggcctcatgtagaagattttttcctactttgaaataagtgacttaggccagagagtgccacggcttctgagttactctctaccctcaccccggccaccagcgctggagccacagccctgcatctgagctctgtggccgaatgcacagccacctggccaagactgccggccacacaccccagcctccatcacccgcacccacactggcagaggctgcccacgagcaggcccctggggcttccaagactaggactgtgagggatcattttactcataaacaggacaggataatacttgtatttttaaaagtgttttacgcactgcgtgaag

SEQ ID NO: 1882761 - DNA, 4001 bp, Homo sapiens
atcttaggcttagagtctccagctaggctcttgctgggaaaacagtgcagtctttgctttcttttatatcagagctgcattttcaaacgtaaccatcccacacccactctccagctattcgaggactttgatgacagccctccagtttctcaggatgtaacagcagcaaatcactgtgcactttctcacttgctgcccatgatcccccatgctccaaccaccgggcaggcccatattgggcatgaaaggatcttggccttaatttttcttttgcctcgtggcgataaagggagcattttgtttttttcaaaagacaaaaccaaaaggtgcatcttaattagggaacaggtgcagtgagaccagactgaactctgccaggcagcagcctttcactttgtgcgcacaatgcttttaatgcagccccgttgccatggcgattaccatgtctcagcttactgaggtggcgttgcaaacctgtagggaagaaatggattattcaataaatgatgccgggacatttggttagctatttggaaggaaataaaattagctctttccttcacaccatacattaatataaattccagaggacctaaagaattaaatgtaagaaagggaaatcattaaaaagcaaacaaatgtttgatcttgggggtacatggaaacattttaaacctaaaagcagtagaaaaaataacaaagattaaggtagaatttaatacataaaatttaaatctccttgttttaaaaattatttagttaattttattgggagactacaaaaaagaataaaatggttgcaagaaatatgacaaaagattaatacctctaatatgtaaaaagtaattacaaatcaataaaaatgaacagtccaatagaaaaatagtgaatgagaaatgcccaaaagatgaaataaaaatatgtaataaaatatttttaaatattcagcttcattggtcatcaaagaaatgcccattaaaacatcaatgagattttctcctatagcttatcaaagaacgtttaaatataattatagcattcaatctcattgagtggagtaaaattgagtattcctattcatctcacatgtgaaaatacaagttggtataaaatttctaggaaaaaaattaagtttatgccacaagagattttaaaatgttcacactattcagctggtaatttcactccgaagatatcctaaggtgctgtccaggattgaagccaaaaatgtagatatgataatattcattataagtatttaatagaagtttataatttactaaaacacgtgggcatggttaaataaattatgatacataaatatgatgaactattgtgcagccattaaaataatattttgaataatacttaatggcatggaaatatgtctatgacataatattaagcggaaaatagtataccatttgggtttcttagctgacagcaatagaaacccactctggctgtctggataaagcagaaaaggaattcattggaagaaaattgtagggcttggaatcaacaggaacacaggagaactaaactgagaaagaaagaaaaatagagaaagaaatagaggaagagagagaaagcaaggaaatatagagaaaagaaagagagaaagaagaatgaaggaaagaaccaaggaaggaaggaaaggagcaaaaaggcaaaacagggcaaacatccatcaacagctatagttacggtaccaaagtagacatatggtatgatcccaagtcaaggcaaaattggctattcagaaataccaaattcatcccggaatctcagtgcttcaacccttgcaatgtttccttcttactcacacaaagtaagtacttaccaggttgggcagcctgtcaccatcttgtagcccagccattgaaagaacgtaggctctgagactgtcacaacagggaagacagagatggaggagtctccatgcgagtgatgctgtcatttctgttcacagtccattgggcagcactagtcatatggcccccaacctcactgcaatggaggctgggataaagaaggcagtgagccagttgaggctgcaatttgaaacacatggtacacttaatttaggataatttgaggaagatttaatttcaaggagactattttcaaaggtgtgggtgggctgcagaagaaccagaagggagaatgggagaatgtgatgagctagggctattaacagcccaaagagacgagggtcagattggattttcaaaatctcaactatatgctgtttataagcagcacattttgaataaaagatcactatagaagatttgaagcatacagttatccagcttcacccaatggacaatatatagaacacacgcctaccaattgcataatatgtgctcttttaaagtgtacatggaacattttccaaaatagaccatatgcctagccataaataaatctcaacaaatttcaaatgattaaaataataaaatatgttttctgactacattgaaattaaactagaaactaataacaaaaaaaaatagaaaatatcccaaacccttggaaataatccacattcttttagataattcaatatgtcaaagaagaaatcacaacataaattataaattcatggaaataaaaatgtaacgtataaaatttgtgggatgcagttagcacagctcttctaagaatatttacaactttaaatgaatatgttagaaaagaaaaaaggtagaaaatgaatgatctatgctttaatctcaagatgctaaagaaaaaacagcatatttagaaaaaggagaaggaaaactaaaggaaataataaagataatggcagaaatgaataaaatcaaaagcaaatgtatagagaaaatttaaaagccacacatcgattaagattaataaaactgataaatacttagcaggctggatcaagaaaaagaaatgagaaaacataaattagccatgccaggagacatcactacagatccccaagactttcatgatacagcaaaaggatattgtcaacagctttatgccaataatttaaaaatttagatgaaatggccgggtgcagcagctcacacctgtaatcccagcactttggaaagccaaggtgggcagatcacaaggtcaggagatcgagaccatcctggctaacatggtgaaaccccgtctctactaaaaatacaaaaaattagccaggcatgatggcgggcccctgtagtcccagctactcgggaggctgaggcaggagaatggcatgaacccaggaggcagagcttgcagtgagccgagatcatgccactgcactccagcctgggcgacagagtgagactctgtctcaaaaaaaaaaaaaaaattagatgaaatggataaattcattgaaaaatacaatgtactaaaatcattataagaaaaaataaaaaattgatatacttttatatctgctaaagaaattgaattcataattagaaacattcccacaaagaaaactccagcctcagattgcttaagtgatgaattctaccaaacattcaaggaaactcatagagacagacagacagatagtagattagtggttgccagcggctgggaagtatttgcttattctagacatgttatatcaatggaatcatacaatatgtggtcttttgtgtctggcttctttcatttagcatattttaaagattcacccatgttaaaaacaaataaataaaattttattcatttttatggctgcataatattctaccatatagataaaccagattttgtttatccattcctcagttgattgacgtttgggctctttctactttttgactattatgaataatgctactatgtacatttttgtacacgtttttgtgttgacacatgtttttgcttttcatggatagctatcttagagtggaatggcagggccatttggtaactctctgtttagctttttgaaacactgccagactattttccaaagtggctgcaccattttacaattccaccatcaatgtatgagg

SEQ ID NO: 1882762 - DNA, 4001 bp, Homo sapiens
agacttccctgctatatatcctagcacatattttgatataccttgcctgcactgcaaattgaaacccatttttatttctttttaaagaaataaagccatttttaaaagctgtcatatattaagaagaagaatagaatttctaagaaaaaatcaaactaatgaaattttttatgtagaatcatattttgcgtttgttttcccagttgaagagaaaaagggggtggggaaatatactctgaaacaacacaaagcgcaaaatattgatgcagcaaaatttgttaaatttttttctatcacatagctatcgctacttaagggccactatcatcatcacaaaatctaaaacaaaacacaggaatttgtccacttcttgatatagcactgccattaatataatttctgtgcttactaaaactgtcctaccaatacacaatatttttatgtaaaggatagtaagagtgccaaaagagcactcaaactggggtaaccagaagacatgtggatgcaaattctagctctaccagttactctcagcagattttgggcaagtcaacttacctccgtataccagtgacatgatacagttgagactcaatatttaacatccaactaattcttaacctttaagattttaaaatttattattctaagaaactttctcccaatctgacttgtgtgtgactctctcagagttttacacctttaaggaactgaatttagttactgatctacttcgacttcctcaaaagagagctccccatgtaagattttaaaatttattattctaagaaactttctcccaatctgacttgtgtgtgactctctcagagttttacacctttaaggaactgaatttagttactgatctacttcgacttcctcaaaagagagctccccatgtaagttagtgtttgtattagaatggggcacaatagtttaaagatatggcattggggagcacagcattggcattaaaataaaataacattaagctctaatatgagatttgaaaaacacagtctgggcagagggtccagtgaatcttagcaggaataaccagtcttcagcattatcagcttagtgctgactgaagagtcatttggctacatgtgatttttacacatctgtcaactaaagcagagctccaaatgaaaaatctggcacatagaaacattatggggatttgtgagtccccctggagaattttgggtccataaaccaatgaatagattactatgacacacaaatggaatattttcatctgtgacagacataatctcgccctggtactctttgtgtcatgttgcagaaaactatacgcactgtcctcagacctgctttagttgcccatgctaaaagatgagtgacaacactaaatatggaaaacattggccgggcgcggtggctcacgcctgtaatcccagcattttgggaggccgaggcgggcggatcacgaggtcaggagatcgagaccatcctggctaacacggtgaaaccctgtctctactaaaaatacaaaaaattagccgggcgcggtggcgggcgcctgtagtcccagctgctggggaggctgaggcaggagaatggcgtgaacccgggaggcggagcttgcagtgagccgatatcgcgctccagcctgggtgacggagcaagactccgtctcaaaaattaataaataaataaataaataagtaaataaaataaaacatctaaggttaaagaacggaaccacccttgggaagacctaaatgcaatctctgtcagtaccactaactgtggcctctgagttagcacactaactccagtcctaatacaagtacattataaatcacctcagcggtcaagacctcattcgtcgtcctgcaaacctgtgccataataggttttactagtacaaaaactgaggctcactgtgtttgtaacttacctaaagtcacataggtgataaaggtgtccctgaatccaaatccacatattctttccattgagacaggcaggtgggaaggcctccctggcaaaactccaaccggccagtgcactgggaggagtgcgcactgggatcgagccacagaagttcgcgcgtttgcagcgggaggagcttggcccctcctcttcctgggtggaacctgggattcaatctgtgaggcgggaagcccagtggcaggaagcacactctctcgctttgctaagagtctctgtttccccttttcttccatttcacccaataaaccctgccctcctctcgcttcaaattgtctgtgagcctaatttttcgtggccatgtgataaggaaccctgtctttagctgaactaagcaaaaagtcccacaacactattatgccataaaatgtctttaatctataaaattagaagatagcaagtccttattgagtcatgaatttcatttatttattcaaaaaatatgtttataacttgaatgagtcaaaacatgggtatataaaaaagaggaatttacatgtctctagaagaaaaagaagagattgcaagggtaatatttagtgtccttttgaaagtacattagtgccaggcactacataagtcttcctgaaggtggtagtacaggcaaagcatgcactccaagctttgggaacaatttttagaaaaatttttgaggtctttataaaaattgtcaaggaactgttaacataatgacagcaacatatacaaatgtctggaacactatcatgtattttaaatctattttttgacacagagctattgggaaatattatgtcagcctttcaagaagtatataattttgagattgaataaaatcaggttgtctccatgtttacttgaattaatgagatgtttgatgttgtccaccttctcccttgttgtccaaaccctagtgagtgccctgacttgaaagccaagttctctgtctgtaaccaaagagaaaagctcatcaccctggttagacaaagttcacagcagccacagccttctgaaatgacacactgcctccatcagtgttccttcttgtgttctttttgtgaagagtgtgtttggagttactacagtttttggtcatcagtgaatgatgatatatctttagaaagtctctgtaagggtaaccaaggttccctgaagatgtgtaaagtctctgcacaagtttgagcattcttaaggagcaaattaatagtattttgtatttttacatttgtacaatgagaaaacgttctataggtttgatattctttcctggaaatacttccacaggaaaacagtatatggaaaacccatttttaaggcaagtttatgtttttacattaaacaacaattgaaaataaaatatttccattggaatattgggatcttgactttagtccgtttgtcaatttaacaattaatgatagagcttagcaatgacatatagctaacagcaaagtacttgtggcagtaccctcctcttcccccttctctcatgctaaagaataaaatgacatatttcccaagttaatggtcccagttaggggccaattttattttcaaatagatacagaatcacaagaagttgccaaaataatacaaagaagtcccatgtgtatttcacccattttcaccttcaaagataacatcttacataactaatacaatatcaagaccaagaaaatgacgttggtacaagtacagtcttattcagatttcaccaatgttgacaggtacttgtgtgtatgtacatatgtgtgtgattcagacaattttattacatgtagatgtgataagggtacagatctgtttcattaccacaaagatccctaatagttctattttatagttatacgcatccatctccctcccagagaccatctctatcctctggcaacaactactccgttctccatctctataattttgtcatttggagaatgttatagaaatagaataatacagtatgttaccttctgtttataacctctttttcactcagcataattgccttgagatccatccaacttgttacatgtgtaataata

SEQ ID NO: 1882763 - DNA, 4001 bp, Homo sapiens
tatgacatatatatgtgtatatgacatatatatgtatatatatatgacatatatatgtatatatatgacatatatatgttatatatatgacatatatatgtatatatatacatatatatgtatatatgacatatatatgtatatatttgacatatatatttgacatatatatatttgacatatatatatatttgacatatatatatatatatttgacatatatatatatatatatataatttttttttttttaaagacagggtgtcactctgtctcccaggctgaagtgcagcagcacaatcatggctcactacagccacaaccgcccaggtagctgggacaaaaggcgtgtgccaccaccatgcctggctaattttttgtattttttgtacttttttttttttttgtagagatggggtttcaccatgctgcccaggcttgtctcgaactcctgggctcaagcaatttgcccaccttggcctcccaaagtgctgggattacaagcgtgagccaccacacctggccaaaaccatatttttgataaaggatttgtatcaagaatatacaaagaattctcaagattcagtaagaaaacatacaatccagtttttcaaaaatgtgccaaagggttgaatagacacttcactaaagaaaatatacctgtagcaaagaagaatatgaaaaaatacacaacatcatttgcattgggagaatgaaaatgaaaaacacaatgaaatgcaccgtatacccaagtcaaaacaaaaaaatagcaaaaacatcaaaactgcagacaatatcaaattctggtgaggatgccaatcacctggaattttcatacatttttggtgggaatgcaaagtggcaccaccagtttgcaaacctgtttggcaatttcctactaagtatatatacatatttatcatataactagctatcccactcctaggaatgtactcaagagaaacaaaatctttgattcacataaaaacttctaggtgaggccgggcgcagtggctgacgcctgtaatcccagcactttgcgggacagaggcaggcggatcatgaggtcaagagatcaagaccatcctggccaacatggtgaaacccagtctctactaaaaatgcaaaaattagctgggcgtggtggcatgtgcctgtaatcccagctactagggaggctgaggcaggagaatcacttgaacctgggaggcggaggttgcagtgagccaagatcggaccactgcactccagcctggcgacagagcgagactctgtctcaaaaacaaaacaaaacaaaacaaaaaaacttctaggtgaatgttaacagcagcttaaccactgtcactaaaaactggaaccaacacaaatcttccactagtaaatggatgagtaaactatggattgccactcagcaattaaaaggaccaagctgctgaatacacatgacaacatggatgactcaaatgattatgctaagtggaagaagctgggcttctgtgattttctattctcattcatattcaagttgcttgggtaacttgtaatctttatcgcttgccacacattattcttgaataagtatttaacgggagtctcctgacgcttgagatgagccctcttccagagagatcttgctgtgcttctgccgaattcagattttgagaatccttggcccaaccagctatgtatatttgagaagctaatcttcagggaagcagatatgcacaggccttccagggaaattgtattttctatttcttttcctccctgctccaagagcaccaaggtagccacagttcattacaactgctgggaagagggcactgggttcagctctgactcctccttacctttagctccttgttatccgattcctgttggtagggtctcctgcaagcacactgtcttgcgtgggctctgtgctttaacatgttttcttggctcagccaggccacagaaacagcagacaagtgtttgtggtatcagcaactgctgtctcagcacaggcagctttttgttccagtattccatttccctccctggttatagacttttatccaaaaactggcctggaagttcaatgtttttttagttcttcacttaaaaaaagccattattttgtttcttcaagttttcataaccagccatcaccagaaactggaagtccaaacatgctcttattatttaagtaattggtgtacatggtataaattcacgtcttacagaaagatgcacaatgaaaaaaagcagcctctccatggcccctcctcccaattccagtcccacccactccaagtaaagcaaaaagtgctttagttgtatttctaaacgttcctacaacagatatctattattttgcaatgggaaaaattttactttaaaacatccccggaacttctaatcttctgatacttataacctccatatctccaagtaacatctttctctgtctcttggttcacaaactcctatgtccaatatctcccacctaaaaatgatgccctttataatccccttgaaaaagtggagtatacttacctccttgccacaatcccaatatgttagtcttattatttcttagcttactgagtgccaactatgtgccaggcagtgctttagaacccatggatacaatagtgatcaaaactaacaaagtccttgacttcacagtgcttacattctggaagaagagtgacaataaacaaacataagatttgtcaggtaaatgttatagaaaaatagaacaaggtaaaggaaacagggaatgtaggggtgagggcagattcatgaacttattttgtattgtatagttaaggaagggcactcagataaggcgatatctgagccaacgcaacaaaggaagtgaaagaggaagcctgtggatacttggaggaattgttataggcagaaggaagaagtgccaaggccctgacacaggggcttgcttgcctggtgtattccaggaatagcttcaggggaacaagtcaggggtgagcaggagaagatgagctagagaggcaggagtgagtggcatgtacatgtctgtgtgtatgcatacatgcacactccggatggctgagggtattttaggtcatggtaaagaccttagctttggctctgagtaagatgggagccaagggggattttcagcagagtagtaccatgatctgacgctgtatttgttaacttataatgacccctatattccttgatccatcaactttagaccaaaatgttcatcgaaacattttttgtaacagtaaaatattgggggaaattatttgaccacaagcattgtctaaagatattatggtacaactacgaaatggaatactatgcaaatacaaaacatgataaatggaatgttagaaatgtggttctaaaataccacatataatgttatcctgtgaatatatatgcattgaagagtatggaaagacatatgccaacaaataaggagaaaaaagtctctggggagatgggaaaaggagaaatatgaaggtattttttcctttgtgccttgtgtttccaaaagttcctacaacacatatctattattttgcagtggggaaaattttactttaaaacatccaaggccaggcgtggtggctcacgcctgtaatcccagcactttgggaggccgaggggggtggatcacctgaggtcaggagttcaaaaccagcctggccaatgtggtgaaaccctgtctcttctaaaaatacaaaaattagcctggtgtggtggcgggcgcctgtaatcccagctactcaggaggctgaggatggagaatcgcttgaacccgggaggtggaggttgcagtaagccgagatcgcgccactgcattccagcctgggcgacaaaagtgaaacaccgtctaaaaaaaaaaaaaaaaatccaaaagattagaaccataaactaatcattttctttgttttaagctcaaaacaattatatacagctcctatgagaataatcaatactgaatatcaacaaactgacac

SEQ ID NO: 1882764 - DNA, 4001 bp, Homo sapiens
ctactaatggaggtcttctgagggctgcacagaggaagcagtgggagaggttttgtacccctgtggattggagcaattgtgcaccttctgagattaaagttaaccacgagaagcgggaggacttggcctggtcagctgccggttgaagctggctggtaagctctttctcggctgactggattgaggaggctaagtcggataaccctgtgacagtggttttaagggtcctggcaatgcggatcttagctactggatacataaaagttttgtgctcatatagtcctccatctacaccggaggcccagcgggggtcccaagggtcagaaatttggaggttaaatccgttaaagccgtcccgtcctccagtggaggtattgacatagaacattgggtcagatcctttttcagtacgaattaatgcctcatggatattgcaccagtgccacggacagcctacattttctttgacccagctggtattgcatttggagttactttgatcatagaggaagcaaagtgcagggttttttctagccgggcctagggaagagaattttagacctaggaaagctatgggtgcctgacaccctgctggcggggatgctgccgtggctactagtctagaggacactgcctgtctggaactccaattctcagtgagggaagaaaacccagtgagagggagtctgagagggggcttgtcaaagcgaacttcatgttggtgaaagttctggagggagccttgccataccagttcgtctatataggacaacagattttcaggccagtgaagggtgttagcaaaactagggaatgaccagctttcctcgagaagaacctgaataaattgttggagcctgtcacatggagaattcatgcggtatttgatggagagagtttcagtttggttggggaaagggaggtgacagtccaagtggcctgatgttgtgtaggtgccttcttaagatgggaaatatggtaccaggagggaaggcctataagtttagctgccgtcggtgttgtaagaattaccgtataggggcctttccactggggggagagacctcttgcctggaggtcttttactagtacctgatctcctggggttattatggccggactgtctgggctgagtggtccgggctttggaaggctgtggtcggtgtgttctcttagcagctcccttaacagggtgaggtagggcaggtacgtgccaagaggtgggttattcacagggagctcttgaaagaggaaggggcgtccatataggagttcaaaggggctaaggcctgtggggcttcggggtgctgcctggagccgtgcgaggggaaagggaagtaaggttacccacgattggcgcttctcgagagccaatttgattaggtgttgtttgacaaggccgttggcgcattccacttttccagaagactgcggatggtatggagtgtgtagcttccagttaacgccaagtgtggttgtcacctgtttgactattttggagataaaagcaggccaaatctcgggattatctgttcaatgagggttgaagctactacctctgctgttttatgggtggtagggcaggctttaatctaacctgagaaagtgtttactaaagtaagaagataactcgatgtatttgctttagtaaggaatagaaggaaggatggtagattatgggttcaagaaagttatatagtggtctaggcggcagggcagtgaaggcgtctggcggtaggtggagggagtgccatcaatccttataacagagattgaggaggggcggctgggcctgctaaaagatggcaaaacagagtaggtagcccttgtgtctagcaaaaaggaaatggacttacccgctacctgaagcattaccctgggctcggcaagggtgagaggggttcccgagcctgggcctcttcagtcgtcatccagttggaggagctagagggcaccttcgccatccagggaggggtcgccatgtggagccacagcggccgctccgaggctggggcagtctgacctccagtgctccatttgttggcagttagggcacgggtgtgttggcggcttggggtttgggcactgttttgcccaatgacctggattgccacacttgaaacagttgcaaggcgggcaggacggttgctgttggctagggcaccggctggcccagtgtcctgagttgcctcacttgaagcagacgccagacggggcccgggagattgtacctctacctctcctgccgcggctcttagggaatgccggttgcagggcagctgccagggcttgggtttggagctgaactttttgtttcaggcttgcctgtcgttgtacctcagccgcctcctctcaggaattaaaaactttgaacgccagctttactaagtcctggataggggtttgggggccctccgctgcctcatccaggattagtggatatcactgcccgcagcgaatgtgttaggagttgtagatgcagtggactggtatggcactataggcaggtggaaataagaatgcgggtaagatggaagccaaggagttagctgggcagggttaaaagaacaaatgggaactaatgggaattaaaatggcagccgaatggtggcagaagaactaaaatggcagcagagaaaaaaggaagtaagatggcggcagtgaggaagcaggtagtaagatggcggcagtgcagaaggagatggcggcagagagactaagatgggggccccggacaggattaacggcaagagaggctggccagacttcaaggggaaggctagccacagggacttgtgccagcgaaaacacttggcggcagcggtccgacgagagcggaggtcccagaacctttgaacaaatttgatttttgactatttgcctcgcctctgacaaaaattggtaaggtcgtttaggatattgaagtcgagtgtgcctttggggggccagcgagattggttgtccaaggtatattgcagccaggcaactgtgcagaagaaaattagtcgctttcattttaaatcttgattgagttgtaaagttgggaggttgcgcagaaggcaccctaagggggtgttttgcgtgattttggactgggtggaccccatcctcttccccttatggcagcggtctgagggacagcagaagcatccctctggggtcactcagaccacgcggctcctggagcctcggatcggctacttcagacatggacgtctctgagtcgtcagtgccgatttggacttcccctggggaagtaaacttgggtcacctggtgacccggactggccttcccttgaagaaggaaactctccctgggtgtgcgcatgactctcggccagggaggaacggacaaaaggaaaaaggaggggtactcacctagcgtcggccgaattggactggagtagctgcagcaactgcgacctggcagcaagtaaccggacgaaatggacagatggccgtggaggagaagcctgacctgactgagggagaggactgatccgaccaggaggggagtccccctgagcctctgggggggcttaggaggtgtcccctcccgggtttcggcaccaatgaaaggcaatggaagggcaccatggatcaataaggctgagaggtgagaaaaagagggcaaaaatcttctttattgagccctcgggcgaggttcactggtccgcagggggagggccagggaagtcgcgctgtgccaaaggtgcagcatgcttttatggatgctgggtgaggagtgggtggggtaggggcggggtcggttgagtttcgcgcttctgagtgtgacacgccctagtgggcatgcacgttagtcggggtggtgggaataggaaaggtgaacccggaaatgctgagtcagggtatccgaggtggcaatcaccatcttggagtcttcaccggagtccaatcaatttcttatagtaaaaatctggtggtgattaattttatctcagtttcatcctctaaaaagtgtttagcctttagttttcaaa

SEQ ID NO: 1882765 - DNA, 4001 bp, Homo sapiens
aattctgaagttgacataagaacacatgttgttcagttttgcagtaactatcatctttaaaagtaaatattgtgattgtttaggaatatagtatttaacagactagaaaaatataagtaaaattttcaagtgcatgaaatacatactaattctttaagagactaatgaagttattctaaaaatttagcgactatagttactcaggtgtctgaatcaatataatgaaacataatgaagcatgacaaaatatatatgaaagtagcagcttgaaatcgcaataaatacatatatatttttaaatgttttaatcatttgaaatatatatgtaacaatttataataaaaagtatatttggattttaatgttttaaaataggggttcattaaaatgtttgtgggtaacgttatgtttttaaaatattagctattttgtttgggtggagtatttctgataattttttaaaccacaaatgtttcataattttcaacagtaattacaacagtttaaaagagtatgttagttatacatttgtggcatatccatgtcgtcactgatttaaaaatcatttcaggtacagtggtcattaaaaaagtcagaccttattttttttccactataaaatcatgtgttaaggatgtagatttaaagttatttatgggatcatcagaataaaacaactgcctcatagtattagtaatttatattggtaggagtcttttctttcttaagcaccaattctaccccccacagcccagaaaattgattttatccataataatttatagcattcttcatcaatgtatactgttgtttcttttaaattcattagcccatgttgcttgtgaatatggaatttggttattaaaatggtttcatatgtttactatgtataggctctagctttgagctgcttacttgcttaaataaatgttttcaatttactataatacaacaatttgtagagaaatgctgtgaagcatagttaaaagaatgaatccctgaaatagaatcactttttaaaaatatgccctaacatgtggtctcattttttcatgttttgcattaattaaagtcctattctgaaaaaaatatttttgcctaaacttttgaattaacaaaataaaaataaaaaatatacaaatatacgaattttggaaatcagtgatgtaaaaacatgctttaataccgtcttggttgttaatttcaaagatttttctcaaaagacactctttgtaaagtaatgagaaaatattgccacttttaattattaaataatatttactacaatacaatttacttttaattattaaacatgcaatatattttaaattatttaattatatatgcaacgtatattttaaaaatgtattaaaataaagttaattgcatgttctctctaatcatgttcttgtagcatgcacacattttaaaaaacccagtacatgtaatttttgaaaatagtatgtaccattacacctttttatttgggagatttattagaaaataactttttattcagaaaagattatgacagaattagataaaaaggagactaaaatgtgtgttaaatcatgtaatattataaatgtaattaactcttcatcttccaaatattgaaaacagtaatgaaagagaccaatatttaaaaatagaatctttttttaaacctaaaaaaaaaactaaaaaattgttatatggtaacagctttactttcacataaggcaaacccactgttgagtgagttggctctgattccaatggtctcatcaactttgtgaacacaggtacctcagtggtgcctctttcaagacaacaaaattaacttttagagattaaaaaatatattttggcaattgaaactcaccagtgcctttctgcttctccaggaagttgtacccgtcagcacctgctgagggctttgttgtccaaaccctgacaggtaaaaaaattcctgtagaataaagccagaccagctggctttgaagagaaaccccccagtttgggctgcgtttgcctcctctccttttctatgaagaccgaggctttgcccccttgatcgtcaagccgtgagatgcgtgatctctctgcacaagtgtctggcaggccgaggtgcacctgtttctgtcactctggagtaaatttagctgtaaaggtatcactgacaaccagacctttgtcagtgctggcaaaagaacacagaattgcttccctcccctcccccctcccgaccccctatgctgctagttccaatggaaaatatccaatcggaagtctatccaaaaatcattcctaaaaaatgaaattgctttcatatggtataaaaaagtaagtttcctcatttcaagcagattttaaaattacatttccaagaataatcttggaacaagacaagttttcgttcaattaattgtggctggaaactttttaatggaaacatagcacatacttacttcatttcaggttattaaattgtgttaagcataaaagttatttgccattctttgctgcagctcatttgttcttttcgattctaagaaatattagaaggttaaataacttatcacataggagagattattcatactaccaaaattagaatgtgtgtagttctgagggactgaatgtcaaaattgtatgctcatagcactaaaactattgggaatctaggatgacactggaacatgtaaaatggcagctaaggtctatggaaacccttcatgtttagaaactggctaaagcttgagttctcttatcttttggttaaggtaaggacatttatcatttatgtgaatgttttagactaatttctttattagtggtttgagcaatattccttttgaggaaaatagagaggcaggcaatattcattaatatgtctgacataaataaaatagtcaagatatataaagcagcccaaggagtaacatccttagccaaagcattctgagcttctgccttaataattatgatttcttaagtggagttaaaaagagttgtacagagtacctgttctaccatattattgctgtttacaggagttgggtgtgatgagaaaaggaaagctgggtcaaaataaaaaatgctttgtaaaataaacaaagttcctatttacttactatgtataaacagccactcaccaagcctcgtttctccacagggcaccattttcagataaaaacatagacctgaatggcatcatccagtatccaaggaaaccatgtaagtacctctctcactgtgtacttctgttattcagatcttaaaagctagctgagtactgaataagtgagtgtttttatttaataattataagggaagtactttttaggagcctgctaaaaagaaacaggttctttattgttatgtgcgtcataacaaaactctcatgttttcatcatatttcataaaattatgtgcttagtaccactctctccatcaattctcattcttaggtacaaaatagttactcaaagtcctaatgaattggaagtttcaaacttttccaagacccaaacaatgtttcagagtccttgtgccgggagtactttattaattgtagttaaacttgttaaattttaaaaattaagaaaaaattccttggaaaataatggtttattggtaaacaagtatggcaatttatttggctgtaggcttgcttgaagagtgagcaggtgagcaaagagacaagattacatgtttaaaccaagaaaagaatcttgaaagtaagtgtaatgaccaagatgcaaaaatctgtttggggaaattgttggaaggttggcacattattttctttatcccctccccacaaactaatgtacatttctgcagctaatatcaaagttttaattcatgttcaggagctatgaaatctactgtggaaatttagtttctaaacaacatgctactctggagaaagacattcctaaaatatttgaaatttctactattaccgtacttcgacttttttttttgttatttgtactatctccttttaaaattaa

SEQ ID NO: 1882766 - DNA, 4001 bp, Homo sapiens
ttggaaatcacttgcgtactccaagcccaagtcctaaactcttctgctattaaaaatggtctgcaaacaggtcagtctgctgtaaaaaattgatttgacaacagcatttttaagtctttgacggcttgaagttggcagcattttcttccgctctgatgtggtttgaacagaagcatgtttatctgttatttatgtaacagcctgatgaaaaaatggggcatgtgcttcccttctatttgtcttctgcattaacctcattttgaggtcaggtgaaaatgctataggtactgattgcagcacgttatcagcattattgcttaatgtgccatcaaccacaagtgcaagtgggctcaggatcatcgccgcggtcttcccaggaatcatttatctggggctaactccgaaaaaatcatttagaattgtgacatttaaaaataaagattaaaagttctgaaaggagcagaagtcatccacacagggccctcttggcaccataaatcaaagtttgttagagctgcaaattggaagagcataacacagaggtgcaaccctttgatgtggttatgcaactcactggtctccaccacttactagaccacttctatttttgagtactattctcacaacgtagactgtgattttttggcaaacaagcacaaaatccagggttaaaaaagataaaatgtatctagcataaagcatcttttaaatggaaatgccaagttctttataaatttgaaaaatttattcattacccggcttctaggggagccccttatttccattttttttgctggggctatctgtttcaccccactaggctttccaaatggctgtccacagatgctgagcctttggtcacctccgagtggtgtttggaaagagtactggggaactgggctgctttttggcctccttgcacacaattcaagtcagagcttttgatcttaaggtaatatagagcttggaaacaaaaaatctgcatttagtttggaatatctgaaaatgatagtggttaggaaaaaggatgttaggcatggtttgtgtgcaggctattataggtacttcctttccaaaaaggtgatatttagtgctacaaattagttatcatatcagtattagaagctttgttaggaattccaaataatacgcaattgtgattatacacaaggtgtttgcaagccccatcttgtaggtattattaagccacagaatattttatacattttaataattaatagtcaaacaccttgctaaatactactccttttgaggagaagtagtagagaaagaatacaattggctgtttatatttttgtcttattcataaagagaataaaattatgtaaaagtatttataaggaatttatcatcccaaatgcattttaatagttgtagataaatacttctgttttgagaaggcttcagagctgtaacagaaaatgaaataaagggctcatgtggaaagaactttacagcatgctgcaacttgattgttcacacttcaaagcaattctaagaaaaactgtaaataaggactaggcataaaactctgctggcacctgggaatactcagcccactgcacaacagaacagaatctgaattctggcaaacagccaacctctgtggataaatctggaaaggcttaatgtacactgaagaactgatgtactcagaaactatgtgggtgtacttagcttcatgccacttagagaactcattgacttccctgaatacaaagtagatctggtcatcatgtgttacaccagattctagtactgcttgcaagcccataataaaacccagagtttataggaaggactcacctttctcaagagatacttctcctactctctctcctttttaatgctcatttggacttattagactctccaaagcagttctcatacactttaacaagatgaagatatactaggaaaggtaattgggtgagcattactaagtgtgagtcataaatagtgtaacaaaggctttgagtgagtcatctgcctaagttaccatagctatacccaacataacactgcctttctctttgttaagtggacaaactaccataacgtctaacagtatcaatagcatgtttttttgaatagctcatttttaaatattctcagttgtttaagtttatgtcatatattttccagattaaggctctttggaacagaaaccactgttataaagataggcaacagatcacttgcgtattttaaaacaagaaatgcacagacattgtagggatttgttttttcatgatagcctggtaataaaaaagtttaatacaaaacctttcatcttcaaagggatctgaaaaacgtaattattcaacgcaatagcaaatgttagatttctattaagttagctgaattttccagtttctttccttccctcagcatacattttcctattgctggcttcaccagaaaaataacagcttaaaatttatccctaagctaaaacccattaaatgattgacacaatcttagctaacatgaaaagtgacttatataaaacctggtttgctgtttgggggcatattctgctctcagcaaatgaatgcacatttttctccattgatcagtggaaagaagtgaatattcttcaaacatgaaactttcttatatagctaaatatcttttgtgctactatgagtcattcctgagcatgtcttttattcctttgtgattttatcaaagttcagatatttttaaaagatcttggaattttctaaatagggttcacgtaatatattctccagctatatacttttttttaaaaggtattagaacgaattcagatcctgacataccatcttgtgtttcacatatgatcagtcaccttcttaagatgataacaactttgacgttgcaaatgaacacattcccatgtgcttgaggccaaaaagaggcagtcagtgaaactaaaaggaattgcctgaatatgactgttatttctatttgttgctaggttcttattggaatctgtgttggtaaattaatttggggtgcacatatcatagggttgatattcactttgtgtcaccaatatggctgtatttcttattgaaatactgagaaatttctgtatagattagtaggtagctgttgctgcagaccctgccaaatgtctgtctgtcttttcctgctgctctggtcccacacggggattgtcgcttcttctccttacttcagaaattgttaatatctttgcacgagttttttcttgggctctattcctgagccaagactagcatctattctggttggttgttgtttacgctacacatatattttaaaagtcacctcagcttctgtgtatgggaagtgatggagtcagagtgtcctaattgaatcctgagttctgctactcagcaatgcatgattttgggtgggttgtttacctgctctgtgtcccagttacttcctatgtaaaatggaaataataaaatgaattagctcacagggattttgtgcacattatataatacatgtgaagtacttagaatagtgtctttcagtaaatgtcccatagtgttgtcgtctttgctgcctggtgtaggaatagaacacaaatttcttgattgtgagcttgaaatttttacactagataatacccctctggctccaataatgctggtgatataataaggtactagactacagcaatcatttgagtgagaaatgaaatctattttcaattttcatttatttaaaaacatggttcacctgagagtattgcatgctgattttcattatttacaaggatgttatgtaaatataaagactagagttattacttgcatgctatgagccaagtaaaatttaaatgtgactaaaggagaaagccagggactacttactgctacctagcactgacctttcagaagggcaacttgaacaattctacctgcaaaaagtgcctcattagctgaccgtacagcatctccactgtccaggtagaaacaggatggagcagttggtga

SEQ ID NO: 1882767 - DNA, 4001 bp, Homo sapiens
gaaaactgtagtgctagttgacatttcaataaaatatggctaagaagaaaatgccttgtatcaagagatcctcaatggactagttttgagcaaaacaataaagcagagacaaagcagtaaaatgaaagtatattccagtgatgacacttgcagtctgaaaatcaattaaggcaattttggaacaacatggaattaagtaattttatgagaactttaaatgagaacaaagtaaatgaggtacctgtgcgcggtagcacttctgctcacaaagtgttattgctctctccccacagtgttcaccaaagtcattccagacactagcgaatttttgaagttggtttttctactccatgaaattaatgttatgcagtatatatcacagtggacagcgtaactaagaaccgtaaggaattcttagggttttagggatgtgggtaaatttttttctggagaagaccaaaattagctctttacttttaagaaagactatttcattgaaaaccaagaaatatgaaaggatatcacatatatgcatttctgtctctgttcatctattttaatatttctttaatatttcaaacaatggccatgcgccatttatattccataagttcatgtatcatttgtaaatttataaattggggatgagacaaacaaaaagatttattatgctgaaaaatagaaaactgagatgagtttaacagtatggagaggaagaagtaactttacaatttctaagaatatttttaatactgcatgttccaccccaatttggagaaatttggactaagagtaaataggcagactcaaccacagtctctaaagtgaaattcagaggaaaatattaaaatgttctagatagaagagaagtagataaaagagaatttgatcgtattctatatgagcattgaaaacaactaacagagttactgatgtaaagcatgcaaaaaaaaacctagaaataaatggcatggcaactataaaaacattctatatggaaaaaataatagaaagaaataagcagataagaaatctattctggaaggaaacaatctaaaatgagaggataactcaccatgaagactttattctcccttctataggagattataagaacataattttataaaagaaggacattaagaaaatgataaatgggagctaaattccagaatgaaggaagcaacttaaggagcaaaagccactatcacagaattaataaataagttagacaaagttatgtccaacaagaaaaaaatagacacaataaaatatcaaaccactaagaaaaagagtataattatggtgactctacacaggaaaaaatatttagataactgtgattcaaagacaataataggtagaaacagcagaaaaaaaaaatgtaaatccggcaaaataaaaattcgttgtccctaaaataggtaggtcaactaaggtgacagaaaaaggcttccaagaataatcaagcaaaataaggaagaattgaattacagatcatcaaaaagattccttacagtctaggaacattttctacagcaatctaaaccaagaaagtccagacgaaattttaaactttgtaggtaaagaaattattctttagccagaaaaaattgtgtgtgtgtgtgtgtgtgtgtgtgcgtgtgcacgcacatgtatatgtgtatataaataatgagaggtgaaatgtcagactggtcttagacttctactaaatccaatgtcaaaagaaatcagaagataggggaacaaatgttagcaaccttcaatagtatctcagtatgttctgtgttgctataacagaataccacaagctgggtaatttataaagaaaagaaatatttcttacagttctggaagctaagaagtccaaggtcgagaggcccacatctggcaaggggcttcttgctgtgtcatcccatggcagaaggcagaaggacaagaaagcatgagagcaagccagcaagagagggtcaaactccctttaataacaggacacttccttgacaccaacattgatccattcaagagggcagagccctggtgacctaatcacctcttaatggtcccacctcttaataccatcacaatggcaattaaatttcaacataagttttgaaggggacatgcaaaccatagcaagtaggaaagactgtaactaaagattattatgcccaactgaggtggtcaaacaaacataagggcaacagaaagacattttataaacaaaaacagcaacaaccaaaaaaatagtcagggaatatacaagtcatgagccctttctgtaaaaaaggaaagaaatcacttgatgtcaaaaatccaaccaaagatgcttgattggagatgctggagtaaaagatgaaaggcatctgtcaacacacaaagacagtgaagcagtaaagaaagcatgaatgaaaatgtatacacagccaaattatcattcaagaatagaggaaaccagaagacattctcattcatggaggaaatgaaacaggcatgaaccttctggagaaaaaaaaaaatagagcaggcaaaacaaacaaacaaaaaacctacttaatgtaacaaaaaaaaacctactttgtcccaagggatgacttttactaaagtgcagaactgaaaaacaatggtaaaaggacagcaggttttgaatccactaaaataaaaacaaagagttgaaaatgtagaaatcagagaaaattcatatcattaacttggataatgtacatataacaacatggcttaaaaatttggaaggaactgatgctctgtaaatagctgtttagccaatctgacaaatgactttaatttatgaaacaggaatttccacataccaccatgcctccaaaatattttcctatgtataaacaccaaaactgcatagttcaagataggtagcttttagttcgttgggaagttggatcagaagaggaaatatgggaacatctttgtgtgcttatttctcatctttcagcagaccccactccatacgagaaaaaaattgcaacatgttttaaaattttactttatgctcttgatgtttttcatcatatttttcttaatctcagacaaatgatttggaagttatatcacaggtggtaataaatttgtatctagagctcagaaattctgtaagttccacttcagtttttaaattctgttaaaggcaatcgaaattataaataatatttttaatttaaaaagcacactattgctatgaaatcatttatctgtctattcttctgcatacaaatatgcattattttgagtgatgagtcagtgtttttttttggttggttggttgttatttgagatggagtcttgctctgttgcccaggctggagtgtaatggctccatcttggctcactgcaacctccgcctcctgagttcaagcaattctcctgcctcagcctcccgggtagctgggactacaggcacacgccactacgcctggctaattttttgtatttttagtagagatggggtttcaccatattagccaggatggtttcaatctcctgacctcacgatccgcccaccttggcctcccaaagtgttggtattacaggtgtgagccaccgcgcccagccctgatgatccagttttattaacaatgattacttcagatattttggtggcttgttaattttggttgctttttaaatttgtactttttttctgttttgagtgcataattaatcattgaaatatgtcatttaaaaagtaattttgaagcaggaaaatgaaagaattgaaattttaaaatgcaatgttatgggtagataacattataattgatactattgtgtaagggatgtttcttaaactataaaataattttacttaagttttatttaaattgtatttcttcatacaaaaccttcaatgagactctttttgtttcatatatgtttcaacccatatctaggattttaatatcttaatcaagaataatattttattggaatcagaggtatgacatttaaaagtctaccagaca

SEQ ID NO: 1882768 - DNA, 4001 bp, Homo sapiens
tcctttatttcctccacgttgtactctaagcatttaaactatttgctttcagaaagctattatctttcttggtgtgatacacaatttccaaatattcctggtcatatttgtagatttgaatgggcccaattgacatccacatcttatgtgtcttctgagatattaactgaagcttgcttcaatctctgactctacagagaattccagtggatgtcaaatgaatgagctggatggaaatgcaatcatttaacagtgagccaaaataggccctttccctgaaagtgatttttagaagcagtgttctctgaagcagaacattctggagtattatgtccctcaaagcatttgggtcctttagcttaaatgcgcatctctcctcataagccattacataccttaaaaattctggagtgcaaaaatttgttgcttataaatagcatatttatgtgttaaatatctgcagcttatgggccttcattccttttttattcttattgccccgaagacaatttctaaaatgattttagagatatggagtagtaaatgaggtattcctgagagagagcctgaagtgaaagcagtttagtttgaaatgtcccaagtaatcatttggttttatatgtgtgcttcaaggtaggttaaggtgggacaagagaatgagcatttgctcttgcacctgtaattaaaatggcagaatctcagagtttcctggaatagaatcttatgtcaagttactaagaaaaatatagtgcacttttggcattacaagccaactattgacaatgtgatgcagattctgaatgaacaatttgttttgtatttcaacataatatgcttataaaatcacaaactatttgtattaacaattaaaatattagtttcagaatttattcattttcacatatattaacttttcagtgatcagcacttagctctgtttcctgctttccagcttgctaactggttcaaaataaaatcaagacttagtgaaaactatgttcttaacataatggtttgaagtatgtcattttcttctggttaaaacaaaagaagagaaatcttatgtgaacaatctatggtctgaaacatttactatggttttatcttaaaataatgtagtgggttactgtgtctacttcaacagctgccttgaggctttgtttgtttgttggttcaaatggctaccatcagtcaaaggagacaggcacagtcagctcattacagccttagctgatgtactaatgtaacttctaagtcggcttaacatcaaacttgcaaaatgcttagctattaaacaatattttgttcttagctgtatttagaaaaaaatgaggattttgatcctttctatatggaaatgatgacctttagtagaagaaaattctttttatttatttacaattactaaactctactgcttgtaaaacttcaattagaaaatgatgtttaaatcttgtaggtagatatctgcatgtgtatttctgaatttgaatatgtgtgtatatatgcataatgacagaataaagtaatttaaatttaacatgtaacatagatatgtaatatataacaaacataaatatgaatgtaaatatagatacataaacaacatacatacaaacatataaatataaatatatacatataaaatatatgtaaatacatataaaataaaagtattttttacgtataaaataccttaaaaagattttgcttcaggctaaagatttcatatgagtatttaatatttctacctttctaactttaatatatttaaagtgagagttctttgctatttttatataatttttgaatattaatttaccattaatgtgttattttcttggtatctgtaataagaaatatatatggtggtccttaccctcaggtctttatcctgagatagagttcttaaaatccttgcagtaggggtgctggaggaataatttgttctgtatttgttctttaatcctagcttctgacacagagctcctttgtaatgtcctgagtgacaaaagcatcttttgttctaacggggtggctctcagtgggctcctggatacccttagagtgagggctggtttcccggggaacaaaccacctgtgtaatgaaggggttggaactttcagccccaccttctaacctctaggaaggggagaggaactgaaggttgagttgatcatcaatggacaatgatttaatcaactatgactgcataatgaagcctccataaaaacccaaaaggctgagttcagaaagcttccagattgctgaacacatagagatgtctggggttggctccaatccaaaagacggcatggaagctctgcttctccctacatttcttgccctgtgcatctcctctgtctgtctggcacccgaatcctttgcaatgtcctttatgataaatgggaaaatgtaagtaagtgtttagctgagttctctgagttgctctagcaaattattggaacccaaggaagggtcccaggaacccaggtttatagctggtcagtcacaagcttgggactgtcacctgaagtgggggcaaccttctggggctgagccctcacttgtggggtctggagcttcctccaggtagatagagtcagaattgaactgaatcacaggacaccgcgctggtgttcacagaagcattgcctgtgctggtggcagaaactctcacatacattttggtaaccagaggtaaagtgttgcattgagtgtgattgactgtgtaagaatgtagagggagaaacaggttttttgtctgtttttttactcaaattaatttattatgaatgtgtagatgtgtcatttcattgaaatttttcctgtgtttcttctgaacccctgaattaaattaaatgtcaactatatagaccagttatatgtgaaagagttaagtgccatccaatatttcttctgcctctctgctgtctcagacaatcgatcctgccatccctcaggaacctttagacaggtactataagagtcatgccttgtgagcatttccctaagtttctgttgtatgtaaaattataaggccatctaaaacatgtgtactcattttagaggaatctgtggttaaaaaacagaacatgtagaatctgttcttttcactgagcaataattttaataatccagaagaacactgacaggcggggtttggagaatagcagactgatgtccccgattttcaggagagcatattactgacacctaatcagacacccatgacagagctgggcatgttatcatcacacagaaatacacttgaagtgatttttaatttggggtgtatttcctacactgttgaacttaagtaacccctcagttgaaatgtttagcattatgtggaatattaagtgtcagtgactcaagagtattttagattgcatttattataagtgagttctaactgccattcaatcttgtaatagagctctcattttaattatttgtactttgccttgcacaaaataaataaataaatatggtttctagttatactaaagcaaattttatgtctaaataatttgtatattgacctatgattatatttataactctttgtttagagacgtgtaatacagtaatttgaccatgtgtataataaacatttgtttacaaatggaaaacagcaaaatgtatgggttttaaaataaaaataaaaaacaagataatttttgttttaccttggttatctttcttctttcctgtattttttgtgagtttatcgatgataaagtgaattctccaaatcttccttgtaaaatactttttaaaagtactatatacttctaaagaagctttatatatttattctattttcatctttgcttatttatttatgaaacacatgaaaatagatataaaagaaaaggcattagtgtaaaaactgttatgaatttgcatgagtggatatgcacttcattgttttaacaagaaaggtataagcttttgtttgtacatttgtggttgctttttgccactaaggctaaag

SEQ ID NO: 1882769 - DNA, 4001 bp, Homo sapiens
acgaaattgtaatgtttcccaaacaaagaaataataagtgcttgaagtaatggaaacctaattagcctgacttgatcatttcacattgtatgcttgtatcaaaatttcacatgtgccccagaaatatatacaacttttatatatacatattaaaaattttaaattgattaataaataaaaatgttgggaatattaaagagtggacctataaactcactcttattacagtggttcctatttatttatttacttatttatttatttatttatttatttatttattttttgaggtggagtctcctttgtcacccaggctggagcgcaggggcgcaatattggctcactgcaacttccacctccctggttcaagagattctcctgtctcagcctcctgagtagctgagattacaggtgcccatcgcctcgccaggctaatttttttgcattttctttagtagagacagggtttcactatgttggccaggctggtctcgaactcctgaccttaggtaatccggctgcctcagcctcccaaagtgctgggattacaggcatgagccactgcgcccaatccctgtggttcctatttaaataaagacattttttccccgtcattccactctttttggttgtataaatctagcacatagcataatgtcctgaaattactcacttatcataggttttgaaacgatcgcttgctcaaatgtctttccttctaaattgatagcacaaactgtgatttttcaccattaaatctcaattacttggtacaatgtttgacagatacttcgttttcaataatgtttattaaaagaataaattatgaatatgtttaacacctacgttaaggttccagagagacagaaccatatatattttatctctcattttatatatatatgtgagattatatatattatatatgagattatatattatatatgagattatatatatgagattatatataatatatgagattatatataatatataagagattatatattatagataatatttttactaattattaattagcaagagatctcattttcttaattgcttagaaaatggtgaactctgtatttaggttaaatcactggtagcttggaaaacgttattgtatctctgatagtttgtctagttgcttttttttaatcttcaaaaatgcctatcattttaataaaacagatatcaggtatgaagtcttggtaaaaatttgacttactctttataaatccttatccaattttgattcaattttgtaaaaaacgttataaattttgcttaaatgatgtttgactattaatgaccttcagatatcctgtcactcttcaaataaatattatgtggcacaattatccatatttcatagatgggaaaacaaagttccccaaatgggtgatgagttttaaaaatcacgaaactggtgtcagaactataattgaagcccaaatttgaaagccgaggtacgaattctgggctgcccaccttccctctgtaccacatgcttaaagatgctggacataaaatcacatttatgcacatatacaaacggtttcaggcaaacctcgtaatccgtaggatgagaatgttcttggagtggactgcttcatctctcccgtatgctctttctgctgtgtgtgagttagagagtggtagtgaaaatcccgcagaaggacggaaccaacaggctatcaggcgtgtgtgcagggagcttacttggggaactggctggcgtttcaacgcgacgcccagaacaggccgcacagaagctgcagggctccgccacgtcccaggcccccaaaccagagaggcccaccgtgtgctcctagtcagtcctccaaggcccgagagccccaggggccacaggctgaagaacctggagtctgactcccaagggcagcaggagaggaagcaaccgcccagcacagtaagagagagtgagccacagggagaaaaccctgcacgctgctcatccgccatcttctgtcggccgggttccagccgcgctggcaccggattggctggtcccccacactgagggcaggtcttcttctcccagtcacccactcagctgtcaatctcctctggcaacgccctcacagtctcttgagaaagaactttgcccagccatctaggcaccctcctccagccacgctgacccctaggattagccatcacagatagtatttgtctgcgtgaatatttatttgttattgagtctcactctgtcgtccaggctggggtgcagtggtgcgatttcggctcactgcaacctccgtatttctggttcaagcgactctcctgtctcagcctctcgagtagctgggattatcggcctgtgccaccacgcccgggtaatttttgcattttttggtagagacagggtttcgccatgttggccaggctggtcttgaactcctgacctcaagtgatccgcctgcctccccctcccaaagtgctgggattacaggcacgagccaccgcgccggcctgccttgcagatttcaactgtgattacagcacactctggttgacaaaaatggaagccttttgattaacttaatgtatgtagacagattatgtttaactaatttaaaaatctttcttcaaccatttgggttacatttcccaatagccggggagtcttttagcatcaatgtccaaaatttctgaattaaaaaaaaaaagaatcattggtttgaaatgtctcaaaagcaatactcttttcttttctgggttgataaaggatggagtattgtcacaaaatattaaaatttatgagacatcttggaaatgatgggtaaatgtgaagaaaatactataaagaaattttctggaaaacccaggattatgatttttttatagtttaaaaatcacaaaatttgattttgcaataagccttctaaaattcatatttcctactaaatataatttataaatccatttatatcatcctgacttttgcaatgaaacaaaattggctctagactttctgcctgtcttttgtgtgaagtccatcaccttcccaagatttctgcgaatagacctgacattgctgtggtctctgccaaatcggagtttctgctttcactgaatttacttatttccaacaagattgctatgaaatcaaaacgatgttgtgttttgtttgtttgttatgttttgtgtggtcgttgtattgtataaatcaatctcatcatttgcagggatttacaactctatagatagcaacgattgaacataccgtttcctctaatttcttaatttagaatgttttccttgcatctttgatacagatttccatgactacaatcataatactgctccattcctccatctttttgtgagtataccatttctttaaatacatctgaaatgtagtatgtagtgtgcaatataagaaagagaatctaatctattctgctggcaggttcagggtcttttccaacttacaacttctttaacccacacctacatccaccattgggagcccaaggaacgtttatatccataaatcctcaagagtgttacacagcactttgacatttgccttcatgacatcataataactcattacctattaaaaagtgacttttttttaaactattgaattacatacagttcattgctgtaacaatacccaaaacacaatggtttcataaaataaacatttacatcttgctcactagacagccatctagggatctcacaaatgctaatgcttagaatatagtgaaaacctgtataggggactataaaaatatctttcattggtccctgattccacctgttatagctcctttgggaacttgagaatcaccactacaccctaacttcttctgaagggatcattgatatgcacactttctgcagaactctaaagcattctcagctgttctcttgtttgagcgtctagataaaaagctataaagctgttttaaaacttgaacaagcaaagaatttttagtctaaaactttgctatatttaa

SEQ ID NO: 1882770 - DNA, 4001 bp, Homo sapiens
gccgagatcacaccaccgcactccagcttgggcgacagagcaagactctgtttctaaaatatatatatatataatgtacatcatgcacactcatttgcatatgctcagacattctagaatgatgcctggcacaatcagaggttataacctcagagaggatggactgggaatatgagtaccagagaggggaaattttgtctcttacctgatatcgatttggtaacatttgaatttttgtgtgcattctcttttcacaacaaaagaaaaatgagttaaacttagtctcagcgctgaatggaaaagtgaatgagaggggtggccgtggcagtcctatggagcacatgtgcttcactctctttcagcgtcactcaggggacaaggccgtactcacattcacagaggcttgggcagcaatacgttcatagaaagctctgattaatgactcagtctttgccccaaaggactcatgagcattccaaacacaaatgtaaacactcgctgatctactgcatgctggaaaacgcggctactcttagcagggccttgtaggctctaagatcctgcagcgagcctgtggagctcagcctaatggctaaatgagatgaagcagctgcttttgattgtgagaaattccccaagcccaactgcaaccatagtgaatggagttatttttgaagttcaagctgcgctggatcttttcaaacagccaagagcatgttcgtggcagccctgttttcttccacggcctttcactccctgtttccttcagaaattgagcactgaatgttaatcttcatggatctcttcttagccacttcctgacctcatctgtgggggagcaaaaaaagatgtttttaaaaactcaaagtttgagagaaagatctaagagggcctgagtctaatgaattcccaatgctgaaaagagttagcataacattccttccatgttaatatttggcagcctgcacagtgtttggactggaagataaagtaggagatagagagagagggagagaagaagagagagaggaaggttgggggggaagggagggaaagaaggggtggtagaggaagggggaggagggagaaagagaaaaatggaaagagagaaagctggagagacagaggaagggagagagggagggaggtgggagggaatggagacaggaagggagggagagagagaagtggaagagaggaagtgggatggggagagatggaaggagatacatgtagagaggaaggaaggaagttagagagggacaacagaacaactaaaagaagacagcatctctccagttcaactcaagatgaactcttcagacatcagcactgtttgagggaaggccttgcctatggagccctctgccccaattgatacggaagtgctgggaagggaagagtgtggtccctttaaatgatacggaaggggaaagggaagtgctgggtataggagggcatgatccctggttagggctccacccccacagacctaggtgaggacaaccgctcctgcctttgcatgcaaatgttgcatttcctgagaccaccctggcctgccacgcccccatcctgtgcctataaaaaaccccaagaccctaccaggcagacacacaagccgctggatgtggagaggagcagatcagcagaagaagacacaggcggccggatattgagagaacgtcgagggagcatgccagcagaagagcacatcaacagatgccgacatgctggccatcgactggcagaatgaggcggagtttggctggagcagtcagaggagagctggggcggccaagtggcctgactgcaggcaaaaaccatctcccttctggctcccccatctgctgagggctacttctactcaatagaaccttgcactcattctccaagcccacccatgatccaattcttccggtacaccaagacaagaaaccccaggatacagaaagccctctgtccgtgtgataaggaagggagtctaattgagctgattaacacaagccgcctacggacggctgaactaaaagagctccctgtaacacatgcccactggggcttcaggagctgtaaacattgatccctagaggctgctgtggggtcggagccccgcaacctgcccatctgtacactcccctagaggtttgagcagtgggacactgaagcagtgaaccacaaccccatcacacaccctgcgagggggacagggaaccttttcttcaatcttcttgatcccacaacttgctgcgccagtaggaaataaatgtgtccttccctagggggatttacggagctctggccccaccctgtatgaccctctttcaagtcctgcttcttgccagccctgggccttgttgggtaactggctgggctgcaccgaggcctgagacaagttctcctaccattactgtttggccccacaccctggctggctccactgtccccaaggctctgtgacgcggccaccggtggcctgtctcacagccatcacttcgttccttgctaagataacccagttttgttcaggaacttgtggttctgtggctcggggtgtggggctcactcagcccctcgcgcgctatgaacaaatagaggtaagtctgctgtagtggcctctggggatattttcctcaccttgactgtgtgatcagggacaggacacatcttctatggcccctggccattgttgtgagggtgggaaggccagagctgctacaagcttctccatcaccatgagaagccagcccaagatgttcaacaagaaccacaggaaggacaccaggtcctggagctgctgccctcctgggctcctgtgtgattctccccatgcagcaagcaaggtgcctgatgtcctcctgcgtgcaggcgagtctgtagaccaccatgcgggtgaatctgcggctcagtgcaagtcagtgggagcccaggaggtggacatggacgtcagcctggggcaggagaagggaagctgcagtcaaatgtcaacaggaggggccgggcaccgtggctcacatctgtaatcccagcactttgggaggccaaggtgggtggatcacttgaggtcaggagttccagaccagcctggtcaacatggtgaagctgtctctactaaaaatacaaaaactggctgggtgtggtggtgtatgcctgtagtcccagctactcgagaagcagaggttgcagtgaacaggagattgtgccactgcactccagcctgggcagcaacagagtgagactctgtctcaaaaaaaaaaagaaaatgtcagtgggagactagaagttagctcaacacagtggagtgggaggaagcacatcccaagctggggaaggacgtgccagcaggtaaagatatgggggagagacaggactgtgcagtgttgtcagggctgaagccaagggtgggagcatggagagaggagggcctggaagtagatggggtccatgaggagggttcttagcatccttatcccccaacttggccatgggagaccagaaaagttggtcaattatccaaaagcagtcatatttaagtctttaaaagatgtttactttaggctttattatttgcttttgtttataaagacagacacatgctcaggaactggctgagatgatgccttcacacggatggatggaatacccacaaggtaatcctggagacatctgcagctggaattattgtagcttggtgtaccccaatatctccagctttttaaaaaacctgagacctttatcagctgcttcagatgagctttgagatatacagaaaatttctcattcaacagaaatttattgtacttagcttgtatgctaggctttggggatgcaaatgaataactaagactcagactttttcttccagtggtttactgtctttgttccttcaggctgttgtaacaaaataccatagcctgggtggcttatagacaacagaaatgtattgctcacagttctggaagctggaagtccaagatcaaggtgccagcagatttggtatctgg

SEQ ID NO: 1882771 - DNA, 4001 bp, Homo sapiens
aatttactgagaattatttcagtcttactaatacattaactcatgattattcccaagttgattgaggcatgagttctatatgtataaaaaagactctggggccagaacaggatgtctgggaagccagagcctcttggtacaatcatgaaacaacctagagttccttcctcagtgcagactgttttggctctagagtctttctgcacagatagaaatcatgcctcaatgaccttgagactaatcataaagctactttagtatatgggcatgatgactccaaattggtaccactgacttcatgttaaagagttgttaagactccagtaagcacatttttgagataaataatttagacaagggaaagtaagcttgtaccaaaaaggtcagttccagtgcctgtcatagtcatccaagaaactgccaaggccatagtcagtactgaggaaggaccccttcgtcatcctgtgagctgggagccgtccactgtgccacaaggctgtggcttcacagccatcctaactgcatgggctatctcaaatggccatagtcaaggtaaccagtaaattatgaattggcctgacaaaaaaaaaaaaaaaactataatgaaatagcctctttgaggggtttgaaaatgagactccacttatagtctgagcagaggataaaataaggagaaggaaaatagttgggagcaccaaataagttcaagtaatgagtaaactttaaggcagcaataataataataaacaataatatacagtacttacaaaatgccatgctctgtttcaagggctttatctctcttgactcatttaatcttagcaacaagtgcatgtggaaggataattgccaggagttcctcaataatgacagaggttacttctgacgccattacagcaacaaccacagaaagcaataagacagcaaaaggattacccggccctccagacacctggcttacaccatcaccatccagctctcttctctgcatggcctggttccaaatacttcttcctctgagattccatttcctcctctgtatccctaagataatctcattactaaaggtagcataaatgggtttctgttctttgcagcctaacaatgtgaattgacataaagctcattcacagccatattgagtatagttagagaaaaaaattcagaaatataggtccatagttcagcatatgctctgaggtcatcaaagtaagcagaactccccagaaggaatatgaaagaattttcaatctgcatcgccagtggaattaaacaaataatgtgcaatatattcacatcagtacttttgccttttgcacaaaatcaactaactatgtatgcaaccatgtctgatacttagcacttcagcaaatgtttgaataatgttatcgaataagaaagtggatgtatgtgtgtggggacacaaatgtgttatgtcctatggccacctgcacatgataccaagaacactgtcaacatacatgttatctacagatagggaagaaataacaaagagaaacaaaaagctcgtgaggctactgtgtgatagtaaacgccaggaaaccatgaactatctgtacaggacacatttgcctttgtaccccaagaagttagcacagtgcctcgcacataaagaactctcaattcttctgtaattgaatggaactgaattgatctagttactatgtatccttgcttaatctccaggtagccatgtgattgcaatgaataccattaatgctgatgaattttattatcttatgaaagcattaaacttctgtacctgttaagatcaaacttctgaaatttattgttgcaggacttttccttagttcagctaaagactgggtccttgtccatcccacagccacaaaaatttaggcttacaggctgggcgcggtggctcacgcctgtaatcccagcactttgggaggccgaggcgggtggatcacgaggtcaggagatcgagaccatcctggctaacaaggtgaaaccccgtctctactaaaaatacaaaaaattagccgggcgcggtggcgggcgcctgtagtcccagctactcgggaggctgaggcaggagaatggcgtgaacccgggaagcagagcttgcagtgagccgagattgcgccactgcggtccgcagtccggcctgggcgacagagcgagactccgtctcaaaaaaaaaaaaaaaaaaaaaaaaaaaaaaaaaatttaggcttacagatggtttgaagagtaaagaagggtttgagtgaaaaggaagaaaagggggacacagagactctccgcgaggccagagttctctgctagagcgcttcctgcctcaccgcttgaatcccacgctacagacaggaagaggaggggccagactcctcctcattgcaaactgcgggaactgccgtagctccaccccagtgctcattgctccgagggcgcaagtctgttggagattttctgggcccccccatctgactgtctctttatttccgtaagatggctttgtttatatcacacacacaaaaaataagaacataaaggaacctttggaaaagattgtatgatgtgcttgaatttttatttttttaaatcgtaaggtattttcttacagacaactataaagaaacttcagcacccaccagcctgctttatcaaaataacattggtctctgttaactgttttttaaatttatttttattgaactccagatgcacaaaatcagattaatcagagttcttggttcttgacacaatatgatcctcggctctttcatggctttcaattagttatagattactttattcatgtagtcatttttttattttgaataatatgagtactcctgaatccacaatgcaatccaaaaacttaacacattaacaataactaggcttcaccctatcttgtgttcctgcctaccccttcgggacaaacactatcctgatttttgtgtttgtcactttcttggtttttaaaaaacattttattatatatataccacatataaaaaatatcatatatatgatatatatataatatatatatatatagtcaatatgttgttttcaaccgatacattattttacttgttttgaccttcattaaaagcgtatcatgttacacgaagtcgtctaacacgcgttccagggactcaatattacattactaaaattcaactgcgtgttatatgtctctggtccactcaatgctggcttgttctgttgtgaagacttgcctcaattttgcatgatttggggttgtttgccatttttaccattagataaactactggtgaacatgctcataggtatcttttggtgtgctgtgcaagagattgtcctgggtgtacttcttatagtggagtttctgggccataggatatatgaataactaccttcctaatagactgccaagacattttccaaagcggtcgtcccaattttcactcccaccagttggtccatacactctaatacatggttagtcagattccttaatttttcccaataaaataggtgaaaaatgacatttcattctggccttgattctaatttccatggttactaatgaggtggaatatttcatcattttattggccatctatgttttcttttctataaagcactcgctgatatattttgcatatcttttttattgaattgcttgtggcttcggaatttttttacataaaataaaaattgcagataaagttgagatcctcatgtagctatccttgtcacatttcctttttcattcctcagcataaatcactatcattaatttaatgtttctctttcttaggcaccttttgatcaatttatcatatatttgtgtatatataatatatacatagtgctattgtgctattttttaaactaacaatcaatagcatcctatttgtcaatgtttgtaaaacttacttttctctcaacattatgtttatgagatttattctgattgttgtggctctcattttgtcttttaaactggtatatagtatttc

SEQ ID NO: 1882772 - DNA, 4001 bp, Homo sapiens
ctgccagattaaaaatatagtattagagcagaaatcatggagataacagccctcaacatgcctgccttttgagtcatgatgttctaatatggactggcttttttgcagcccctggggcactattgtcattctggaatctcccttcctcattgttgcctctagtttaacttgactctcttgctttctgaattctgtctcttcctctttctagattactacctcctctgctagaaaacatctgttaatgcctttttgaaatggagtagaaggaaggcaaagtatttgagacattgcatgtttgaaaatgtcttcatttttacccttacaattgattaatagcttggctaggtatagaattatagcagggaattcttttttccttcaaagttttaaaggcattgttctgtctttttttttttttttttttttttttttttgcttctagtataatccaaaaagtcagattccattctgattcttgatcctctgtatagactttcttttttctctctagaggattttttgtttcattgtctccagcactctgaaaccttacaatgatgatcattggtgtggatctattttcatctggtattggacaccctgtaagactttcaatctggaaactcacctcatttaaaaaaaaaattacttcttggatgatcgtcttcaatctatttgtgtgctatctttttccagagagacaagttattcagatgttgagccttctgggtcttgtcctttacttttttaaacctggtttccatcttttttcatttttctggaatagttccttaactttattttctaacccactgttgagttttcaatctctgttatctataagattttattttattttttatttatttgagacagagtctcactctgtcactcaggctggagtgcagtggtgcaatcttggctcactgtaacctccgccttctggattcaagcaattctcctgcctcagcctcccgagtagctgggattacaggtgtgcgccatgacaactggctaatttttgtatttttagtaaagacggggtttcaccatgttggccaggctggtctcaaactcctgacctcatgtgatccacccgccttggcctctctaagtgctgggattacaagcatgagtcaccgcacccagcctgctatctgtaagattttaatttctaagggcttatgtgttttctgtatattcatatacatagccatgtgctgcataacaacatttcagtcaacaggggtccataagattataatggagctgaaaaattgctatctccttgtgatgttgtagctatcataaagtcataacacaatgcatcactcgtgtttggggtggtgctggtgcacacaaacctactacactgctagtcataaaaagtatagcatttataaaaatgtgcagtacataatacttgataatgataacaaatgactgcattactgttttatgcagttactgtactgtacttctcttgctttccttcatctacccaattccaggccctttcctctggtttcttaatgtgtactctattggtgacccaaagcaatggcttcaggtctcacctttatacctggactctcagatttaccttttcttttgatttctgggatttaattttcatctctttacttcctttcatttatcatatccaaaactacatttctttccctcaagtagccaagattctgtaattgcccactcatattaatcactctaccgacacttacgttacctgggtgagaaatattcgcatccattttcattcattctgccccatttctaaagcaaccaatcatgacatcttgccattttaacttcataatgtccctcttctttgtctctttattttaataacttctgacccattgatcattgttgcttttaagatagtccctggcactactaggaggtcaaccattttgttcttttcagtagccagatgccagcaagttactgtctcttcaaattaagctaggtcatcctgctcccctatcctttcacagtttctgaagttggcttctatactcagttctaattctgacatcacactaggcagtgctgggcatcattcatcctaatactctataagtgacctttgttttgtctttgtgttttgccgatgtctcctgtaatgtattgccaagcaaaatgtagttctgtaaatgcagtctgtgccctccttgctgccttgatgcatgccagatctcgctctcctgaatatgtcaggagcttgaaagcggcatcaagagacttccagaatttccatgcagcttacccatatatggaaatccaggagattcctttcttatcatctctccattgaatcatagagcaggagaaatattgatgacataaaaagcctaacagagaaatatagtcctatcttaaaagagttccagaggtatgtggagatccttctcagtaagaaattgccaacaaagggagctccacaagtcaaataataatcctcaagccaaaagggtgttgttatgtttagcctctttttccagtacccgaagcagaaaatggcctctcagtagggtcagatgggtctctcccccagtgaaataacctcaactatgaaactctacagcacatcaggtgggaagggagtcacagaacttcctaagatttattacctacaaacttggtacccatgatgagctccactcatcctccccagattgagaaactgtataacactcgtacagagattatccccattagactatgagtttcatttcctagtatacatacagcaaaatcctgcatgcatagcaaatagagaagtggcttttgatataaccttttcaaaaaaatcttatttgaaatctaaatatagaaaatggataagattagaaatattttgcttggagctggctaggggcctctatgaaagttccatgtaacctatggagaacactagtgctctgggaaatatagtttgaaataaatcataataaatatcatgtatgtccacatttcagagagtatgttacaaatgctactgttctctaaaattaactttgtcccctttctccagatatattagcgacaaacttacgatgatttgggcttaatgtccttaagctggttggattggtgatggatggcatcattcaaacctcccaagtctaagctgatggggctccattgacatcaacacaaatatcaaatctcagggtctgtgcgatgagcaagaaaatcttgattccagttttctttcaaattagtcccatgtgcttacaattgaatgaattatttttaaaataagaatgttaccaaaatgccagagattgggtccaggtcttcttgctcaccaagcagaaagctaatcactgggacaaagagtattaccagggcagaagactttatatttgggtaacgtcaattgggagaacaggagataagtctcaaatccgtctctccagcaaactaacattaggggtttatgtaacgtggaaagtggggaaaacaggaattagggaggggcaagaaagcaatcaagatgaatgaaggtttgacatctcatcctctggatgtggggatctagtgggtttcagttctaaacaaggaactcagatgggacaaatgtaagtttcaagttttaagacaaggaaggcccatttctacggttattcaaaaacctaagaacagatcatctcattgtttgtggagattgaggtttgctacattccccaatgataaaatagaaaacaccttgtttcatcacagaatacttttttaccaaagaagtgttcaggctttcaatgcacttataatttatgtaaggcaataagacactagtgtacttgttttccagttttagactcatagaaatgtacttgtaacttgctttttaagtaaggaagaatattctgcatcttattccagaagttgtgttttgtccccttctgcaatcctaccatgccatgcctatatatgaaatctctttgaaaactatagaagcataggagttttat

SEQ ID NO: 1882773 - DNA, 4001 bp, Homo sapiens
acttgacccttaaacctcggccatcttggggctgcgattcaattttttcctgttcgccattggctctcttgtctgtaacccccttgagttattgatagggtcttggatagcccctgcagtgtctttgtgtgaatttccaaaagctctcagctcttggcagtctaaccagaaaagcatccccctgtggactgaggtggctggcacctggccagcccttggaatacaggctggtcctcagccctcacttgcacccctctgctcagcacacagacacatgctgtgggctggagaatggcaacacctctgtcatttgtctttgcctctggccaaagtgtcaaagggaagtcagctctgatggcaagtcaggcaggggttgctctccaggcttctttgactgctgtgtcaggcgaccacaatgtcctggcaaggacagcttaactcttgccaatgggactttcactgatttattcaaacactgactgaacacctaccaagtgccaggcatgtgtaagatgctggggatattgagggcacaccaagacagatgtggtccccgtgctcatgggcctcaaagtcgaaatgtgggacagtcaaaaacgtgtgagtgggcatagtaatttcataatgtatgagggctgaggaagttatgaccagactgctgagaaagaaaataatagaaaagcaagggatggatttcgaatggggcaattgtggcgagaccaaaaggataaggataagccaaagccaagagcatgagtggtccatctgaaaaacaaaagcagcatgtgtcaaggccatgaggcagaaaaagactgacatgttccaggaaccaaaggggcactggagtggaggcgatgaagcccgagaagggaggcacgagtaaggtctttgaaatgtgtatgacacaggttatgcaggactcactaaggctttccaactgcattcttcatgcaatggaagtcatttgaaaggctttaagcaggataatgacatgattgggtttagatttacaaagatcactttggctgacagctctagttgctgtaatttcctttatatgccttgctcagcctcataatgtaccttcctgattgggagttggtgcaaggttgatgtacccccatattcacagtccctggccccccatgccttttccattatgccctatgcttgtgcctccacaaaatactgagccccatatctgtgaggagaacttccttgacttagtttcccccttagcatttcccactttccaagcttcaagacatccacaagcaaacatccttgggacactttcctactcacatgaaagaagcagggttcctgttactctactctttcccaagactcaaatgtgggcccaaactacctgtgaagctgacatagtgtacgtgttaatctaaagaccagaaatgctgttgcaaaatgttttacctttatgtaggtactaaagacgcatttgcatttttctccaagtgctctggctcttaccagacaacagaaggccagcagcacggtggtctgatgagtggattggagtgtgactcatcagcgggtcttcctggagacactgcggctcagcagcccctgcggaggcctgactgcatctggtgaaacttccttttgacacaggtgttggtgacatggtcaagtcatgtagaaatgggaaagtcagttgctcttttcttttgtggcctgtctacacagcttcatgaggagaagggtggggaaatttctgtcccactactcagagacattttaagaagaagaataaatccaagcacctggaacctgaaatcaagtcactttttttcttatccattggtataagggaaattttggagacaaaaatataccctaaaagaggatacctagctttctttttggaagtctttgcggggaaaagggactgttaaaagtgtagcgtagttggttaagtgaaaaatcctcaggtaaggcttccaaattcaaatctcaatcctaccacttcctaggtgagtgggttcatctgctcaggctgtcataatgaaataccctggactaggtgacataaacaacaacagtttattttctcacagttctggaggctagaaagtccaagatcaaggtactgaccaattttgttccccagtgaaggctctcttctggcttgcagatggcttgccaaattgctgtgtccttacatgcaagagagagacagcaagagagagcaagagagagagagagagacagagacagagaagaagctctctggtgtttcatcctcactaatcccatcatgagagctccacacttattatctcatccacccctaattaactctcaaagaccctgtctcctaataccttcaaattacaagttaagactttggtacataaatattgggggggacacaaatattcagtctatagtattgcatcccttttgcccccccaaattcatgcccttattgcatacaaaatgtattaattcctccccaatagccgcaaaagtcttaactgatttgcaatattatctctaaagtccaaagtctcacctcagtattatgtaaatcagatatggatgagactcaatatacagttcatcccgaggaaaaacttctctccacttgtgaaactatgaaaccaaacaagttgtatgtttccaaaatacaatggtgggacaggcataggatagacattcgtactgtaaaagagaaatattagaaggaaaaaagaggtgagtagtcctaagcaagtgtaaaacctaggaaggcaaataccattaaattttttttttagatggagtctcactgtcacccagcctggagtgcagtggtgcgatctcagctcactacaacttctgcctcctgagctcaggtgatcttctcgcctcagcctcccaagtagctgggaccacaggcacacaccaccaagccaggctaagtttttgtatctttggtagagacagaatcttgccatgttgctcaggctggtctcaaactcttgagctcaagtgatccacctgccttggcctcttgaagtgctgggattacaggtgtgagtcaccgagcctggccccattagaccttaaggctcaagaataatcctctttggtttgctcctccaccttccaggcccagtgggatggcagcatctcatttctttggctctctgtggtagctctgcccacacatgcttctgcagagttgtggtccagccatctgaaacttacgtggaggcagccttgcacccctggcctgtgcactctggaccagtgataggattggcagccctgatgaagtctgaattgtggctctggggtccttttttccttttcttgaaagatagcacatgtttgcaaccagatagtttcatgattccatcaggtaaaacccaagaagtctgacagacttggtgcattttgttgtgtcttttctgtcccctttagttcacactggcagtgtctttgctggtataatctcatctctattcctggcttctgttaagatggctgattaaatggagaaactgaatgcatgatctcttattaaatggttgatcatccatactcttagtgttcttttcagaacatttctttttgcaatatggaggggctgagaaattttcaaatctttaaattctggttctttcttgcttaacaaattccttcttcaatttatctctttcttcacattttactataaacagtcatgaggaaccaagacactccttcaatacttggattggaaatctcctcagctaaatatccaatttcatggctcacaagttccaccttctacaaaacattagaacatgaacacaagccaacaaggttctttgccattttatgacaaatattgcctttcctccagcttccaataacatgttcttcatttccatctaagacttcaccagaatctgtgttaatgtccatatttctagcatacatctcaaaactctttcagactgtattcattacccagctccaaaattactccacatgtttaggtatttgttaca

SEQ ID NO: 1882774 - DNA, 4001 bp, Homo sapiens
acccatgggtagaagaaacacgggcctcaaaactcaccctttccaattcatatcaagaatacacatcctggcggggcatggtactcatgcctgtaatcctggcacttcgggaggccgagaagggtgatcacctggggtcaggagttcaagaccagcctgaccaacatggtgaaaccccgtctctactaaatacaaaaaattagtcaggcatgatggtgcatgcctgtaatcccagctacttgggaggctgaggcaggggaatctcttgaacccgggaggcggaggttgcagtgagctgaggtcgtgccattgccctccagcctgggcaaaaagagcaaaactctgtctcaaaaaataaaaaaaaaaaattaaaaattaaaaaagagtacacatccttattgtgaaaataaattgcataggctgctcctcattttcctgtcccgtgctcactatgcagcctgctaatggtaaaacgtggcttccctacccttgcctcaaagacagaatgcattgaccagaagacaggaatatccagctcccttggctcctctatatctcactgccattgaatgtaatttaatccagctgaaagaacccatttctggtaaaattttccataaggataaagaatgtatgatcaatttctgaagctaaggttatcagattcctaatcccaaaaggctctaggcaatgatcactctaccacggaaaggactttgataaggctctgtggccatccagcaccttccacctcactgctcccctccactgtggacttgtgtgtcaagtaaagaagtacagcagataagtaaaacggaaaaaaataatgaaagaattacaaaggaagactaaggaaagagccaagtgtctacacgaccacaggagggagaatataatggtaggataagcagagggtggctgttcactgtgtcaaatgctacaaaggtcataggacctgagcaagtagaaaagacttttaactattaagtattttctatatgtcagtacatggtgatgagcaaaaaatatgttatgtattaaaagctaatggatagcaatggaagaactactagctgaatgaagattttaagtgggattatttaaaagtgctaggtaatttagaaaattattatttataatctttgaaaggaagaataaaaaggagtaaaattaagtgctttgacttgttaaaagtacaggttgctaattcactcaattatacacagtctgggtttggacatttaagaacatcaatgtgaaaccaactctacaaaatgaagggaaacccagacgatctcttgagtgtttgtctatacagagagtcttccctttaagagatgatagttctgataaaactgcatccgttgatcacaaatgtgaatggctggggggaaagcaattttacttttcaaagttaacttctgatttgagtcacgaaacacagtattcctgaaatacctgcttaaaaaaacaaacaaaaccctgcccttctcctttgtagtttcaaatttcccaaaatgctggcatctcaagtgcaactaaatacataagccagaagacccttaataaatagtggtgcctctgatgggacggatgccagccatcccttccatgtccagtgactgagttcatgttcaaatttcatgtgaagtttagatggggagagttctgattctctaagatcatctttatttagagtagagacagggacatgaaaaaggattacctaaacagttccaattaaacaaggaaattgtataaagacctattgcacttacctaaacatgtggcttagaggatcacattgcccagctttgatagccaagcagtgctagtggaatccttctttcccagtcagtaaccaataaagtgggaaaagctgtgccccttgttccctgtctaaaggctgcaggcgaacaggctgctcattaactgcaaccagggagtaaccgagagagtatctgccaattccgatttttcctttgtgtccagacagaattcatttgttaggagtctcctctgtgaccttagagttgactacagaaaacaatacatttacatgatgaaggtagcgtcaaagatttcagtttattaacaacttggaaagacgctaattctggacccagtaaatacacagatggttcatttaaggaggaaatatctgcaaagtcatgtttcctggtgtctgagacctacacaatagacaagtcaaatggttagcaatctcagtagtgtttctttaatttgatttgaatcctgtactttcaatgttgacttctgagctttatcttgactttctttgattggcacgcccttcccaaggagctggttgtctaggtgatgaatactgcatgtcataataaaacaaaatacttttgaggtaaacagtcactaatgcactggctttggaagtttaacctctcccctgatggagggaacgggcatgaggatgcctccccctggaaattgtcaaaacagggttcagtgtcaattcatccatgtacttgctcatccttgacgatctgcagtgaatctacattatgaaaatatttttagtaagctggattttttaagaaataagaaaagaacactacatcatctcctgccaattggtatacggcatgtgtaaatcatttctttacaattcctttcataacttataaaattcacattccaagaatttcctggaaggatgtatgcagttagatttaggtggttatgcccttttcagtttcagcacagctttgagtcttgccccaacctgagacctgacccccaacccccgattatcagtaattccatctagttcgcataaagagttctctcagttattgctcagtgacaagcagtagcttgagagaggtgggaatagagagcaatataatagccaatccctttgtactttttatggaaagtagtgaaactgaagagagacaaaagccatcttgaaagagtgaaaatgacaacaggacatccgtggctcattaggctagcacagtaggcttccccatttggagaaatgggatttgaagtcccaagaacaaatgaaaggtaattgttttgaatgctcatgctattatttatttataagaatctacacacacataccacatgcacacacacacataccttcacacctacatgcacaccagagagcttagtaaatgagtatgctgtgcccaagaatggaaagggtagaaacagcaggagcaggttcgttggcagagctatacagcaaaagacaaatatacccagcatacagtatgtgtgcttggctcaagtctgtgcaattagtacttctatttacagcaaacctcttgtaccagcaatttaagagtaaatgacaactagtttgaaattgtttgatcagaatgcaaaattgaaccaaggtaggttctaaagcagattaactaactcactttttttccccctcctgctaattgagagtacatgtgctcattcctggcattgatttgctggcttctaattcaggatatgagtttaaaatattaatccacaaacttctcattttctttattggttaatacaactcatgacaaattgtactgcctaaattcttcatcttaatgcttccactctgaatttttttctgattcttccatctatttcatatatttgtccttatcactcccctcacaggctatatttttattttttcctctgctaaattttcttagagcaacattagtcagaaaaatgagaatatgagtaacagagattaatagataccactcagaggacagaggctcagcacaatgtaagctctgtgctgaagaatggaatcattggaaagaaaaagagttgggtgcccagaggttgatgtgggctgagtccttcttttctatgaacgtttccaaataccttatttggcaagcactgagtcttgcattagtcaatccgttttcctttggagtttgcaattaatctaattttccaaagatgccaatttgcctgtttgctgaagagaacaatattggtgt

SEQ ID NO: 1882775 - DNA, 4001 bp, Homo sapiens
acagcacagcacagcacagcacagcacactgaataaacagccccagcttgcctgactcaaccttctactaagccacctcccaagagagcaagaaattctatagtaattatacaccaaccatcttctggaaggcaactacgctcaccactgtaccaccaacacgccaaacatcttttgaataatgaagatcataatttgagggtgtgattttggggggggatctggcatatatgacattatatagaggccataatctaacactttaaatatcaaagctatcttttctcggtttctgcttttatccatgttttacgtactttctttgtcctcttctgatacttttagcttatttgataaccctggttgagaaccaaagcatcatgaatcacaagattctctacatattaacattttgttagaagctcaaagcacaagtctttcattaactgttgatcattatattatttttgccagaatatactggtgccttgtacacttgagttttaatagcattacagatatcattttagtgtacatatgtcaaaaccaaaactgcctttatgtcaatatgctgcaaaaatctatcagaatatatcttaattcttaactttcattgttgtctgtgggttgtcttttataattattatcacatccacagtattttctggaggtaaatatgaaatgtattataaacgtactgggggaaaatgctctttaaagcgtttccctagacaaagcaccatttaggtgttagaagcaagaactagtgaaatcagaaattgctgtcatacatactcaccagtgaacgggcgtacagaggatccccaagcgcaggacttgtcctggaagcagaggattggattccatcaggaaaagaggcaagtagaaacaccaaatgctggtgctccctttccccagctcatcttatttgcaggcacacagattttggaatcctccaggactaacaataaaaaccacactaggttgttttcctaattcctatgaaatgagtcagtaggtcaaacaacttatccactccagagagagaacaattccttgagctacactccctgtttccagtaaccctattccctgtctgtgcccctggataaaagtgctgccaataatgcatggagagcccaccgggttctgaattagacacatcatagagattgccagaaagttagttgccttcatgggatagtttcccttatgaatatttaggaggaaaaaagtccagttaagagtaacatgaggatcaagtttcttcatttaaagagtcagcataactttttctctatcgagaccatttctttctttcatataggaggactgaatgatgctgaaaataaatatagaaaagcgataactgtacctttaaaagcccccacaaaccacttccttctgtaaaacaccctttcctcctccaaaggtctagtatattcacaagattcactgattattcaatgaatccatattcttaaaaacccttcacagttgtctgtgcgtcctgcagttccatactctgtatcatataaagcagaaggtgtttaagagcttgctagccgtcatttaaatccatgactcaagacgaccaacactgggttaccaataatcttcagaaagtaccacctactcaccgagtgtaacatttcttgtagttagcgacctctgcttaggaaatcaccagctcctggcaatgaatccatacttccaagaactcacacattcaggcaaatatatggacatacagctctaaatatagatacagagaggtctgccgtgacagttcagtaggagactggaaatacttttgctttctgtatcgatagtactttctttcctttttaaagagaaggtttcgttttgatcttgagaaattctgataaaaccaccaactgaaaacctgccattataaaggagggatttcacaacgttcattccaaaaaactgtggctattcatttctggaagtgattcactgcagaagaatcgctgtttgggggtggagggagcgttgatttttagaagccagcctgccctctgagaagtgagcagcaacctctgagatggcagccacgtgccttctgacccccagccctgctccctgaatcaccacccctcgagatgacacgcagtgaccaatttcctcttaaaactcccttctgttcaaaaaccctatgatccatgcaccctctgtctaatcctctgcgatggggccagtctgcagatccgtctgggcgggctgcggtagcattctccacctgccaacactcagttgctggtgagtaaccagcatacggactctcacttcctgtgagtatttctgaaagagcttatgatatttccttcaaaaaaaaaaaattgtggggaggaaagccactcggggaggagaagcaacttcaacaagcaaagctaaaagcatgcaacgtgatcactgttgaccagacacgcctaattttaatttggtttctcaacccctgtgtaattaagacagcccaaagagaacagcatcaagaggaaagaaaaaaaaaaaagacatttcacaaatgcttagaccttcggtgcgcgtgaccagaaaagtaattttaagattcaagcgaaccaatctgaggctggttggagcattaacccttcaaggaaagagaaagaattatttttgtttgtccccaaatttcaaatacggaattcgtcttccctaccaggaactgagataccaaaaatcagcctctaaataccatcctctgggcttgtaagatgaaaaaactttttcagatttgtccatcacaggggtagaaaaatacctatttatgagacccagtcacattaacagagcagccgacatggtgttcacactcaggcaccctttgaaaaccggccactaaggctaaaatgtgacattttgtatttctctaggctgtagccaaacctgttaatttatgttagagagaagggcagcatttcttgacaactgggcaaaatgagtaagaaaacttgctttcatcccaccttacagagtatcaatggtgacaaagctcactttctgagattagtagacgttttgctgaaagaaagatttttcagagcctgtccttcagcttcaggctgtgaatgtgcttccaacttggggcctccatgtgcctgcatggtggggaggggggctcttgaagggggaaggaggaaaatacaagcttctacttaatgggcactgaagaataaaacaaatcacccacattcacacctgtatttatcacacaatccatggaagcccttaacttgaaacacggcagcactttgccacttagaccccaactcttttatttcacatttttggatgtgaaattctgaaagggaattttcactttttttttttgtttgtttgagacggggtctcactcttgtcgcccaggctggagtgcagtggtgcgatcctggctcacggaagcctcgacttcctgggatgtgataagcttttaccatctttaccaaactgatattttaacaagaagagtatggaaatcatttgcctgatatacataattgatttatttatttattttagaggcagggtctcacttcatctcagcctccagagtagctgaaactacaggtaagtaccaccatgcccagataatttttttttttttggtagagatgacgccttgctgtgttgcccagggtggtctctaattcctggcctttagcaattctcccgccttggcctcctaaagcactggggttacaggcatgaaccactgtgcccagcctgcatgatgtaatctccaaattgagggtaagtaaaaagtagcacctataactagaggtaaatttttaatttaaaacaactacactacgcaatagtcatctcctcagcccttgcccacgagatcttatgaacctcctcaatagaaaaaaaggaagtctgtgataggatcaaaggaacaggaaccctttacatggagagtaattttaaatagctacaatttttgagcttgtccgttg

SEQ ID NO: 1882776 - DNA, 4001 bp, Homo sapiens
aacagtagaaatgtacccacataaacaagctggccctcaggcaaacattactactattcacacaaacatggggcccttaggcaaaggtacattttccacgaggcatatgtgactgttgaaagtaggggttttgaactcgacctccctaggtcctagtcacagtagtcctccctgattaactccgagcttccactcctcctccaactataaaataggggtaacagtacttctacgagtagatccatgtttggggagccgcagtatctgacacagagaccccactgagtgacagatgaatacgtgttagctattttagctatttttactattttgtccctaaatagatgtgatttcacaagtagctattccatcaagctggttacttctataaattctcactgcaccaaaatcacttatggggaagagggggttaaaaatacactgtccaggccctatgtggatgtgggtccaattggtctgggattgggctggcgttagaatccttcttaaagcactccagttggttattacacgcagccggccttcaggagcacacagaagtgtctacccgtccaccgggatgtacacaccacctgtaaggtccgagttctgagccgagcagcgcaggcaggtcctctctcctggactaggctccccgaagcgctgcgacgacaaacctagcactgctcgccgagaagcgccaagcccctcagccagcgccggggcacccgcgcggcagggctccatcgggggccacacgccccctcgcgcgccctccgcgggcgcaggcccctccggcccgtgtcaccgcgccctcgcctcccgcgccccggccccctcccgcccacggcacgtgactcgacacgcgccagctgcacgcgggctccatcaaaacaaaaacagaggaggccggccgggcggcggcgggcgcgcgcgggggcggcagagagcgggcgcgcccccgctgcccggcgccgcgaccgcgcctccaccgccccgggcaccgccggccgcgcgccccggcaggccgggggcgggagggcagagggcaccaccctgtttaccgccacggccccgccccgccagcgcccgctcccggaaacggtctcccgggagagggccggcgagtgcgcacccacccgcggcggggaacgccggccctgcgtgggaggcgcccggctccggcggcccgccgcccccggctgctgcgtgtcacccccgtcacgactctgctacgcacttcgcccccagctttcagctccggcgcttccgcagacccctcacgtggctgccgcctccctgccatggcactccccggcgaccggggctgcggcccctagcgctgcgagggatcccgagcctgtgcccaccccaccttggacgtcaccctcctcggaccacccaacccacaccttccgcctagggcggggcgaggggaggacggctacgagctgtcaggagcctccagctttccccgtgacgaagctcaccctcgccctgatgtcgccactcacccagcagcgggctgcgagctggagcagacgttaacaccgagggaggactgaagggaacgtcttgatttttctccttaatttgccacagacacagggaaaaaaaaaaaaaaacaaaaacagcagacgcagctctacctttgcgctggctttaaagcttttaagctccccacgtcatcctaccccatgcaacagacttaccgaatagcaatgcccaccccacacacctgctaggtaactcgccttctggaaatcgggggccccacccaccccgccttctggaaacctgcgcctggggtggggttgaagagacactgtctggtatcctaaagtcagagggcgtgaggagaccggcgcccttcgccccacccaggcgcgctgcaccctccggtccccgtctctagagtgcaccaaggcatcctgcgtccctgccggagaaaagagggacggggccagaggcccgagttccagggagttgctgattccagtggagaaccgagacaccgcgtcctttctaattaataagcacgccaccccctacctccaacccccccccccgccccgcctttatttcttgttgacagcaaaggtgggggacgtgggagaaaggcaagagttgtctctaggttcgggatgttgggctgcgcggagggaagaggtgggatctcgaaatggaaacagtccccccttcctcccccctcccctcctcctcctcctcctcctcttcttctgtttacctcaagtttgaattttatctgcgcaacattagctggaatgcggacattgaaaaaaaaaaaaaaacactctctcagcccggcagcagctccggaggagccatgtggcatcaagccacagcaaaggggaaaaagtgctcttagcaacacaaacatggcgaaatcgctctcacaagccgggttcccgcgacagccctaccttcccccgctcgccttccgaacgtcctggccaggaaccgcagaccccttccgggggacggcgagggggccccgggctgagcgagggtgggcgcacggggcgtgctaaggggaaattgactagccagccgatcagctccgccggcagcggaggggacgccttcttcacgccctgagatcgcaaaggagagcaaaattcccatcccaaagtcctgcgggaccggcttccccacccgacgaacttaccccagggctgaacgcacgctgctttagctccttgcctcgttccttcctcccgggcgcgacgcgaggtgaaaatgatgcgcacgtagatttgtagagcgtattcttgagaatttccctgggatgaatcgggaggagcggtggagactccggagacaggtgccgcgctggtctgggctgccggctaaaagttgtcctccgcgcggtgggcggtggggtccccggccagggccaaggaccccggctccctgccccccggcgtcgcccacttgtcacgccaggctgctgcgtgcactcggctgcaggggaggtggcgtagtttctcttcctcccacctcttctcactcacttgtttttgtagccgtgggctcccctaatgctttcctctccacaatgttgtttcattatatcatgtccatcatgtgacaccagagaggcctctctatggaaacttaaaggggctcccacgtgactgcagcagcaacaacagcagcaggactggcggcggcggccgcagcggcgtccgtacctccacccaccgggagcccctcgaagcatcccggaggggcttctggcgctgcaggagccccgatcggggagccacagcatccgggagccgtggtgtctgtgcgtgcgtggagcctgtgctcatgacataggaagccgaacagaaggagcgtcctcaaatcctttcctacagtcaccaaacccacgctctgttaaaatgacatttcgtggctcctactttgtttccccggagagcaatgagttttctatcaggcctgatttagtttgacaaaagtcaaaaagaaaaactggatttgtccctctgcgagttcagtcagatcgctgggaaaacagaaatgacaaaacaataataacagaaatagaaccaggcatttgatacataattaccatcaccacggctttcaagctttctggaattacgttcctccagtaactgttgatgatgcttgcaggaggcaaaatgcaatgcagtttttctcttccgcagctatattagggctttgttgctgacaacagtgaaaacttgtttgtgtcaggaagtgaggtacggagatatgacctggaaggtacagacaaaaccaaagtggcagtttttgcattacttttctgaccacattctttcaaatggtgacaagaaggcggtctgctgtaaaattcgtggggtgtttgatgggaaacaaaataatcagaaaaacataattatccctagccataccatacttgctagacgctagaaagtatacatatatgtaatctctgtatacatagagaaagcaaaaagcatgtg

SEQ ID NO: 1882777 - DNA, 4001 bp, Homo sapiens
gcgcggtgggcggtggggtccccggccagggccaaggaccccggctccctgccccccggcgtcgcccacttgtcacgccaggctgctgcgtgcactcggctgcaggggaggtggcgtagtttctcttcctcccacctcttctcactcacttgtttttgtagccgtgggctcccctaatgctttcctctccacaatgttgtttcattatatcatgtccatcatgtgacaccagagaggcctctctatggaaacttaaaggggctcccacgtgactgcagcagcaacaacagcagcaggactggcggcggcggccgcagcggcgtccgtacctccacccaccgggagcccctcgaagcatcccggaggggcttctggcgctgcaggagccccgatcggggagccacagcatccgggagccgtggtgtctgtgcgtgcgtggagcctgtgctcatgacataggaagccgaacagaaggagcgtcctcaaatcctttcctacagtcaccaaacccacgctctgttaaaatgacatttcgtggctcctactttgtttccccggagagcaatgagttttctatcaggcctgatttagtttgacaaaagtcaaaaagaaaaactggatttgtccctctgcgagttcagtcagatcgctgggaaaacagaaatgacaaaacaataataacagaaatagaaccaggcatttgatacataattaccatcaccacggctttcaagctttctggaattacgttcctccagtaactgttgatgatgcttgcaggaggcaaaatgcaatgcagtttttctcttccgcagctatattagggctttgttgctgacaacagtgaaaacttgtttgtgtcaggaagtgaggtacggagatatgacctggaaggtacagacaaaaccaaagtggcagtttttgcattacttttctgaccacattctttcaaatggtgacaagaaggcggtctgctgtaaaattcgtggggtgtttgatgggaaacaaaataatcagaaaaacataattatccctagccataccatacttgctagacgctagaaagtatacatatatgtaatctctgtatacatagagaaagcaaaaagcatgtgcactttaatatttttgaaccactaattttgtcatcatttgtaccattaacaaacacttggaaagactcactcaagtccagggatgtgtggaaactcacaatgttgagtgctgtgggtattactgactcacagtcccttaaagggtttgtaccataaatcccaaatttctgccttaaagtttttacagacatggagattttatcctgtaaatctaagccagatagctatttctgggttttttagttcatgcttttccattttataaaggaaactgtgtggattggcggaatcaagaaaaacttcgcaagaaactgaagagtgggatggaagatcttttcgtttggccttgccttgactctgtctctctccacctcatcagtttacttcatcagccatgatgaatgagctccattccaacccttctaattctataatatctctcccaagttttaccttcctatctcatgcctaattcttttcatccctttcctcctacctcccttgcctcccaactcagccccttttctgcctgggggctcagctcgggcctccccaaagactgtaccccccaccctcccctgcagctacccccacccccacgcccttcccagctcggcctctcttctttgcaactctacctccttacctcttttgacctctaatcaccttcacagtctggcccttgacttctgggcctcttcttacctctctttacctgaaatgtcctggccctcactggggtctcctccacacccttctctctggtcccatcccttctgctgccaagccccagcgttcctccggctcggcctggtcagcttgagcctcattttgttcgcgtgcccctgggctgggaaaggagtgtgtggtgcacagtggggccaaggatcccctggggccgcggcctctgcctcgccccctccacccctcccgagtcccggttgcggcgcttcctgggcggatggcttgaaattgctgcagcagctgcggttctgctgtgtcatgcaagaaggaggcggcggcggcggcggcggcggccggagctggagggggaggaggggaggaacctgatcctccggtagcgaagggctagaggcaaacaccgagctcctccagagccgcccgggagcagggagggctccgctagcccggggggccctccccgcggggcagatggtaagtggggcggtgcaggtggtcgccttgggaagggagcgcgcaggggggtaaggtggggcggcgggaagtgctagaagtcaccccagccaaactgaaggagcccagtttccagctgagagggacccaggccgtaataaggatgtccagccaaacgcagcaataattactattggagtgacgccccgaagttgaccccaagctacacagagggtggagtggtgcatcctgaacccaggacagagctggaggcaatgattcagggtttgagaagtatcagcccatcggcctggcgctttaaggtgcagctgagtaggaaaagccaacccacatcatattcccagagccttgctgcgctttctgggttgtcttgttcaaaactagtgaaagggatgggaaacctgcccaacctcactttagccacgaaaataatgctcttggccagtggccttggacaaacagcctctggtgcaacaaaacaatcaataggaagaagaacttcattcccctcaccatcctccttccccaagttcctttgaccagcatacctcattcggcttaaaggagaaagaaaactatgtgtgacattccctcccagcctacctgcagccagcctcctcaccacacaaactgcccatcccgcttctctcctcatcttcagagccatgattccaagagacattgcaatactactcactttaggtgagaagactgcctgaaactctgaacaatttcacctcccttgccctttgccacaggggattcagaaacctacaactgagagcagggaaatatacggacaggcttggcacgtaggaacattacttccttcactggagtgtagttctccagacaactttttaattatgattattcccttccattgcactcctggaaatttcaaagcactttctaaaacatcattttttttatgtcagtcatacatttagaggtaaggggttgatgggattaactgaaaggctaatgactgtctcaaaagcacatgctgttgctagggaacccaagctcctgctgctctctaatcaccagcgtgttccgtggaaatcaaactgctcagggtgttattaaaatgaatggcatcgggttaaaggcattcttgcttatgttgtagcatcctggattattatcgattgcctcacacccacatatcttgttttcctaatttgatttctgtatttgcgtcactgccagggacactcagactagaccagtcagttcacttcctgtttctcagaactggtttatatttggtctcgtagcactagctggtaaaacattatcaaactgatcctcttggaaagaaatctttgcttcccattgaaaacaaaatattccaattaaattgtaattcctgtggaaaacgtcatcatttgaggagtagactgccagttgccatttgagaaacaatccttgaaatgtaaagcctagaaaaaaaaaacatcatcttgatttcttttacccagaatcttcattcctcagcactagaactaagacaaactcgagtaaagagtagatttaagtatacttctaaaatgaaacgcataaataaataaataaataaataaataaatacatgtcgaagctggggaaatcatttagactaaacaaggcataaaattgaatggaatccaggcccaggaaggacaagtaattttgggttagcattgtggcattcggagaacacagtgt

SEQ ID NO: 1882778 - DNA, 4001 bp, Homo sapiens
gcccggctagggagtggggggcagagggcaggcagaagcaggatctgaaggtgtcaatagccagagggggctttgtgtgaggggtgggggcgcggttcagaatccgagctgttggcttttgttttcaaatgacctgtttaatcattaccctttgcaatcaacggggagcacaggctccgtggcagaggcttggcgactatttcaaatctccatcccctactgagcagccggagacgaaagtaaacaagatgccaccggcaggtctggctccatctcgcaaacaatagccggactgagcacccggctcagacacacacatcaaagtgagatttccaagcaagaacttttcacaggcagataacaggctggaattatttccctgtgtccctagagctcagtgccaaagggggcagcctaagggggctgtcattttcacgctaaccttgacccgaaaagtattcattcattttgcagtgagggagagccaccaccgccccaaaccgcgaaaaaccaaccagtaacaactttatcattcctttttaacagtcacaatggtgggcaaatgagacttaagttacagcagctagctggcactcacactcccctcggctcaggctccttaaacaacaacaacaaaaccctaatgcaagcacccaccggggctcacaatgtcaaacccttacctggcatagggaaaatccaagtgagagagacagagagagagagagagagagagagagagagagagagagagagacagacagagagagagagagagagagagagtgtgtgtgtgtgtgtgtgtgtgtgtgtatgtgtgtgtgtgtgtgattccctcttttaccttccaaggccttcaactatttttccccctgcagcatccaagcccagcctcaaggcagatgcataaacatgcctgctcctccccttctacggttgggcaaaacacccccccaccccctttccaggaccccaaggagaaagaatcacgtcctctgcagcccctccctggccctcgcccaccccccgtttcccccccgcaattccaggccgtccgcagcaagcctcgtaggcaccttgagataaacacccactaatgattttatgattttctgctctgggtaaccgcgctcagcggaatccctccccccgccgtggcgacggggccggcccaaccgagggatggggggatgggggcgtttgttttttccacggcctcgtccccacacctgtttttcattcattcattcgttcgttccttcatccattcacggatccgtcactgcagccgccccagccccccggatttcggggagggggctgcgatgggggagggggtgggagatggggggacgacagaggtggggggtggcgcaccggggggtggaaggttgcgaggggtccgggagccaggaccctgcggctccggctttgtcagacgcgagcgaagcggcggcgggggcggggcgggggcgctcccggggcccgaagttgttttccgaggcgcggcggcgaggacagcggcccggggtgcgccccctttgtctgtccccggccggcgccgcgtccccgcgcgcttacctggtcttggaggacaggaaggcaagtttgatcaggccgtaggtgaacagcgggatactctccttggcgacgctggcaacttgcagccggtgctccaggatgtggagttccatcgtccgcccgcgccccgtccgcggcggctcatccgcggggggacgagccgcggcccccgccccctccgcgccctgccggcaccgacagccggcccggagacccgggagctcggcgccgggcgcggggggcggcggcggccgggccgggccggacaaaagggaggaggcccgccaagttgcaagggggagccgcggggcgagggaggcagcgccggcagagcagcagccgaggggccgagcggcggagcagcggcgcgcggcgcccggcgcggggggagcagctggtgttcgctgtaacaaacaacttgccactcaaacgccggtccccgctgcgcatgcgcggcccgcgcgcggcctgccgggacttgtagtccgcctgggggggctcccccggtgctgctgctgctgctgctgttgctgctgttgctgccgcgggggctgggcggccggagctaccggcagcccggtgcacgggaaatgcaggagcgcgggcaccctcaggactaaggggaaggccgaggggaggcacggggcgggtggagccagcctgagcctaggcgcgccctctggcacccagtcaggctcggtactaggtgcttggagtgtaaagcgagcaaaccagacgactccggtgctggagaaggcccgagtctgggagcgccaagatgtagggcaatcggtcatgagagtgcggagaagccaaaccgaaaagcttgctggggacccggagggaggggattgacaggtcaaagggggtgacccgggggaggggacactcaggctgggttttgaaggatgaatgggagttcctagcaagagagtgagggcgcgcggatggaggacagaggccttccaagctgcaggaacagcgtgtcctagggcacagaagcgtgaaagcccccacggtgctgtgtttggctttgttgcagcggaaaatgtgagggaggagagaaaagagataaggcaggcatagtcaccaggagtcaggtcgggagggtcatgtgtgcagagctaatgaggtggccatttatcccactggagagggggtgatggggactgcgaagggtgaattcggggaaaatgtaaagtgcgtctgaggcacttccaaccccagggcccacgcgcccggaccacagaggttcctccttcatggctgtctggttttgaaatgttctgggttaaagtgattggtgcttccacctttggcagagtaatctggggacgcgatgggtgagatctatctgccagggcaggctgagaactctttttcaggggaaaattgcagttgtgctccctcaccttccctcagccctcctctgttaggtaggaacatactaggttttgtcatttccacaaaagggtgaaaagcctgtaatctgtggtagatagatcttagagcatgcatatccccctcccactttattttcttttactctttttcttttatttatttattttttagagacagggtcttgctctgttggccaggatggagtgcaggggcgcaatcatagctcactacagcctcgaactcctgggcttaaaagatcctcccaccccagcttccccagcagttgggactacagttatgcctggctaatttttttttttttttaactttcttttttcccccccgagatggagtcttgctctgtcgcccaggctagagtgccatggcgcgatcttggcttactgcaacctcctcccccttggttcagcgattctcgtgccttggcctcccagctagctgggattacaggtgctggccaccacggctggctaatatttgtatttttcgcaatgttgcctaggctggtcttgaactcctgacctcaggtgatccacccacttcggcctcccaaactgctgggattacaggcataagccaccatgcctggccttttttttttttttttttttttttgagtcggaatcttgctccatcacccaggctgaagtgcagtggcacgatctcggctcactgcaacctccccctccgaggttcacgccattctcctgcctcagcctctcgagtagctgggactacaggtgcccgccaccacacccggctaatttttttgtatttttaatagagacagggtttcactgtgttagccaggatggtctcgatctcctgacctcatgatccgcccgcctcggcctcccaaattgctgggattacaggcgtgagccaccacacccggcctttttttttactttttgtagagaggggtgtctcactatgttgttcaggctagtctcgaactcccagcctcaagtgatcctccagcctcagcattttttttt

SEQ ID NO: 1882779 - DNA, 4001 bp, Homo sapiens
gtcaagcagctcaatcttgaacaggacagtggtgtttggggggatcaagggaggggagcccagcgttccataggcgtagttcggtttgaacagaaacctggccagctctcctctctgcatgctcagaaggcccagctccatgccccacaatgtaatatctgtaagaagggacaaagaaggtgggtgaagcttgctcagtatcctgcttaatgctatcagtttcttccccctctaagtcagcagtactctggcctccatgtctccctcacacagttccctcttcctgcaatgtcttcctcctgagcctgtgcccagcttctagtgatagaaattttattcaaacttctgggctcagttcaaatgccccctcttccaggaagccttccctgaacttcccagctagaattaatcatgccttcattaagcacacccacaacactgctttcacctcccaggcactcatccgattctaccaagtgagctgagtgcaggtcagtctcctctactacattgtgaggtccttaagggtggagatgttctaatcttctgagtacaacctctcttttcaccatgtattgtgggaagtaagcattcgtcgatttttacttaataaatgaacaaagaaacattcccagtggtgagttaagtcagagtgcaaagattataccttgcccattaagccatctcccaaatgcctaggtctcaaggggagagaacatggctgttttaccaaaacccagcctcagcaaagtcaattcaaagaacctgcgctctgagcagtcttcccagcctgaggcatggtgcctcatctcgctcctaaacaatcccttcttctccagctcctactctgaatttaccctctccaagtttcattagccgaggagttttcctaaagtaattagaatcgaagggtctgtccaagtgttccaggtatccatactatttcactagaatagaggaaagaatgtaaggaaaatggacccaaaacacccacgcctccataatatcgagtctctcatgatcacacagaaacaatgcgatcagatgagcttaagctgcccgacaccacgaggtacaggaataaatctctctgcattttaggagcctgcccttcggctcagaggttcaagagcttcatggaagcatcacgcaaaggggacataggggtccttagctttcctcttaaaaaaactaattcatggcagaagcagcggctcacgcttgtaatcccagctactggggaggctgaggtgggaggatcacttgggaccaggagtctgagaccagcctgggcaacatagaaagtgccccatctctacaaaaatattaaaaattagccgggcatggtggattgcgcctgtaaatctcttatttgggaggctgaggctggagaatcacttgagcccaggaagcagaggctgcagtgagctatgttcgcaccactgcactccagcctggggaactgagcgagaccccgtttcaaaaacaaaaatccacttcaaacaaagcatttccaaccccattaaatgctttttgaaaatgaggcctctctcttcccaacagagtgcgatgacatggatcctgcggacaaaccgccccagggcgtacctagcaccgaagcatcaggcgccactaggtctccagctccttctcggatgacgtccttcagcacgccccggtcccccgagatgtccagcatcctctgacttaaccgctcgtacagggactgatggagaatgaaagccaggcctcagagccgcagacccacccggccacccctcagcgtctacgcccccacgtctgggccctcacctggccgggggcgtcgtccccttccaggactccctggtttaacgcgcttccccccatgtcctagctgccctccctgtggcgtgagccttcggcctggtgcgccccgctgcccttcctggctgtgactctggtggggttccgaaggcccctttatgcccggcagacccctaccgacggcggcattccattctggggccacgaggaggcactcatcgtttcgttccaaccgccgccaacggccctggccctcgcgagctctggaactacagaggtcgcacggtgagttgccaggtgtggcccgtaatcggagcgcacaaaacatgatgggacacgtaacgggaccacacagggcacattgggcacttgcaggggcgcgaggtggcggcacgtaatgggagcgcgctgagcatgatggggcatgtgcgggagcgccaggcggggcatgtaaccagagcgtgcggggcatgatggggcacggacatggggggttaggtggggcacgtaattggagctcgcggggcaggatggggcatctaactggagcgacagagagcacgatggggcacttacaggggccggaggctgggtacgtaatgagagcgagcgggaaatgatggggcacctaacgagcacgcagagcatgatggggcacgggtgcgaggtggggcgcacagtgggagcgcgtggggcatgatgggacacatggcgaggccgtcagggcacaggggaagcacttttggaacacgtgagtgacagggctgccgcccttgaaggagccctcggagtggctgcgtggtggggcacgtggggcaggttcaggaaaaaggatgcagcatgtgattgcagggcaacctggtgaggacacgagagccacctgccaccagcagggttcagggctcccagctgtgggttacttccaccttctttcactttccctcttccattgtattctagagaatttaggcccagacaagacactgattgattgattgattgatcgattgacagaggctcgctctgagcccaggctggagttcagtgatggatctcagctcactgcagccgccacctcctgggctcaagagatcctcctgcctcggcctcccaagtagctgggattacagacgtgcaccaccaggcccagctaatttattttttagtttttaatttgctggtaagatggtttgtagctttgttgcctaggctggtcttgaactcctggcttcaagcgatcctccagtcttgacctcccaaagtgctgggattataggcgtaggctacagccaactttcaatactgccccattgggggttacgtttccaacacatgaaattaggaggatacattcaaaccacagcagtatattatgaccataatattcattaactgtgtaacaggctgggcgcggtggctcacacctgtaatcccagcactttgggagaccagagtgggtagatcactcgaggtcaggagtttgagaccagcctggcccacatgatgaaaccgcctctctactaaaaatacaaaaaattagccggtgtggtggcaggcgcctgtaacctcagctacttgggaggctgaggcaggagaatcacttgaatccgggaggtggaggtggcagtgagcctgattgcaccactgcactccagcctgggcaacaagagcaaaactctgtctcaataaacaaacaaacaaacaaaacctgtataacagagtgtcattgaatttctaaacgttgaaagacttcacattaaaaaaaaactcacaatttaatattattgagtgaaagaaaccagacacaaaagggtacattctatatgatgctgtttatgtgacattcaaaaacaggccacatgacaacatggtaataaggacagtggctgtccttgttaggagttatgactggaaggaggcaggagggagctttctggaaacactgtacatcttgctcttgagagtgcacgtatatacatcaagtgtttatcaagctgtgtggttaagatttgcacacttgtatatgttatacctcgatttaaaaaatctaaataagtaaataaagataccttcaaatctttaaaaaaaaaaaaaaaaagaggccaggttcggcggctcacacctgtaatcccagcactttgggaggctgaggtaggaggattgcttgaggccaggagttcaaaaccagcccaggc

SEQ ID NO: 1882780 - DNA, 4001 bp, Homo sapiens
agcagctcaatcttgaacaggacagtggtgtttggggggatcaagggaggggagcccagcgttccataggcgtagttcggtttgaacagaaacctggccagctctcctctctgcatgctcagaaggcccagctccatgccccacaatgtaatatctgtaagaagggacaaagaaggtgggtgaagcttgctcagtatcctgcttaatgctatcagtttcttccccctctaagtcagcagtactctggcctccatgtctccctcacacagttccctcttcctgcaatgtcttcctcctgagcctgtgcccagcttctagtgatagaaattttattcaaacttccgggctcagttcaaatgccccctcttccaggaagccttccctgaacttcccagctagaattaatcatgccttcattaagcacacccacaacactgctttcacctcccaggcactcatccgattctaccaagtgagctgagtgcaggtcagtctcctctactacattgtgaggtccttaagggtggagatgttctaatcttctgagtacaacctctcttttcaccatgtattgtgggaagtaagcattcgtcgatttttacttaataaatgaacaaagaaacattcccagtggtgagttaagtcagagtgcaaagattataccttgcccattaagccatctcccaaatgcctaggtctcaaggggagagaacatggctgttttaccaaaacccagcctcagcaaagtcaattcaaagaacctgcgctctgagcagtcttcccagcctgaggcatggtgcctcatctcgctcctaaacaatcccttcttctccagctcctactctgaatttaccctctccaagtttcattagccgaggagttttcctaaagtaattagaatcgaagggtctgtccaagtgttccaggtatccatagtatttcactagaatagaggaaagaatgtaaggaaaatggacccaaaacacccacgccaccataatatcgagtctctcatgatcacacagaaacaatgcgatcagatgagcttaagctgcccgacaccacgaggtacaggaataaatctctctgcattttaggagcctacccttcggctcagaggttcaagagcttcatggaagcatcacgcaaaggggacatagggttccttagctttcctcttaaaaaaactaattcatggcagaagcagcggctcacgcttgtaatcccagctactggggaggctgaggtgggaggatcacttgggaccaggagtctgagaccagcctgggcaacatagaaagtgccccatctctacaaaaatattaaaaattagccgggcatggtggattgcgcctgtaaatctcttatttgggaggctgaggctggagaatcacttgagcccaggaagcagaggctgcagtgagctatgttcgcaccactgcactccagcctggggaactgagcgagaccccgtttcaaaaacaaaaatccacttcaaacaaagcatttccaaccccattaaatgctttttgaaaatgaggcctctctcttcccaacagagtgcgatgacatggatcctgcggacaaaccgccccagggcgtacctagcaccgaagcatcaggcgccactaggtctccagctccttctcggatgacgtccttcagcacgccccggtcccccgagatgtccagcatcctctgacttaaccgctcgtacagggactgatggagaatgaaagccaggcctcagagccgcagacccacccggccacccctcagcgtctacgcccccgaaacgtctgggccctcacctggccgggggcgtcgtccccttccaggactccctggtttaacgcgcttccccccatgtcctagctgccctccctgtggcgtgagccttcggcctggtgcgccccgctgcccttcctggctgtgactctggtggggttccgaaggcccctttatgcccggcagacccctaccgacggcggcattacattctggggccacgaggaggcactcatcgtttcgttccaaccgccgccaacggccctggccctcgcgagctctggaactacagaggtcgcacggtgagttgccaggtgtggcccgtaatcggagcgcacaaaacatgatgggacacgtaacgggaccacacagggcacattgggcacttgcaggggcgcgaggtggcggcacgtaatgggagcgcgctgagcatgatggggcatgtgcgggagcgccaggcggggcatgtaaccagagcgtgcggggcatgatggggcacggacatggggggttaggtggggcacgtaattggagctcgcggggcaggatggggcatctaactggagcgacagagagcacgatggggcacttacaggggccggaggctgggtacgtaatgagagcgagcgggaaatgatggggcacctaacgagcacgcagagcatgatggggcacgggtgcgaggtggggcgcacagtgggagcgcgtggggcgtgatgggacacatggcgaggccgtcagggcacaggggaagcacttttggaacacgtgagtgacagggctgccgcccttgaaggagccctcggagtggctgcgtggtggggcacgtggggcaggttcaggaaaaaggatgcagcatgtgattgcagggcaacctggtgaggacacgagagccacctgccaccagcagggttcagggctcccagctgtgggttacttccaccttctttcactttccctcttccattgtattctagagaatttaggcccagacaagacactgattgattgattgattgattgattgacagaggctcgctctgagcccaggctggagttcagtgatggatctcagctcactgcagccgccacctcctgggctcaagagatcctcctgcctcggcctcccaagtagctgggattacagacgtgcaccaccaggcccagctaatttattttttagtttttaatttgctggtaagatggtttgtagctttgttgcctaggctggtcttgaactcctggcttcaagcgatcctccagtcttgacctcccaaagtgctgggattataggcgtaggctacagccaactttcaatactgccccattgggggttacgtttccaacacatgaaattaggaggatacattcaaaccacagcagtatattatgaccataatattcattaactgtgtaacaggctgggcgcggtggctcacacctgtaatcccagcactttgggagaccagagtgggtagatcactcgaggtcaggagtttgagaccagcctggcccacatgatgaaaccgcctctctactaaaaatacaaaaaattagccggtgtggtggcaggcgcctgtaacctcagctacttgggaggctgaggcaggagaatcacttgaatccgggaggtggaggtggcagtgagcctgattgcaccactgcactccagcctgggcaacaagagcaaaactctgtctcaataaacaaacaaacaaacaaaacctgtataacagagtgtcattgaatttctaaacgttgaaagacttcacattaaaaaaaaactcacaatttaatattattgagtgaaagaaaccagacacaaaagggtacattctatatgatgctgtttatgtgacattcaaaaacaggccacatgacaacatggtaataaggacagtggctgtccttgttaggagttatgactggaaggaggcaggagggagctttctggaaacactgtacatcttgctcttgagagtgcacgtatatacatcaagtgtttatcaagctgtgtggttaagatttgcacacttgtatatgttatacctcgatttaaaaaatctaaataagtaaataaagataccttcaaatctttaaaaaaaaaaaaaaaaagaggccaggttcggcggctcacacctgtaatcccagcactttgggaggctgaggtaggaggattgcttgaggccaggagttcaaaaccagcccaggca

SEQ ID NO: 1882781 - DNA, 4001 bp, Homo sapiens
gagccctacttactgggagagccacacaatttaaagaactttggtccctaaatgacaatgctgaaaactacccatcaaacagtaacatctgcaataggcttgagtgaaaaagaaatgtctgttgtgttaagccactggtatttgggggttacttaccataacaaataaatgtggtcacccaaatattctgaaataccatctcttcaggtcatttcagttatctgagtctatgtaaataagaaaaaaataacagccagagctagctaaaatcagaaaccacaagcagtctttgttcacaagtaagtagttatttgatctgtcccacaaccatcattatttccaattttgcattgtctacctgagaactatcaaaagcacgtctgtcctactctgttccccatctggaagaaagtagacatgttcaaacttccatagccatttctgcagtattgttaaaaaatcagtgcacactcacaaacctgtacttttcttcctaaaatagggtgttgacctcaaacaaaaacaggtttaggctacatctacatgggtgaccatgtgtggcataaaatagattttccagcatgcgtttatttggcaatgacttaaaagtgcaaccagatgttttcatagagaacagctcttttagccacaaatgtttccaatttaaatgcatttgttttgactctattttgctgcagatggaaaacatccattttctttctttccattggggatagacagtgaacgttggcaaatctcatagagaatgattaccaatgtagacaaaacttcggtgagagctgaatctccaggagaaaatttttaaaagacaagtttgcattttaaacaggttggctcttttaagaccattttccccctctaatttgtaccataagtcttaaacatctgtatgtgtttgagcctagggaacttaccttacttttaagtgataagtcaaacagatctattcagaatgacagcatagcttccgggcgtgccattgatagttactgcaaacagatatttcagattttcttatcaaaatgtgaattatgtaggtgtgctttactaaattttcttgcaattagcaggttgaaatattacaggaattgtaaatgtctttataaaaataacagaaaagcttttcttattttttcaaaaacaaactaatgtgtacgtgacagagtataaaatgatcttggcaagagtacagatttctgttttaagaagctgggagttatattttaactcatgaaaagtaatgttttctttaaccaaattatccttaacatttgttgttttagtttaactctatgatttctgagaagcttttgaaaacaagaagatattttaaaattttatttcctgttttagacatttaaatgagtaaaaaaggtccaaatactgttttgagcagtaaaagtattgtttttcccctggaagagtaaaatctctgtcagccagactataatactttcacagactgagcactgtgatacacatatgctattttaaatgtatagaccctgtaagaaggagctagaaatgctaaaatgaatattaatttttgcagtagtaattagactgatgcaagaacaattgtctgtttttctcctatgtcttcccacttgcaagtatttcagttaagatgtcattctttgtggaaagtatttacatatatgttttcttagtttttccttctagataatattaacttttgttagatatcttttgattactttatctgtcatagatattccaatgaattttcagtaaattaaagttcatcttttaaaaaaccacttcacccactcttcaaactacctgaaagagttaagtattcaccacctactacacatagtcactttggcctcattatacaggatattgttcttaccaatgattatctgttgagggaaatctgggtttctcctagaccccacttaaagagaggaacactgtgagatcttggccctgttgcaaaacctctccagtcattctcccagtttgttatcactggggaaataacttattttgccagactgcagagctggacagggttctaagaatgtaaagtagtcatagactgtttaaatgatccattggaattgactgttggctggcagaagttatcgaagttatctggaaaagaaaaaagccatggttctccaattttcccctaatagtactatgttgtttaatttgtaaattataatgataaatagcaaatattttcactttactattatctcaatctgaaatactatatatgatgtgagtttctaatgggagaataaaagagaagactatctgtattctacttgggctacataattcatgctacatttaatttttaaaaattctacagctctatatttttttctaagtagtttagctttttaaaattataaagcattttcagtaggaatattttatactatcataaaacataattctttctttttaaattcgttgatattatattatgcttttgtatgcatttttacattacattatgcttaaaagcatagtttttgtgttttatttaaattaaatgtctcaatatacccttgcctcttttaaaatactattgaatgttttctaacgtgtaaagaaagacactctctcctgcatacacagcttgacatttagtttgtcaacttaatatatgagaaaagtgtaaacagaatatggaaataatcaccataaaatttttatttttttaactattatttggaaataaaatcaaatttctaaaattatattaacaaattaaatatttacaattatttttccaagtatcagaagaattaatgttcaagaattagcccatagaattaacttatttggtatggcttataaatcagttttcagatgaataacatgaattttcccaagtaatcactcttattgccattcttgtcttaatgtgaaaatttatttttttgtccactggtttaaagtctttaaatgtagctaatctatttgaaaatatcttgaaaaattgctaggccagtgagattcataaatatcaagttactgtcttgtgaattacatttttcttaaaatgtttgcttttactatttcacatgcacttaagggatgaatgttaaagtttttgaacctatgtatatagctttcagttactttcataaatgtatgtgtgcctttttaaaaatcagaaattcaagagaatccaatcaatactttctattactttatagttacagaatgtagtcagagtatagataaatgctactttgatgattatttgctgcatagacaatgaaaatcaatgtttcgtgctctatgaaagtgaaaataacttaattttaggaatttcaaataagagtagatttgtgacataattttcctaaatttagaaagctattgttaaaatatatggtacaaaaagtataagacgatgaatgtagtaaacaataatttcctttcataaatgatgtcattgacttatgggaattactaggctgtacatctggtacttagtgactaatactgagcaatcgaatcagaagatcttaattcagtaaaactgagtaatcataaggatgttaagacttcctataacaactcaatctagcctatgaaaaacatggttctgtaaaatcagaatacttgtctttgaaatttattaatatatgtttagcacaatttattgaaatctgtggaaaactaaagttcccattattctcatcacaaataattacttaaaatttaatgtatcaggagccatgaactaaaaaatataaagtagtccctaaaataaataaggtctgaacagagactcaagaggataatcgaagagtcgaaacttggtaaacaacagactcttactttatgactaatcttagtcactgatttatatctatatttgtgtaaattgaactttggcgaaaataggataaattaataaggcagtaaggcttctaacagtgaccttgggatattcattataattatgttcctttgtattccttgtc

SEQ ID NO: 1882782 - DNA, 4001 bp, Homo sapiens
aatgaaggcaagatcagaagcacttagagagctgagctgtggggcagtggcagaacaatgggatgagccagggctctggctttggtggttttgcagatggtactgccagaactggaatagaaacttgaaaattttagagaaaacccagttttagggggaaatgacatgataggtgtttgtaagatgtaatttgaagtacctattggacatccaggtgggtagattcacaaaaatttgtctttttgagtatacctcagaagagcatccagatacactaaactccaggcatgatgctataagagggttccaaaaaatttagctaaaatttgggccatattgctatgatgttactcaaaacatgaaagtcaagataatacaattgtacatcattgacgacatgcagaagtgatcaggatatctcatttgccagccctctctcttcccccaaacagtactatttcgtaaaggagactgcagagtttccacagggatcattagactaaagagggcttttgttatatttttagatatgtgaacatcttgagaatactcataatattacaaggtacacagagcttgaagattcaaattaatgaattaaggtggctgagaaatatacaaatcacaagcatgatattgagaacgataagaactatttactaagcctgtaatcaaaatgtacaatctgtatttgggaaacatcaagttagagtctcaaactagtctatttaagaactcatctcacaggttgcacagccacagaacatccctagttctgtaaaagtaagtgaaagcaattttaaatctgcaaacaaagacagtcgtctaaagctgcttaaaaaataaaaataaaatcacctctctagggcaggaactcttgcgggtttctgaattggcagggtcatttccccagaggttgaaaagaacggacctgcactcattccattttatgctactgcttgcttgcttgtgctcttgtttgatttgcatttcaactccatttctgccaacaaatgcagccccaggttctccttagaataacttcttcccggccaggcacggagtcaaattacaaactgaattggggaaggaggccaaacgaagatccaccttgtcttgctccttatgtaggagtttactagggctgcacctgggattggctttctctgccaggccttttctattatctaattcagctgtaaggtaagttgagtctctccttttctctgacagtgttttaaattttttaactattcatgcttttaaactcttctaaaagtattgcagatccttcaggatttcgattaaactttaatatacatgaatatgattaaaaataagtaaataataaaactaaggttttgaatgtaaaatagagtaggtcttgttcccaggactggctctgcctccagctatgtgaccctgggcaagtcattatacttttctgttcgtgtgtgtgtgtttgtgtgtgtgtttgtgtgtgtgtgtttgtgtgtgtgtgtttgtgtgtgtgtgtgtgtgtgtgtaaaatgaagaggtgatttttaacaggccttggcagttgtcaaagtctctgtaatatagacttgtaatgtaatgcaaaacgaccctatgaaaaagatggtaattttctttgaaggtgtttctctctttcataaaacaccttctggtatcagcaataaagggcagggaccattactgcttttctttgtttcagaataaattttgaactttttcccaacgaagtcccttagaatttttagcaatacacatttctctgcagttctatttctgtctcacaagcctgttgcttttctttttcaatagctacactcccttcccccattaaagataaataaatctcctctgctaaactggcctttccctgctaactttcaacttcatggtaagaagcaactcgcctgttagccaggtgtatttagagatgaggaggccatgttcctttagttgacatctcaaagagctttgggcaaggcctgtgtgaaaagcagtttgacctctgaataacttcttgctcatatcctacccagatgatagcaatgttttcttgtttaaataagtgttttccctccctcctactttcctggaaaataattaaatcaaatgtccacgacacagtataaaacaaagggccaggtggaattaatattgaaaatccacccctaaatgtattctaattatgaattatttgaacacttccttttctctaaaacggatgtagttttagaacctgcctatgtaaagttgtaatggtgattaaatgagataaaacagagcctggaaaacagcactgaataagcattatctattgttatttgatcatcttcagatgtaattaaaagcttacgatgaaacatttgtcaatttcatgctaactagagaaatctttgtaatttcatgtgtaaaatgtgctagtgttttcaccatttgagaaactatgttattcccttgataataaatacacagacctcttgaatctattaagtgtgataagacacttgggaaagtaagaaagaaggggcaagacttaaaagattaggaatctggaaaaattcaacaaagaaagaggaaagataaaagagagaaacactaaatatgattaaataattatgtcataatggaagtgttcataaaatagaaaaaaataatattccaataggcaggatttgagattaccacaatgttgaaagattaaggaaggatgaactgaaaagcacagtaaaatcttgctatatactccagaagctatttgcacttctcagttaacactttcagattcttggttgatgcctgtttcccaaacttgcttgtatttataagaagggtaggggtcaaggtttatttattcaccatggtatccccagcactcagtactatcatagtaaatgctcaataaacatgtgctgatttaaaacagaagtgtatgacagaagccagtggaaaccacctccccaacactactgccaaaggaatttggagatgctattactaaaagagtaaacaaaagagattataatgctatcgtatttttgaattgaaagaaaacaagacaaaaactgtgaacataatttctgacacattcattttaaaaatatttatcatgtagtacctagcctagcccatgttctcctggagcttagaatctagtagtagagacaatattcatatctgtgtatgcaaacgacaatttaattaattgaggtaagtgtcccgaaatagaagtgtgtcatcctgtgcaatgtgtaactggatcaggaaggtgggtggggggatgattggtgatatttaagctgaatgatgaagtaggcattagtcaggcaaaagctggtgggtggggggataattccaggcagaaagaacagcatatgcaaaggttttgaggcaggaaagagcttcctggcctactcccagaactgaaagatactagtgtagctagaatatagtggacaaaaggaaaagaggtgagtgaggagttgaaccatcagggatagttcatctgttggtcagctgataggaaatcattgagaatattcaaacaggagaataatacagagttacattttaaaatgtgtattctagctagatgtggtggtgcatgcctagagtcccatctgcttgggaagctgaggtgagaggattgcttgaacccaggagttcaatatggtattgagccatgatggcaccactgcactccagcctgggccacagaagagaccctgtctaagaaaaaaataaataaataaaaataaaaaataaaaaaaggatagaaggtggagagtaaacgtggagaaacacatttttgaggttactacagtaatgaacacagttttgagattactatagtaatgaaagtggaagaaaattgtgccttgggctaaagtggagccactggagacagagacatgtgagtgatttaagatgtatttagaaggtaaaactttggctgaatggagaaagaaggacacaaataggttaaaaat

SEQ ID NO: 1882783 - DNA, 4001 bp, Homo sapiens
gcctcccattgtgctgggattacaggcgtgagccaccgcgaccggcaatctaatgcattttttttgtaaattactctttggggaaacaaaattcagccttaaccaactataaactgccaattaaccaatgaatacctaaccaggaaatgtccaccttgatcgtacaaattaagaaactacataactctactaaatcagttattgaatttgggtttctccatcatgcactttatatataaagtttttcttttatatttaaagttttagggacatggatgaagctggaaaccaccattctgagcaaactatctcaaggacagaaaaccaaacaccgcatgttctcactcataggtgggaattgaacaatgagaacacttggacacagggtggggaacatcacacaccggggcctgtcgtggggtcgggggaggagagagggatagcattaggagatacacctaatgtaaatgacaaggtaacgggtgcagcacaccaacatggcacatgtatacatatgtaacaaagctacacgttgtgcacatgtaccctagaacttaaagtataaaaaaaaaaccaaaaaaataaaaaaaggaatcgttatagaaagtactatgtagagatataagagaagcagtaaaatctcattataaataaaaataaataaacttttatatataaagtttttcatggaccacaaactacacaccatagctgctagctgggtgctcttcaattcttgaattactcttttttttttttttttttttttttttgagacggattctcgctctgtcgcccaggctggagtgcagtggcgcaatctcggctcactgcaagctccgcctcctgggttgacgccattctcctgcctcagcctcctgagtagctgggactacaggagcctgccaccacgcctggctaattttttgtatttttagtagagacggggtttcaccgtgttagccaggatggtcttgatctcctgacctcgtgatccgcccgcctcggcctcccaaagtgctgggattacaggcgtaagccaccgcgcccggcccttgaattactctttgattttgttctttaatatttttaccttgactcccatactttttttttctttttttttgagacggagtttcgctcttcttgcccaggctggagcgcaatggcgcgatctcgactcactgcaaacttcgcctcccgggttcaagctattctcctgcctcagcctccagggtagctgggattacaggcgcctgccacaacgcccagctaatttttgtatgtttagtagagacggggtttcaccctgttgaccaggctggtcttgaacttctgacctcaggtgatccacccgcctcggcctcccaaagtgctggaattaccgcgtgagccaccgcgcccggcccgactcccataaatttttaatcaaaaaaaaaaaaaaaaaaaaaaaaaaaaaggcgggggcactggaaacaccacggcccaaagctcttctcattcatgaaccccacaccctgagtcaggattttcccttgactaccgtcccgtggtcccggcacaatggggagagatgcggcgatgccggtgcagagctgcccagcgagagctccaggccatggcacagtcaccgcgcagggaggagacaggacgcccggggtcctggctgtcagctcagccgccatcttatggctgaaggggactgagggccgagctgtaccaaggacaactctggccaaggattttggagccgacagcggggaggccggagtcccgccacagccacttcagactggttccaaccagcccctccccctctctcggggtgtctgacccagcagactcaccatttttctaggcttcccagggggtcctggcatcttagctgtggatctcccaatacctacaggtcacagggacacagaagctgggcctctaggagcagaagacacagaacagagaagaaaagacctggagctacgactgcagccagagacaaaggccgcgccaaatctcgaaagccgtcctgtccactccagctgcgtgcctgattggatggatcccagcccagagtccctgattggataacgtttaacaccatacccctttaggccctgagtgacagaagacgtgctcaggtgcagggctgaatgaaaatagagttgcagctttttcaggcagggcttcctccctgagctgagccaggcctgcctcagagggcatttgcatttaaccatgtgtaaaagatcatatgtgcatttataaataatatattatatggctattcacaagtgaagataatgtaataacaattatttttaaattccagattttattaccttcccggcttctggtcctttgagcaggcagcctgagattttaaaaagaaggcaatcctctgaaataaaatgtgggccacatgtgaatactaaattttctagtagtcaaattttaagaagaaagaagcaacaggtggaataaacggtaaccatttaattaacccaatatatccaacatactatcattttaatatgtgagcaatatgtaattattaatgaaatatatataatttttactctaactttctagcatatcgcagttcagaccagccacattccaagcacccagaagcaacatatacccaataactgtcacattgaagtgcagctgtgatgtcagggtgggcaaacggcctgaaaatcccttttctgccagaggtaaaggaagagcctcttcctaccaacatctctctttcgttccaagggtgcaaaagatagtgaccatagaaagagcagagggcagccggacacggcagctcatgcctataatcccagcactttgggaggctgaggcgggtgaatcacttgaggtcaggagttcgagaccagcctggctatcacggcgaaaccccatctctactaaaagtacaaaaattagatgggcatggtggcaggtgcctgtaatcccaattacttgggaggctgaggcaggagaattgcttgagccctggaggtggaggttctagtgagcgagatcatgccactacactccagcccaggtaacagagcaagactctgtctccaaaaaaaagaaagaaaaaaaagaaagaacagaggccagcagaaataaaataaccccaggtagaccactgctgccaacgtgttttccatttttgttccagagatcagacagtaaacaaaggatgatgggtccacaggagaagaaaactctatgtcttcagatatgtccacagtcttgacctccagtgtataaatatagagaaaacagattaaaggtaaacttattttgccatttggccttggccctaatggtcaggctgtggttatctgttttctcctgtggtttatggaaatgtgtgagtataagcaccaatcacatgcacacatgtctacatgtatttattcatttctcagtattacaaaacatctaactttaaatcaggggaaaaaagtcagcacttttagggtgcccactgttagaacgtaattagtaatcaacttgccattaatttttggcatcctatctgcactgggtgcacgtattagttagctcttacagcataacaaaccatccaaaacttcttagctcataattgtgatggtcagccatttaggctgggcttggtggggccattcttctggtctcagctgagcctgtcaactaggcagctgtgcttctgggcatgagcttctgcttctgggattgtcaacaaggggcaccttgcttctcctccctgttgtatcttatcctccagctggcgaacatgggcttttttcatggagatggcagcattctaaaaaacaattagaagcatttaaaaccacttgagcctaggcctcaaactagcacactgtcatgttcacaggtgtctaccaccccgaacaaataaggccagccagatctggggtttggaaaacagattctggatctccatgggaacacctgtaaaagcacctggcaatgagcatggaacagggaga

SEQ ID NO: 1882784 - DNA, 4001 bp, Homo sapiens
ttttttttaatgtaaggtcttcctgtgtcaccaagctagagcacagtggcatgatcttagctcactgcaacctcaatgtcctgggcacaagtgatcttcccacttcaccctcccaaggagctgggattataggcacgtaccaccatgcccagctaattaaaaaaaaaaaatgtgtagaggccggatatggtgactcatgcctgtaatctcagcattttgggaggccgaggcaggcagatcacttgaggtcaggagttcaagaccagcctggccaacatggtgaaaccccatctctactgaaaaaaaaaaaaaattagccaggtatggtagcacacacctgtagtctcagctattcgggaggcttaaggcacgagaatcgtttgaacccgggaggcagaggctgcagtgagccgagatcgcactccagtctgggcaacagtgtgagacttcatctcaaaaaacaaaacaaaattaccgggcatggtggcacatgcctgtaatcccagctactccagagactgaggcaggagaatcacttgaaccctggaggggttgcagtgagccgagatggtgccactgcaccccagcctgggcgacaagagtaaaactcccatctcaaaaaaaaaaaaaaaaaaaaaaaattgtagagatggagtcttgctttattgcccaggctggtctacaactcctgggctcaagcaattctcccacctcagcctcccaaggtgctgagattacagacatgagccaccacatccagcccatttatggattttttagctttaaaaatctaagtaaatattacatatttttaaaaaaaaacccacatgcctaatgtggatgttcagcttttacggctatcccacttgtgaaaccattgaaacatgtcccttcaagtggtaaattagctgctgccctgggctagttgagtgcctgccgccaacgcaagaccagcaagcacagccaggaacgtccagaattagttcactaccacatgctgtactgacttaaatagtttgaaacacattcttgtctgttttgtatctgaaaaagcagaagctatttgatgtaataatgattttctttcaaaaatggtttttaggtaatggttatctacctttaagttttttcaaataaatgctatggggtttgttttttgtttttctttcttttttttttttttttttttttaagacagggtctcactgtgttgcccaggctggcgtgcagtggcgcaatctcggctcactacagcctcaacatcctgggctcaggcgatcttttcacctcaggcccctgagtagctgggacgacaggtgtgtaccaccatgcctgactagttttagtagagacagggtttcattgtgttggcaaagctgatctccaactcctgagccccagcgatctgcctgcatcagcctcctagagtgctgggactacaggtgtatgccactgcgcccagcctacatcacgattttattatatcttgactgttgataattaaaatttcctgggatataaataaggcaatatgaagttgccctttctcagtatttttctttgtactgcctgttatttgaaaaagcattttctccctcaggggagttaggaaaggttagagagctgagagaacagggtttccctgggcagaggccgagtaggggagagcaggcaggggtctgtcagcagagtagtactggggccatgcatgagtggggccttgggggctctagggtcagcaggcagcacactggcatgttctccaggtagcagcagaaacattagggtgttagaggtttggggtctgcaggcatatctggggatcagaacaagctaatggccagcattggctgaagcaaggctttgagactcacagaattgggctgtcagtcaagcagggatctaagagatggggccagccaagcagaagtcaaaggctggtgccagcatcaaaatctgctctgatgctcctttgggagactgattcttcaagtctcaaatgctgttcacacctgtctctggatgctgttggctacctgtaaaagaaaatacattcaaatgggcttaaactctgaagggaccttagcagctcgtgtgattgagttgcatgccagctccatatcttggactagcatctgagccctatatccatatgaagagaaaccatttcatcttgtgtctcttaagagcaaggcaacttttcccagaacctctcgcaacctttttctcacatctctgtccctggcacagagacctacatagacgatgcccgatgaatgtggaatgaatgaatgaagtgcctcatgttttccaacataaattaactcacacgatctcatttgatttgtatagcaatcctgtggttactcgaagggaccatattctatcaccatcatgcccgtttttcggagtaggaagctgaggcatgctgagtgactaataggacagagtcagccgacacctttttgattctaagtgaaaggctctttctggcataaagtattgtgacaggtaggattcagctgggagtggcaagaagggagggagcaacagaaatgtccattacaaaaaagactgaaatgaatgaagcaggatgataactgcaagtactgtcccatttccagcaccttttattctagtctcatggtatctctcaagctgattgtaacagataaaaaaccgatagttatccaaataacatggtatataggagttaccattttttgttttttgttttcagacagggtctcaccatgttgcccaggctggggtgcagtggtgcacatggctttctatagttttgacctcctggactcaagtaatcctcctgcctcagcctcctgaatagccctgcccccacccaccaccctcccactcagctaattttttaaaaaattttttaaatttttttttgcagagatgggatcacactatgtttcccaggctggtctcaaacccctgagctcaagtgatcctcccaccttggcttcccaaagtgctgggagtataggtatgagctaccctgcctggccagttacattttttgatttcttgatatttttgttcagaaagtttaatttacttgaaatcaatatgacaatctactaggtaatgaaacacaaaggagactgaagagatgataatcagtaaaagggcttgaactctgattggatctttgtttaaaaggctggaataatgagaaattaggatatggattgaatatgaatttattgttaattttattaggtataatggtggaattgccattacatagaagaatattcttaggagataagtgctaaagtatttaaggatgaagcatctggatgtctgcagcttacttttaaatagttcaacaatttgataaacacataaagagcgggtgtaacaaattgttcactgttagatctaagtagatcactggtttttcaacttttgtgtatttttgaaaattttcacaaagttagggggaggaactcttagattttccatttaaataatcactttaggccaggcgtggtggcttacgcctgtaatcccaggctgaggtgagtggatcacgtgagttcaggagttcaagaccagcctggccaacacggtgaaactccatttctactaaaaatacaaaaattagccagacgtggtggcgcgcacctgtaattgcaactactctggaggctgaggcacgagaattgctttaatcctggaagtggaggttgcagtgggctgagattttgccactgcactccagcctgggtgacagagcaagaccctgtctcaaaaaataagtaaataaatcatcacttcaagtcgttcttttctggaggccatatatatgggtgtttttctttttctttttcttttttttttattgatcattcttgggtgtttctcgcagagggggatttggcagagtcacaggacaatagtggagggaaggtcagcagataagtgaacaaaggtctctggttttcctaggcagaggaccctgcggccttccg

SEQ ID NO: 1882785 - DNA, 4001 bp, Homo sapiens
cggtcacaactactcatgctggttgcacgacaggggccaaagacaatatatgaagaaatgggtgtgtccctgttccgacaaaactttatttacaaaaacaggcagcagaccgcatttgccctgaggtggcagtttgaccagccctgtcctgttgctggacagaagaactttctgtgatgacggaaatgttatttctgtgccatccagtataggagccattagtcacacgcagttactgagcactttggatggggctagtcggactgaggaactagtttttaatttttatttagcttaaattagtttaactttaaaaagtcacatggagttagttgctaccacgttagacagcacagttctagagagcccagcccagcaactaaaaaggaggagaggctgggtgcggtggctcacgcttgtaatctcagcactttgagaggctgaggcagcaggattgcttgaggacaggagttttagaccagcttgggcaacacagcgagacaccgactctataaaaaaaatttaaaaattggagaagtgtagtggtgtgagcctgtagtcccagctactcaggaagctgaggtgggaggactgattgagcccaggagttccagaggagcctgggcaacacagtgagaccctgtctctacaaaaagtacaaaaattagccatgcgtggtagcatgcacctgtagtcctagctactctggagggtgagatgggaggatcacttgagcctgagagacggaggttgcagtgagccaagtctgtgccactgcccagtgagcctgggcaacacagtgacaccctgtctcaaaaaaaacaaaaagaggaagaggagatgcagcccagggagaagaactgatttgtctaagacgtggctccaacctttgggttcatgcttctccctgcgccacggtatgaagttgcctgaactccagaaccactaagcaatgaggcaggtgacctgggctctgatcctcaggctgggacctggggaaagccattcacctttagtgttctgctgtgtctccatgtgtacgaggaccacaccccaacctcctcgtccattcacctgtgggggccaccagggggatcacaggagacaatgtaggcagaggccctttgaaaacttcaaagcgccccgggagtttccggatgttctgcattaatttatctaatccaaggtaggaaagtgaaacgtgggctatgaaagacaggagggaagtcgggtgattcatcgctcggctggaactctcgcgggttaaatctctgtttcagtgaatttcctggggagaattcagggccgtgttccagctaacaaattcatccctttgctttgactctgaaccatattctgggacggcatcaaagccagcctcccaagagtcgcttggggactgtctgggccccgagctctccgaccctcctgcctccactctgcagatgctcctgctcccatctccccagcacagaccccaccacagcctcctgcctggccccatctgccatccctgcggctgagcccgactgagagtgaagtccttcattaaatcagtgcctacctcgtcctgcggatggaggtcattctcagcctcattccccttgccagagaaggatgtggggggaggcaggcagggcaaaggcagggagacatcctctggtccagaattgattcctcttctgaaagaaagaaaagcaaagatgtccctaaaggggacattaaaactctcaacaagaccctcaggctgggagtcttcttcccaaggccagggtcaggcctgagaggtgttctcaaagacccggagtgaaatcctcttcctagacaaagatgattccaaggatgattccaagtgggaaggggagagaggggccttgcacgaggcaagtaactaggcctgtgggagcaagttcgtaccgtctaccctctgtcaaactctgtacttgaaacggttcatgttttttaaaaggatgggcgttttaaatccctccattccgctctgccccgtgatgtaatttagaaatcacgagagctctcaaaaaaaaaaaaaaaaaaaaaaaaaacaaaaaccagcgagatgtgctcacagaccttggtccgcaaatgtttttgccagatgctgagaacctaggcagaatccagagcagcttttatagaggatttgatgtttaactcatcatggagaggtccctgatctctccctggagaaaaaggaagtcgatggggtcgtttgtacggcgaaaactacagcatgatgttggagggatcagggagcctccttcaagggtttagggggctctgggtcagggcctttctggacggttcttcccttgggaataggaagccaggatcacagaggggaagggtccagcccagatttggagctggataccctagtgggtatcccttaaacaggagcaggtgagcctgtgttacaggacccgatctggaccccaagagagggttcttggatcttatgcaagaaagaattcagggcgagtccatagagtaaagagaaatcaagtttattaggaaaggaaaggaataaaagaagggctactccacagacacagcagccccaagggctgctggttgcccatttttgtggttatttcttgatgatatgctaaaggaggggtggattattcatgcctctcccttttagaccatatagggaacttcctgacgttgccatggcatttgtaaactgtcatgatgctggtgggagcgtagccgtgaggatgaccagaggtcactctggtgtccatcttggtttttgtggggttttgccagattcttcactgcaacctgttttatcagcaaggtgtttaggacctgtatctagtgctgacctcctatctcatcctgtgacttggaatgccttaaccatctgggaatgcacctagtaggtctcagcctcattttacccagctcctcttcaagatagagttgctctggttcaaatgcctctgacatctgggtggtagggttgtgctgcctggcttcttaacttcctggctcagaacccaaacctgttgcctctggctgcccagccaatgggactgtgacagctgggacaggagagccactgagcttataaacacctgtgagcaggtatccggtagccagcggggggagaagcggtggatagacacagggcttcccagcttaggcaggaaaggactggcttccccacccaccctgtccccatacccccctaccaccaccactttctggaactttccttaaacaactgctgggctgttgcaatttgctgcttcccttcttttcttgttaaaacattttatattttaaatttgtttgcagacaatttccggaaaaaaaaataatatgtgtgtgggccacattcgtcatcctgcaaattttattattttttattattagagattgcaacgtgtgcctcaccatgcctttttcttcttagtaaaactaagttgagtttaatttggctaattaaaagacacgtaactcagatatctgaggcatatagagttaccacattcacagagtgtgaataggttacctattacctaaatagagtagaaaataggttaccaggagctgggaggagggtgcgatggttaatactgagtgtcaacttgattggattgaaggatacaaagtatcaatcctgggtgtgtctgtgagggtgctgccaaaagagattaacatttgagtcagtgggctgggaaaggcagacccacccttaatctgcgtggtcaccatctaatcagctgccagcatggctagaataaaggcaggcagaaaaatgcgaaaagagagactggcctagcctcccagcctccatctttctcctgggctggatgcttcctacccgccaagttcttcagttttggaactcggactgactcttcttgctcctcagcctgcagacagcctattgtgggaccttgtaattgtgtgagttaacacttaataaactcccctttatatatatatatattccattagctctgtcc

SEQ ID NO: 1882786 - DNA, 4001 bp, Homo sapiens
agatctgatgttttaacatttgtcattctatattttattgagatctaaagtcaacatttttgtttaaattccaaatatgatgtttgaaatcgtgatattctggagtgatatggtttggctgtgtccccacccaaatctcatcttgaattgtaacttccacaattcccacatgtcatgggaggaacccagtgggaggtgattgaattatgggggcaagtctctcctgtactgttctcaggatagtgaatgagtctcacgagatctgatcattttaaaaggagagtttccctgcacaagctctcttctcttgtctgccaccatgtgagacatggctttcatgttccgccatgattgttaggcctccccagccacatggaactataagttcaataaatctctatcttttgtaaattacccagtgtcgggtatgtctttattagcagcatgaaaacagaccaatacatggagctatagaggaacatggctaaacaagtaagagcaaaatcatgttgtcttgttggggactggtgtttgtaaaataacagcctcagagctgaagtggtataaactttagtggttccagcagacagtagcttgtctgcagagtcatgtgttgtgccacatgcattgggtatgtcatccacaaggacagccacccagtctttaatatcaccaaccagaaacatcctatccaccccaacacttctcctgcaaggcaagccatgttaggtctgtccatgaatggtggagtctctttggctcctcctgctttgggtgaaacaatgctgcagttcctccagtctgcaatattctctcaggtccatcacagaactgcaggctccacatgtaagtcattcacagcagtactgaagaatccctgtatttgagcagtgtgcagatccatagtactgacatgctccaacccagctactgaaaacacattggctacaagttttgcagaaactgcaggatgactcttgtccttttgatcttgttgggcatatggagaacatgagagtactgccttcatgccagaggaccatgtggctttgcacacattggtcatagcaagagatgtcaaggtgtcattaattttcacaatgacataggcagcttggtctctcattctttcaccactcactatgctaacctcctgattgctgaacttcttagtgaccaccttgcccaactccaacccccaccttttcaccactttctgggcaagtcccagtgagctgctgccaagcagcaccatattggacatagctggagcttggtggagccaggggatgctcaaggtggtgatgtcaggagcaaggaaagagctgccactgccactgccattggaagagaggaggaggggttgcagaggtgggttggggcctggctgcgggcagggagcacagctctggaaaagatcttcttatttttggatgctacatgctgtttcacctctttctctttccatgtgagcaaagaaaaggactacaacattaaaagaaagtaattcattaatatttagcatagactgtaaaatcactgccattagaattttttgaggtttcccaaaccattgtaacttccccacatgttattttggtcactccttcccttatgattggcaggaaaagcctgacctgtgtgcttgtgtggcccaggcactaagagcctcaggttcacagggcatgccctcgtgctagtgctgctagagagggggtagaccatgttacacaggaagcatcacggtgttgtgcaatgggactgggttgggggcgggcaagttctgttccctaccaagactcctatcagaaagggtctcttcttgccacagagactacagcaacaaggcagagaaagtttattaaggtgggaaacaggcatcagacaaagcagcacatttgagggactccttcttaggcaaacagataaaagcactcccagaaaagcaaaaacagaatgacctcaacattttgcaacacatattggaagaaaccagcctccgcagaaatcaactgatggaagctggagtaaacatggactttttacaaattgcaaaagtaatgtcagagaccctgaaacaaggtgatatagcttagatgtttgtcccctctaaatctcatgttggaagtgtttggatcatggagatggatcccttattaatggcttagtgccaacccctttgtggtgagtgagttcttgctctggtggttcacacaagatgtggctgtttaaaagagtgtggcacctcccaccttgctctcttctctcaccatgtgatgtgctggctccctttttgccttctaccgtgactgtaagcttcctgaggccctcaccagaagcagatgctggcactatgcttcatgtacagcctgcagaaccatgaaccaaaataaaacctcttttctttaaaaattacccagtctcctgcatttctttataggaacacaaaaatggcctaacacccgcccctccccccacaaccaccccaggcaaacatcgactggggttaatcccagtagaatgagaatgacataggacaaatggaacagaggaaacagattctggatatgaaagacttgatatgaacagagattattcctgtgatccattggctgagagttttgtgttggtcagcatgctttcagcagcaaaacgaaacagaacaaaaacacccaatccaaattagctaaattataagaaaatgcattgacccactaaactggaagaccagacagaatggttctaactccatttctttgaccttctccatgtctttgttttatcctcagactggtaaagagatagctacagtagtttccagcctctcaacatatacaacatagccctgaataagaaaagaacatatcctcctgtgggtctctcttaagagtgaataaacttttcccagaattccttggcagacttcctcaaattgagtcacatggccatttctgacaatcactgcaaaggagataggataattatcattgccttcaacaatccaggcccttccctggagctacagaaaactgcccacacagcatagctattctccaatggtggaagagtatgctggatgttaaagagataccataaagtccaccatggtttcccaacaatgtcttaggaagaaccagtgctggagcctccacaatatatccctaagagtttaaaatttatctttgtatcactgaggacttttgggttgctagtgacagaaacacaattcaaatcagcttaaagaaaacatggaactgattggttcttagcatctaagaaagggtcaactcttcttagccaactcaacggaatatccaaagatgcagctgggccatagtagaaatagaaccgtgagtgctcagggctctcccttgtcactcatgtttgctcctctttgcatatcaacaatactctttcccactcagactgatttttgtgacatagcaagaaacttggctgctgacagctcctgagatttatgtctcacagcttgagagactgaattcaaggtctctctggttccaagtccaaaaatctttggaaagagccttattggctgagcttgatgtagatgccaatccctgaacaaattaactggatccagggattgagagtcactctgtgctaacatgccaacttctgttctcattccatggacaaaggaaaaagcagttcctagaaaaaggaccctaaaggacaatccactataatagttacactcagttgcataagaaatggcagcctgggtgcagtggctcatgcctgtaatcccaacactttgggaggctgaggtgggtggatcacttgaggccaggagttcgagatcagcctggccaacatggtgaaaccctgtctctgctaaaaatacaaaaattagctgggtgtggtggcacatgcctgtagtctcagctactcgggaggctgaggcaggagaatcccttgaacctgggaggcggaggttgcagtgagccaagattgcatcactgcactccagcctgggc

SEQ ID NO: 1882787 - DNA, 4001 bp, Homo sapiens
tcccagcaacttgggaggctgaggcaggagaatctcttgaatctgggaggcggacgttgtggtgagctgagattgcaactccagcctgaacaagtgcaaaactttgtctcaaaaaaaatatgaaatgtgaagattgtttttataattttcaacacctgcacattactgtctttaaactaatctaacaaatcaccatcacaacaaaagccccacaagataatctgtttcaccttataaaaagcactgacagttactgtgtggtaatttgttgcagtagccacggaaactagtattgtactgaagcctcaacacccacttgaaggggctgggcatggtggctcatgcccgtaatcccagcactttgtgaggcccaggtgggtggatcacttgaggtcaggaattggagaccagccttgccaacatggtaaaaccccgtctctaaaaaaaatacaaaaattagctgggggtggtggcacatgcctataatctcagctactcaggaggctgagacatgggaactgtttgaacccagggtggggcggagtttgcagtgagccaagattgtgccactgcaccccagcctaggtgacagagtgaggctctatctcaacaacaacaacaaaaaccccacctggttctgccccactctccctctcacgaagttggaatccctcactacttttcagtagaggagagtgtgtaccccaatctcagcttgatatgattcagatctccatttaactcattaaacctggctgatcctcaagccctggggaaaaaaagggtctctctgtgagtatgatacaggacaggtctgtccccaggaccctgggagagggaagcccaatggcccaccaggttggcagggctggggaagggaaagtgttatggtagcccaagactaaaaagaggcagcagtgggagcaggacatcactcccattgaactcatgatgctgctgcctgagtgaggtgagggaggagtgcacccgagtgatgtgatggggcagagaggcacggttccagggcagctttcacccttacttcctgccatgttactctgatcccctgcaggtgagcctgcccacttttggcttagggctgctgctggggcctgtactcaaatgcagccccccattgccatggctacaggagtggggcagagcagggagtgggacagaggagaggccggggcaggagggagtgggcctcaaactccaggagggggcccttctcatgggttctcttttccggcctcttcttccttacccctgggctgatcacctggggaagaactgaggcaagctttctcatcctcaggtctgaggggttcaattaccaggcccaagtagctgggattacaggcatgcaccaccacacctggctaattttgcatttttagtagagtcagggtttctccatgttggtcaggctggtctcgagctcctgacctcagctgatccacccacctcggcttcccaaagtgctgggattacaggcgtgagccaccacgccaggccgaacacgttcttattctattaaatagcataacccaggcagggcacagtggctcacgcctgtaatccctacaagtctaaaggccaaggtgagaatatcagtaacccggagtttgagactggcctgggcaacacagcgagacccccatcgctacaaaaaaatacaaaaatcaggccaggtgtgcaccgcccccagctaatttttgtaccttttgtagagacggggttttgtcatgttgcccaggctggtctcgaacgccggagcccaagccatcctcctgcctcggcctcccaaagtgctgggataagtgggcccaactagcctcatgttttctttaagcagtccctccctgttgcacacttggatagtttccttttttacttttttagacaggggttacctcagtctcgcagactggagtgttgtggtgggatcatagctcattggagccttgaaccttgcggggttcaagtagctgggaagctgaggtgggactaaagagatggggtcgcgccaggttaacaggctgctcttggcccgaaaggatcctctcgcgtccgccgccaccggacacagtttcctatttttgacggacatacacactgtgctgggtgggagtttgtcaactacccttctccagccaggaatacacaggacctggagaggaggtcgcggttaccaggctcgactctgaggagactgaccagctccaggtactataccgcccctgtgacgtcgctgaaagcgcgcgtctgtggcgtcgcggaaggccagcgtgtatgacgttgtcgaaggcgcgcctctgagacgtcaccgaagtcgcgccctaaggcgtcaccgaagtcgcgccctaacacgtcaccgagggcgcgcccctatggcgtcacatcggaccgaccgccacgcgcagccaattggaactcgaggcggggctgctgggtcttcctggagcgcgcatgcgccggcgagctgccacaaggtttacactttcccccatcttcctctgtgcttttggggatggtggatgaatcaatacaggcaaagacaggtgatttgcccagagctgatgactaacaggcctgctctcaggccttatgactcctagtttagggcttttttttttttttttgagagaaagtctcactcttgtcacccaggctgcagtgcagtggcatgatctccgatcactgcaacctccacctcctgggttcaagcgattctcctgcctcagcctcccgagtagctgcgactaccggtgcctaccaccacagacgtctaatttttgtatttttattggagacggagtttcaccatgttgtctaggctagtctggaactcctgacctcaggttatcctcctgcctcagcctcccaaagtgctgagattacaggtgtgaaccactgtgctgcgccgctatttttttttttttttgatagagatggttagccagatgtggtcgcacacacctgttgtccctcctactagggaggctgaggtgagaggatcacttgagcctaggaggcagagactgtagtgagtcaagatcataccactgcacgccaacttggaggcaggaggattgcctgaggccaggagttcgagccagcctcggcagcataatgagattccatctctgtaaaaaataaaatttagccaagtgtggtagcgtgcacctgtggtcccagctactcggaaggcaaaggcgaggattgcttgagtcctggaggttgaggctgcagtgagctataattgcgccattccagcctgggagacagggtgagattctgtctcaaaaaaagaaaaaataataataaaactgtgggggaaggacactcaaaccccctacgggaagcaaggcttcctcattccatcatattctgctcatcctccaaggctcggctaaggggcctgcctctccaagaaacttcccagccctcagcccccttccttcctgttttcgcagcactggtgtcacctcgtcctgcccaactatgtagcgtgcaggcctccatcttccacatgactgcagaaccagagagctctggtggtatctggttccatgtgtccccactggcacctcgcctgggacgttgtctgcactgaccagtgctagcaatcaaaatagcaggcatgcctgaccatgtgctgaggctcagtaggcagcactggtcagctatgatttcagctcagcctctagcatcccgctggggtagcttaataatccctggatttcacagatggaaaatgttaggaaagtctctaagcccccatggaaggtcccagagcccaaattcaaacccaagtggaacgttcctctgcttcactgtgatctggtgtgaattttaacctaaggtcctggcatttaagagctcgaagtcaccacggaggtggagagctcagccctgacattggatggaagctgagactggtgaggttctcaccgggacttttgcagggagttggggagaattctgaaggcggtaca

SEQ ID NO: 1882788 - DNA, 4001 bp, Homo sapiens
actatgaatggaagcttcctgaggccctcccgaagcagatgctgttatcatgcttcttacacagaactatgagccaaataaacctcttttctttataaattacccagcctcaggcattcctttatagcaatgcaaggtagactaacacgtgatgctcatttttttttaaagcctgcaaacagtaagaagattcccctctctttctcagtggatgtaaagcagtgattctgcataaatgtatcaacactatagctcaactccttctggagtggacttcccctagacctggagagcgagtcctgcctagcatacacggcctgaagttcgagatctcttccaattcaggtaatattccgctttctgtatgcctgatctctacatatatctgacattgatttttaactcaaatgaggaaacaggaaattattaattacaatctcctaaaactacaacaggtgttataaaacttctgaatataaacaggcagacagcaaaaatgtacacaggcataaaatgtaaacttgagtgagaaaaaggagctgaaaaatgaaaggctcgctttgaaacaaaacagcactgaagagtctacaaagagagagtgactggagagagactgatgtgggagagcagaatggggatcagattataatgagtatctctcccacactaaggaatttgcagctttttttgataggcaataaagagttacatataacagctgtatttaaattgttcctaggtgatggagctgcaggtaattcttttcttcttcctttttgtattttactttttctttttttttttttttttttgagacagagtctcactctgtcacccaggctggagtgcagtggcgtgatctcagctcactgcaacctccacctcctgggttcaagcaattctcctgcctcagcctcctgagtagctgggattataggcgcacaccaccatgtccagctaatttttgtattttagtagagacggggtttcaccattttggccaggctggtctcgaactcctgaccttgtgatccacccaccttgatctcccaaagtgctgggattacaggtgtgagccactgcacctggccttaatttttgtttattggaaaagaaggaaaatctatatttttaaggccaccagccacagcacttagagaagaaggaggacgtatattgcttttgctgtttcctgttagcctgacatttgcgactacattgactctgctggggtcactttctctaatttgtggatttttttttctttctcaactgcctggaggatatgtatgggtccatgactcggccaccacataagattgtgaagattatacctgtcaagggtgcccagtcaaggaagaagagtggctgaattcagcctgtgctctgcctgaaagccctatgctctgtgtgggccttagtccacctagaggaaggggtaccttttaaaagtacacacaaaggcacatcatgggctggccgcagccctgcctggccccaggtgagctagcagtgccagatgcctccagaatagactggaaggccttctgtccctctattatgtcaaaactgcaactggaactactttgtccaaggaaaggagagagaaaccataggaaaaggccataggagaatggtgtctggaaaaaaaaactgcaacgaatataagagatatgaatgaagcagatgcaatgaaacaacaggtttaatttcaggcttattttagcgaatggaatagaatccccattgagtaaacacgaatacaaagggtttattgagaagatacagaggaattgcacagagccaaaagcccagtctggcttcacaagacttggaaaactagagtgaggttcaaggaggttttccccgttcatttctccagagtcacacagcctctcctctcctcacctctgtactgtctgctctactcttcagtctctctctaaagacaagtttttcttactcgttagaaagctcacggcaaaaaatggctcctcgatctcaactttatgggaccattctcttcatgcattcactgttctccgaccacaatgtctatagatttggatcaaatttccaagagatgagagagcaaattcctattttactcacttgcagattcaaaattaacacagatatgatttgtaaagagagtatttctaccagtcttgaccaggacagtagatttctatattgagttctacagatcagcccatagctgtgttgaagtcagataaaatataaagactaatctctaaatttaaaacattttatttgggaagcaaagattggattcagcacatacccacagactggctggcctttagtatgtccaaagaaaaaagagaaggttggaggcttttataaaaaggacaaatgttacatattattttgaaagtaatttcattggcactagtaaggttttggatagctggcaagctctggttggtgaacgatggtggtggctgaaactagttgtagagttacagcaggctgtttctgtagctattatattaaaactggttcacgttaaaacaggcagtttcggcagccaggtttgcagagaattacattcttggagcaatatgatatgccctgagtgcattttccccctggttcctcaactctgatttagttgagtataacaagaatgacccaatttgtgtgatcaactttcacagctggttcccaatcattgagtcacaaagtaagaaataatcaagacaagatataagcaattttatgaaaattcccccacaatgtgatgaatttattgatgatcatcaacagtgaaataaccatgcttaaaactccctgttctatataaattattgaactgacagacacaggcatgtgacttatcaaagaaaaaaataagtatgctttttagctagaatgcctggggaattaatgagttcaaaacttagggagatgcattattctctcttgttaaacaaaatgagaccgtatttatgggttaatatttggcaaaggtgtacaactaccatcagagatggctttgaacagtcatggagtctgaatgctttatttagcaaaaattgtacaagaaccctattagaatactaaggctacaaaattcagagcaggtaaccttgatttatacgtgtaggaaaaataagtctttcaaatgtcagagtctggagttttctgcaattaagtcataatttttgctatttttacaggtcaacaagaaaactcaattcctcttcaggaagttaagtgacttaaagattacataagagctaagaagacaagccagctaagcatgttcaagaccgggctttttgaaactgcactaattgatcataacggtgtgagtttcaagccccttcatagctttcctatagctcactctgtgcctctcccaaatgacaaaaacaaggcaaacccatagagtatgagtttacatcatatgcaaaaaacacaagtccagagtatagaaaatggaagaagaaaaatgaaatcaatgaactttaatatcgttaaagttaacactatatccatggaactttgatctggcatagttttttgccacattttatttaaaagatttcaatttatgcatccttttccacatctaggttatggattctggcagatataagattgtctcttatttaatctctgtatccttagcaactagtgatatacctagcacagaaaaagcactcaacacatttgatgaatgaatgtgattgttctgttgacaaaaggataataatctcttgactagaaaaaaaatcattctaaaaatcatcacatcagggactaaaagaatttgggagtttatttactgttgttcctctttgtttaaacacagcaggccctcccaagtatcctattgcatctggcccacaagatctagttgcagagataaatgattcaagaaaatttccctggcttactccccatttataccagatccactacttttgcttccatcctccatttctctgaattcagggcccagtacctctgac

SEQ ID NO: 1882789 - DNA, 4001 bp, Homo sapiens
caaacactcagaagggtctaaaagagtgatacagggtttcgccatgttggccaggctggtctcaaattctggcctcaagtgatccgcctgcctgggccaacatggcaaaaccccgtctctacttaaaaataacaaaaaaaattagccaggcatagtgtcacatgcctgtagtcccagctactcaggaggctgaggcacgagaatcctttgaacctgggaggtggaagttgcagtgagccgagaccacgctgttgcattccagactgggtgagagacactgtctcaaaaaaaaaaaaaaaaaaaaagtgataggggaagcatgcgcctgtaactctaagataatcaggtagtaattagatgagttagactctcatgggtaacacgactccttttacaaatagtctgccatcatcaaatacaaggtgcaaaaagaaaaaaaattcccattatacggctcatgttttttgtggtttgttggttgagacagggtctcaatctgccacccaggctggagtgcagtggtgcattcacggctctctgcagcctcgacctcctgggctccatccatcctcccacttcagcctcctgagtagctgggaccacagatgcatcccagcatgcctggcgacttttgtattttttgtagtcagggtgtccccatgttgtctaggctggtctctaactcctggtctcaagggatactcttgccctagccccgcaaagtgctcggattacaggtgtgagccactgcatcccgcccgcattttcttattgtctctttaaactgcctaaaataaaataggccataggaattgagtaggtgagctctcagaaatgaaatgaatgtgtataaaatatggttttgtttctaaattatctaactgaacttagttattgtggcacctaataatcttctattaagaaaactaggatacgggagaaataacactggcctgggagataagtctcctgggttctactatgagcagctctacccacaaagccggtgacctggtcaagtcacccacctgctaaggcccagtctcttcccctagcaactgaggcagcaggagagaatccctgcagactgttcctgcattactacgattctcccagggcagatctaagggggggatcagcagacacttaagtgagagaatagaagtgctgacggacatttagaggcggtcgaaatctggagcacggagaggaggaggaaggactgttaggggttagcggggagtggagacgacgtccgcagctgagggtggtgacaccctccacgcctccctaagcctcgtcctcccagatcttcccatgcagcgcctgttcggtgcagccggaccctgccctcgaacccaacacatgtctctccagcaagcaatcgggaccctccctctgccccacactctaaggtccccaaaacacggtgacttcacccaggcccttctcgctccgggcccaaaaacccaagacttaccctcctggggctccgcagcctctgccccacggctcctgagaggccggggcgggctgctgtcgctggcgcacgcgtctgctcacgaggtcccctcctgtccacctcaccaaggctgttctgctcccgaggggcccgggccgggcctatggggcaaatccaggtgggtgtccttctcggggcccagatccgcctccctggggctcaccgtacagcgacggccggcgccaggcctctgaggacacacacgggccaggcccaggtcccgtcgccccttcgcctccgccatcacctcccgcccggcccctctggccccagcgccgccggctccggggttcacgctcgggggtcctggctcgagcctctacccggcccgcgcgaaccctgggccgcacagctcccgcccgcctaggtgctggcccgggcggtcagcgtctagccccgcagactcggtgattctcgtccactagaggccaaagcctgggaaccagagcaagcgatgacctgaacaggcgcaggaagcgagggcagtgcggaggtggcgcgcatgtgcgagcacgcacgcgcgaacacgcacgcagggagaggtgcacacgcgcaggagtgcaccggaagtccgcctccccggacacccaccgcggtcccaggacaagtaacagactctatttcccatgagcctacgcgctccccaagtttaggggctgtcttaaatgtctctaccccgcctaaaggttaagaagctccaggctatgagctttggcagccctgaaccccggactgaacttcacctttgtctttactcccttttagggtcaagtccagggctgcgttactgggtcctggagcccaagtcctctgggttagaaccgagtttgccataaggagaaggaaaggaaagggtgtatcatggtcactgctctgaaatgctgagaagtttcactcaaatactgggacaggataaatgcccagcgatgctttccaaggaacaaaaagaaaatagaatttgtagctgggcgcggtggctcaagcctgtaatcccagcactttgggaggccaaggcgggcagatcgcgaggtcaagagatagagatcatcgtggccaacatgatgaaaccctgtctctactaaaaatacaaaaattagctgggcgtggtggcgcgtgcctgtaatcccagctactcgggaggctaaggcaggagaagcacttgaacctgggaggtggaggttgcagtgagccgagatcacgccactgcactccatcctggcgacaaagcgagactccatagcttttctagatcacacagcgaatgcctaaaaactgtagagaaataaggacatacacatacaaactgaacgaagaagagatacctgtgatcttaccttccccaggaggattatgtttagggttaggttatgttgaccaaaaagagtcaaagtctgtaaagagttttattctgggcctcctatttgagtgaccatggctggtgacacagcctcagggggtcctgagaacgtgagcccaaagtggttgggttacagcttggttttatgcatcttagggagacagtagttacaggcaaagacataaatcaatacatgggaagtatatgttgggtcagccaggaaaggctttcaggtcactagtagattgaaagattggcagttggttcagagttaagtgttggctgaacagctggaagactacataaagaaatgggccattgtggtggctcatgcctgtaatcccagcattttgggagggtgagctgggaggatcccttgaggccaggagttcaaggacagcctgggcaacacagcgagacccccacttctacaaaaaaaaaataattatccaggtgtggtggtgcatgcctgtagactcagctactcaggaggccgagatggaaggatcgcttgagcctgggaagttgaggctacagtgagccatgatggcaccactgcattccagcttgggcaacagagaagaaaataaagagagagagagaaaaagagagagaggaaggaaggaaaaagagggagggaaaaaaaagaaagaaaagtttgagttaggataagggggattgtggaaaccaaggttcttgttatgtaggtgaagcctcagaacaggcttcagggagaatagatgataaatatctcttattggatcttaaaaggtgtcagactctccagaaaagacctggagtcttttctgtaagggaaagagattctctacagaatgcaaatttcccccaaagagatggctttgcaggactattttaaagtttgtcaaagaaaatatgttttggggtaaaatactgtaatttacttcagggactgctatctgtcatgtgatgctatatcagagtctggttggagatgggtatcttactgataaaaagagcctgttttgtcagtcctatgatctctattctaatagagatcataatgttggtcagctgtgcctaaactctgacgggaggagaattatgacaaggcatgtccaaccccctccttcccatcatgac

SEQ ID NO: 1882790 - DNA, 4001 bp, Homo sapiens
tcccaaagtgctgggattacaggcgtgagccaccgtgccctgcctatattatatattgttatagaaacacatctgtatgatacaaatatgacctatgtgtgggtaagaactgaatgaggatttcagctgtgcccactgtaggggagataggtattgaagtttgaatccagcccaattaaaacggtttgtaaacagtaacatcgctcttcaaagctacacaacggaattgagagtctctataatgattctttacagttttagtacacaactttaaaattcatgagacgtgtgaggaaacacgaaaatgagatccatacacaatttaaaaagcaggcagtagaagtgatcctaagatattcaaggtgttctaattcaggatgtttaaaggcagctattataaatctgttcatgggggtaaaggaaaatattttaagagatgtggaacctaagcaaagaaatggaaattatgaaacaataggaagataaggaaattaaaagaaatacttttgagcttattcaaagattagaaacagaagacagagcaatagaaattgcccattctgaataaaagagagaaaaagcttaaagaaaatgaagagtcttagagacctgtagagtgattgagtccaagttggagaggggacagaaaaattaaatgaggtacaaagtaaatcaccaactaatagctaaaaacttccaaaaattggtcaaaccccccagtttttatacccaacatgtcaacaaacccgtccaaaaaatataaataaaaccataccaaggccatattgtgatttaggagactggcaaggcagagctttctattgacttgctgtgatttctaattttaactacttagaagagtgaaaaataggttctccttagagtttctttttttttcttggagaaaaaaaagtattaaaggcagatgagtttccagcttcctcttaaatttccagtgtcttactttggaaattatttgaatttgtttcttccaaatcctgcagtaatactgatgctccagaaaggcgtcccatggagattctgctcttgtgcatccatcctgcacggagctgaagctgtgcctcctctagtttcattagcgtttagtcgtggggtacttcgagttaatctggaaaactaaatgttaacatggattcaggcctggcgcggtagctcacgcctgtaatcccagcactttgggaggccgaggtgggtggatcacttgaggtcaggagttcgagaccagactggcaaaaatggcaaaaccccatctgtactaaaaatacaaaaattagccaggtgtggtggcaggtgcctgtaatttcagctactgggaagggtgaggcaggagaatctcttgaacacgggaggcggaggttgcagtgagcctggattcagtcaccgcactacaacctgggctacagagagagactccatctcaaaaaacgaaaaagaaaaatggattcaaagaattatcactgttaagttccaccagcaaattactaaacgtggttccaaaggaatatttaaaaagggaaattaagtgttaccaagaaagccctatttacagcagaaacacagacactgttcgtgacctcactacagaaacttccttcatgtgttgggagggaccaaggggctctctggtcctgcacctgcattaattacttccaggaggtccacgctaggaccccaaggcctgggaaccagcctgggtcaggggcagagaagtggtgaacgtggctccaaggggcactcctgaggtgcagaggaggatttgtgacagcccagaggatagaggaaatggtggctttgaaaaggcaagtgccagtttatcaggaaacatgtatctccatttctggcagtgaactgacggtttcagacactcatgagaaagcgtcctacgtggaatgcccagaagtcggagaactgtcagacatctggccgttaaccacattcctacgcaggggctacactgcgcatgtccgaaggggcgtgtcaggggtggggcgaggaggaggtaccgttccgatgcagagacggtgccgagggaaggggcggggcgaggagaaggggcagagccgagggaagaggcggggcgagtccagctccaggaggaggagcgttactatgggaaccttgacaggtttgtgagcagctccctgtctcctgctgctccgtgaggaatcaaacttctggcactgacgaagcatgaagccagcatcttagggggaggtagtgacataattacaagatacgatcagccaccctggtcccgctgtcgcctggcaggcaggagaggtttgggaacaaccaggctctccttggcatggcagaactgctctggacacagggaggtgtggattggtgggcgggagctaagcctggcatactgggagttgtcgtctttgattagcttccagttttttcatcactgggcgaatggattacaatcccagccagcatgaacaggaggcggcgcgcagtcctgaaggcgaagtccggttgtgccggccttgctgtgcatgctgggagctgtatgtagtctcttcaccgctcccgccctttcaagagcttcgggactacaatcctagcatgccccaggctcgggagcctggtgaagttctcggggggaggagcgaagcggcgcgcgcctggccaggcacgctggaaacggtagctcttaacggttctcagcccgttggtggcaaggcagctggactggaatcccagcaggcgacatgcgaggaggagggcagcccaggagggttgggcagggcagtgtggacctcgccgcttccacagcgatgctggctactgatcgcaggcacctccttgccatgggaagtgagtcgggagggggacaggaggggcaggtccaggctgggcagtgaggagggcatgacgccgcgaagtgcacctcgcccttgtccaactcggacgagtgtggtcctcaccccacttcccgctgctaggctgggttccctctcccacctgcacctgggttctttctgggcatcgcgcctcctccagcccagggagccgcctgctttgggaagctgctatgggaactggcctgaggtccaggcgctgtccattgtgccgctgccctcttttctctccagcgagagcgcagtgcagccactatggggagaaatccgccgcctggcccgccagtgcacaagttcaaagcttcgcagggggtgacatggcctgtggcttcgtgaaaatgtcaccctcaccagcacctttttcacggatgttgaggcggcagagaaggtcattattggtttacgcaggagatgctaaaatccgaggagaaaatttcacttcccaggcgtgtgtctctggtgcgccatttttcaccaacccatttggtggaaagtccaccaaatggctacctaaagataaagacggtttaggcattttcattggcacgtcattggcctcatctcaactgaggcctgactgggcagtgtctcaaagacacagatggcaacctgatattcaagaacagatagtgctccagctttgtgggagcgactttcaaggtgtggaccacttggggagtctttgaaattccttaggcttcaacatctttgctgtgaatagaaagctgatcacccccggcactcacggcagtacctttactctctcgggctgatctgttgaatttttctgtctagacaatggaaacttccggaagcacttctagtttcgtgtaccttcctaataattgatgtccctaaattccatatgtcctcagggacagttgctttgattctggaatggcgccagcttttatgcttttatgtctaatccgtaaaaaccaaggtgttaatctacatgaaaataagaccttgttcatatagcacattccaacaggcttcatttgtgattcctgagtgagggttactataaataaaaacccctaaaaaccctgggcatggatattgacactgttattgtactttgtgaataatttactccttcaggatcaa

SEQ ID NO: 1882791 - DNA, 4001 bp, Homo sapiens
aggaaccctacaaggcctgtcagggaagatggggttagaatcctgaggatgcttaccccacagtgctgatggggagggaccactatcccatccactactgcaactctggagacacagccctcacatctctcctatataacatgaggcctaatctgcagagaaagagcatccaaacctgagccaaagggcactggggaaaagctcatggaactgagggtgaaggaacaaggccaacacccgcatttctgcacagatgcatctcccataaagaaaagaaaccattaatttacagggcactgttcaaggcccacttcaactgggagttaagagcatggagaaggagcacgtttcccctaccatggacaaggagggacaggaatgtgctcttgtcctggcattgcatgtacaggatgggcaggaaactcttcaacggtcagtaaccccacaccccagttcacagtgctaagtctgaggcttcctcagaacattagagatctcctcactccctcaccactgccaccaggctaagaagcatggagtcaaaacagtggaatatagctgggccaagtgcaagaaaccacgtgtgggaagaggcacaaagggaaggcacagcaaactcgggagatattagcaaagtatcatgagagggatttgaatttcctggtcctcagaaggttgttactgccataacgacttttaaccccagcctaccctctcatcaacatgaccacaaacccctatactaaggcagttatctgagagaaaactgctcgtcaataacctaaaacctatcccctttcaatgtcagtgggctgatgaaaaaataaaaataataaaaaaaagatttaccccaatgcactatcctatacaacatatgctattgcttttaacaaaaattagaagccaagacatccctttttatctttagtgagatcttcatttgtgttaaaaccaaattaaggtcccagtgcggagtttaggaggctgggacttcagatcacagcgggcgcccgcctcccgcccgccgtggccacgccgcgccgcgtccgggaaggcccagcggaggctccggggaaggcgacaccagcaggcggcctggccggcggcattgaaatgggcgtccgctccccacggagcgcgggaggtcgtagctgcagccggacgagcgctggcaccagccgggcaccgcgcatggatcccgcgtgcgcactgtcgcggtcatggcgtcccgggccggcaccgcggcctcggctccctgctctgcggctcttgtctccagggcggcgttgggttctgaatgttccagttccacagcagccagacgcgggatgcccagggacggcctgacggcagcgctggctgcggtgcggccagggcgctggcgtggccgaggccatggtggtcgtatgttccatggacaccatcaaggtgaagttcatccacggccagaccttcccagacctccagtgcagaggagtctcccaccaggttagagagattgtgcgagaacaaggggactcaccggggcctcatggcacccacgctaaagcagggctggaaccaggccgtctgcttctcctcctgacctccctgcacagctggtaccgaggggacaaccccagcaagcccatggacccgctggtcgctggggtcttcggagccattgtgggcgcagccagtgtcttgggaaacgctcctctggatgggatcgagaccggatgcggggcctggagcagcacaaacgcggaacacaccggcctatggctgcagatcctgaggaaggaggggctcaaggacctctagaacggcactgtcccccgcctgggccgctggaccgcgtctccctggatgtgaccagggataagggtaacagtatttatcctctaccaggaggtggagaagctgcacaacagtgtggaggatggactaagcccagaggggtaatgagggaaccccccaggcacctccagagcggccaccacccttgtctcacatgattccagcgcagaaatgccaaaaggcccctgcccacgtccctcgagctctgtggcctgccctgtgcattgtggtgtcacgtccatttgtcccctagtgccatgtctccccgtggtctgtacgtgacactgcgcctgtgtccacgagtctggcccggccgtggctggaggtccatctggcctgtgagtctgtgcccacttgtccatgtgcttattgtgagccctgggcctgtgattcattttctacgtcatgcgacactgcgccccgcctcccggggtgccagtgtggcctgagtccttggccctgtcatcccggcccgggcccagtccactgccttccaccctgccctggcctaccacagctgcctctgggcctcggcctggtttcactgcattcttggggttacacccctgaaccccaaattccacccctcaccagcgcttctcctaccattggcttgactggcccacggcccctccctctgcccaggagagggtgacacccaccactctcaggatcaccctgccaaggcagaataaaccggatcctattgtaaaaaataaaaaataaataaaaagtatgaagcacagaagaaaataagctacgaggaaaaagggttagaagatttttctttttgagacagagtcttgctctgttatacaggctggagtgcagtggcccgatctaggctcaatgcaacctccgccttccgggttcaagtgattctcctgcctcagcctcccgagtagctggggttacaggcatgcctcaccatgcccagctaatttttgtgtttttagtagagatggggtttcaccatgttcaccaggctggtctggaactcctggcctcaagtgatgggattgcctctccctcccaatacaggcatgagccactgtgcctggcccggttggaagaaatttgatatcacataaactttgcatactggaaatatatttgtaatattttaaattttaaaagtattataaatatatttatatttgtacatattaatataaaatattaaatttaaatattttaaatgtttaggtaaaaacaattgaggaaaagatgatatccaaataatttttgaaagagcaggaaactataaactgaatgaggaaatttggaaaagagtcaaatagaaatggaataatttaaacataaagaaatttaatatacgatatgtgagttaattataaaattagactacgttgatgagagaattagtgaactggattaatgaactgaaattttgagcagaacgaatataaccaaataaaagaaagagaaacaaaataatagtaatatgaatgtaattatacatatgtgaagaatagaatgacaaagaataaagcacaattatttcacttgaattcatacaaataataagtcatactaataaataattatttacaaatttctaaaagtaaaaaccagacatgtgcctaaaagagacactgtgcctgaaagcaagcaataaagaggctgggtgtagtggctcacatctgtaatcacagcactttgcgaggccaaggagggcgggtcacttgaggtcaggagttgaagaccaacctggccaaccaggtgaaaccccgtgtctactaaaaatacaaaaaaatacaaaaaacttagccgggcatggtgtcagctgcctgtgatcccagctactccggaggttgaggcaggagaatcccttgaacccgagaggcggaggttgcagcgagccaagactccagcctgggtgacagagcaagattccgtcaccaaattaaaaaaagaaaaagcaataaagaaagatatccaacaccataagtcaaactgcataacaccaaagagaatgaagaaacttcaaagccatgagagagagagagagaatctacacatgtgagagtgaaatctccacagcccaggcagagccagaaaactgagaaggaaatattaagagtgctgaaaaattattgttcaaccagtaactgaatacatagctagcatatatttaataa

SEQ ID NO: 1882792 - DNA, 4001 bp, Homo sapiens; identical to SEQ ID NO: 1882791

SEQ ID NO: 1882793 - DNA, 4001 bp, Homo sapiens
ctaggaaccctacaaggcctgtcagggaagatggggttagaatcctgaggatgcttaccccacagtgctgatggggagggaccactatcccatccactactgcaactctggagacacagccctcacatctctcctatataacatgaggcctaatctgcagagaaagagcatccaaacctgagccaaagggcactggggaaaagctcatggaactgagggtgaaggaacaaggccaacacccgcatttctgcacagatgcatctcccataaagaaaagaaaccattaatttacagggcactgttcaaggcccacttcaactgggagttaagagcatggagaaggagcacgtttcccctaccatggacaaggagggacaggaatgtgctcttgtcctggcattgcatgtacaggatgggcaggaaactcttcaacggtcagtaaccccacaccccagttcacagtgctaagtctgaggcttcctcagaacattagagatctcctcactccctcaccactgccaccaggctaagaagcatggagtcaaaacagtggaatatagctgggccaagtgcaagaaaccacgtgtgggaagaggcacaaagggaaggcacagcaaactcgggagatattagcaaagtatcatgagagggatttgaatttcctggtcctcagaaggttgttactgccataacgacttttaaccccagcctaccctctcatcaacatgaccacaaacccctatactaaggcagttatctgagagaaaactgctcgtcaataacctaaaacctatcccctttcaatgtcagtgggctgatgaaaaaataaaaataataaaaaaaagatttaccccaatgcactatcctatacaacatatgctattgcttttaacaaaaattagaagccaagacatccctttttatctttagtgagatcttcatttgtgttaaaaccaaattaaggtcccagtgcggagtttaggaggctgggacttcagatcacagcgggcgcccgcctcccgcccgccgtggccacgccgcgccgcgtccgggaaggcccagcggaggctccggggaaggcgacaccagcaggcggcctggccggcggcattgaaatgggcgtccgctccccacggagcgcgggaggtcgtagctgcagccggacgagcgctggcaccagccgggcaccgcgcatggatcccgcgtgcgcactgtcgcggtcatggcgtcccgggccggcaccgcggcctcggctccctgctctgcggctcttgtctccagggcggcgttgggttctgaatgttccagttccacagcagccagacgcgggatgcccagggacggcctgacggcagcgctggctgcggtgcggccagggcgctggcgtggccgaggccatggtggtcgtatgttccatggacaccatcaaggtgaagttcatccacggccagaccttcccagacctccagtgcagaggagtctcccaccaggttagagagattgtgcgagaacaaggggactcaccggggcctcatggcacccacgctaaagcagggctggaaccaggccgtctgcttctcctcctgacctccctgcacagctggtaccgaggggacaaccccagcaagcccatggacccgctggtcgctggggtcttcggagccattgtgggcgcagccagtgtcttgggaaacgctcctctggatgggatcgagaccggatgcggggcctggagcagcacaaacgcggaacacaccggcctatggctgcagatcctgaggaaggaggggctcaaggacctctagaacggcactgtccccgcctggccgctggacgcgtctccctggatgtgaccagggataagggtaacagtatttatcctctaccaggaggtggagaagctgcacaacagtgtggaggatggactaagcccagaggggtaatgagggaaccccccaggcacctccagagcggccaccacccttgtctcacatgattccagcgcagaaatgccaaaaggcccctgcccacgtccctcgagctctgtggcctgccctgtgcattgtggtgtcacgtccatttgtcccctagtgccatgtctccccgtggtgtgtacgtgacactgcgcctgtgtccacgagtctggcccggccgtggctggaggtccatctggcctgtgagtctgtgcccacttgtccatgtgcttattgtgagccctgggcctgtgattcattttctacgtcatgcgacactgcgccccgcctcccggggtgccagtgtggcctgagtccttggccctgtcatcccggcccgggcccagtccactgccttccaccctgccctggcctaccacagctgcctctgggcctcggcctggtttcactgcattcttggggttacacccctgaaccccaaattccacccctcaccagcgcttctcctaccattggcttgactggcccacggcccctccctctgcccaggagagggtgacacccaccactctcaggatcaccctgccaaggcagaataaaccggatcctattgtaaaaaataaaaaataaataaaaagtatgaagcacagaagaaaataagctacgaggaaaaagggttagaagatttttctttttgagacagagtcttgctctgttatacaggctggagtgcagtggccggatctaggctcaatgcaacctccgccttccgggttcaagtgattctcctgcctcagcctcccgagtagctggggttacaggcatgcctcaccatgcccagctaatttttgtgtttttagtagagatggggtttcaccatgttcaccaggctggtctggaactcctggcctcaagtgatgggattgcctctccctcccaatacaggcatgagccactgtgcctggcccggttggaagaaatttgatatcacataaactttgcatactggaaatatatttgtaatattttaaattttaaaagtattataaatatatttatatttgtacatattaatataaaatattaaatttaaatattttaaatgtttaggtaaaaacaattgaggaaaagatgatatccaaataatttttgaaagagcaggaaactataaactgaatgaggaaatttggaaaagagtcaaatagaaatggaataatttaaacataaagaaatttaatatacgatatgtgagttaattataaaattagactacgttgatgagagaattagtgaactggattaatgaactgaaattttgagcagaacgaatataaccaaataaaagaaagagaaacaaaataatagtaatatgaatgtaattatacatatgtgaagaatagaatgacaaagaataaagcacaattatttcacttgaattcatacaaataataagtcatactaataaataattatttacaaatttctaaaagtaaaaaccagacatgtgcctaaaagagacactgtgcctgaaagcaagcaataaagaggctgggtgtagtggctcacatctgtaatcacagcactttgcgaggccaaggagggcgggtcacttgaggtcaggagttgaagaccaacctggccaaccaggtgaaaccccgtgtctactaaaaatacaaaaaaatacaaaaaacttagccgggcatggtgtcagctgcctgtgatcccagctactccggaggttgaggcaggagaatcccttgaacccgagaggcggaggttgcagcgagccaagactccagcctgggtgacagagcaagattccgtcaccaaattaaaaaaagaaaaagcaataaagaaagatatccaacaccataagtcaaactgcataacaccaaagagaatgaagaaacttcaaagccatgagagagagagagagaatctacacatgtgagagtgaaatctccacagcccaggcagagccagaaaactgagaaggaaatattaagagtgctgaaaaattattgttcaaccagtaactgaatacatagctagcatatatttaataaa

SEQ ID NO: 1882794 - DNA, 4001 bp, Homo sapiens
tttttttgagacagggtgtcattctgtcacccaagctggagtgcagtggtgtgatcaaggctcactgcagccttgatctcccggccttttgggctcaggtgatcctcccacctcagcctccctaaccgcgtccagctagtatttttacatttttagtagagatggggttttgccatgttgcccagactggtttcaaaatcctgagctcaagtgatccgtctgccttggcctcccaaggagctgggattacaggcgtgagccaccgcacctagccagctttacatatttttaatctgtcagattttttgttcttgctattctgagaaaagtcactgaaaagaaatcatttatcattctttttacacacaaaataatgcagtttttaaattaatgagataggccatttatataaaatttgaaagagtaaagtttttattcataattaaaatatatgttattctggaaaacaaaaaaaaagtagtggtctgtcttcatttgtaaaatttcctttgaactgatgggaacttatctcacagatgagatttgtgggccattgtgaatactctacagattatgtaccccacagctttgagctgccaggtactatagcagagtgcttcctcagactcttgagccagtctgtctgggtgaaatttttagctccccatatactaactatgtgatctcaggcaagacagcttatttatgccacaactgagaccacagtaaggataataatagtatctaccttgtggattatatgaggactgaatgaattaacacacataatgttcttagaatagcggctggcacatggtgaataaatgttagctcttattataatatgtggtaaactgaggaactatcactagttttacttggatgaagtactgcatgaaatttttgtatttttattgagtttcatcaatttttttactgaacctagtatgctttctcgtctgaacacacaaggaagaaaagaaggatggctcctgtacgtgaaagtgacccctgcatatagtgcctgaaatcagaggaagcttgtcagtgtgggcagacaccacgagcagaccaatttgacattgtgcttctcttttaacctcttgaaaattaatgaaagttatctgatgaagatccttacattaattgctcccgattaaggtttaaaaccttggtttactgtggggtaaatttatgtttttgatagtcatccaaaatctttgtacgctttcagtttcattacagaataaaaaacaaatttaccacaatggattattacattacatctggtatttattcctcccaagaagctatctgcttcggaaaagccaggggcgcccttcattaatatatctaactgatggtgtaatgacataaaattccttgttgacccctgctattcagtgttattgtcttggaacatagaacttgataatctcttttcactgcataactacaaatgttaggctgtaagagtattttactttgttcagtgcaggttccagacatttctcctgatcaccagaagttcttttgattaataaggctactggtcacgaaaactcagcttactaaaagagatccagtcttctggttctaactaaaacatcccaccggatgcaggtgtacttgcaaattaaagtttgcctcatgtgtcctgtgtctcaagtcatacagacggcccaggagggtggagcccctgcaacctgcctagcggggcgtttgcgtgtctgggggtgtcgggacacgcgcaggacacacacagtcccactttcctagtctcgcacttacctcaaggctgtcaacttttacgctcctccctgcgcgcacagcccccacctcacgctgccacccctcacgccccgccttcaaagtaggaggcaccattgtcattggacactgcttctctcactcctattccagaaccaatcactcgagttctagtggggagcgcctaagccaatggaaatgctcgctgcggcagctgccgggtcctgggcgctgggaggcggtgccgggggcggggtgcggctggggcgaattagttgccattcggagtgaggagtgggtagaagcggcggcggcggcggcggcgtttgcggtggcgcggactccgaggagcgccagcacctcgaggccctttctctctaccctggtccccagaagcaggggtcccggccctccttgcagctgccgggttctcccgtgcgtgcagccctgcgagggctgaggagaaggctgcgagcggccctcggggctgcgtgatccgggccgttgccctgtcagcacgatgcctggagcggtggcggcggcggctccgggctccttgcggccccggccgtgaccgccacaccgagcccagccgggcggttgcggccgttggacgtttgttttcgcagccttcccctcccccctcgccgaggcggcgggggtgtgcgttggggagggggagccccgagactcctcccccacagcgatacccccgcccctcccccttacacactcgcacgcactatcgcgccggctcccacacgctcgcgcgcctcccgccccgcgcctccgtgtcggccggcggcgtccagggcccgcagagccaccatgtccactgcctcctcctcctcctcctccagttcctctcagacccctcatcccccgtcgcagaggatgaggcgcagcgccgcggggtccccgcccgccgtcgccgccgccgggagcgggaacggtgcgggcggcggcggcggcgtgggctgcgccccggctgcgggagccggccggctgctgcagcccatccgcgccacggtgccctaccagctcttgcggggcagccagcacagtcccacgcgtccgcccgtcgccgctgccgccgcctcgctgggcagcctcccggggcccggcgcggcccgcggccccagcccgtccagcccgacgccgccggcggccgcagccccggccgagcaggcgccgcgggccaagggccgcccgagacggtccccagagagccaccggaggagcagctcacctgagagacggagccccggctcgcccgtgtgcagaggtagcgagcccaaccctcccgtcctcccgggctgcgtctccccgacggtgccctccgtggaaacttcagcctcttcgggcttctctttgctagtgcattatcgaaggtgtgaaagtggctttgggaatctcacccccctgcggtcgctgtggggcttggaggagcgaactgaaaagcgacttttatttgaccctcatgccgcccctcagagtctctcttccatcactcgcctgcttcgagaggtttttcagtttaagagctggctagctcattcgtgtgtttgccgtttgtagccggggaaggagaagctgggcgaaacacttaacacgcacacaaactcttcagcagcggataaggtggcggttgtaatctctaccgtctctttgtgcttttctgcaaagttcctaacgtgcctgtaactaccgggatagtattttattttttagagggttggtggcattagtttcgatgtaaggatatcggctggatgtaatgatatctgctagaggggacagttttgaatgtacaattgaagtgtatacggttttttccctcagtcctccctctctccctctcccccagccccccgccaccccgcctctctctctccctctctttctccccctcccctttatatattcatgcatcagagcactcctgcactggaaacagtttgtgctctaccggagattttcatggtaaatttctgaaaacttatttgtggaacgtgttcgtttttttccttccatttttaagtacacttaacagttcagttgagctgttcaaggatctcaagtttctttttttgttaggtgtcaaaggtaatggtgagctggtggatgctgtgggtttcccttagtgttttctgttttgctttggttttgtttatgtctagggacacagtgcatgatttagttgagccctgggggagaaaaggaagattagc

SEQ ID NO: 1882795 - DNA, 4001 bp, Homo sapiens
agaaaactgcgtaatcagttgcagctcagctgtccccgttttttcccttcatgcttttgttccaatcatctgcattttgaggggatactttgaacacacacacaacctcccattctactggctgttttgtaacagatttaaatatttgccccaaagccagcctttgaccaatggggcttctgattaagttttcatgtaactggtagaaaggagaacattacagagtcaggaaaaacttttcaggtgatttagtcctttctcaatgcttcaattaactgatgataacgctcagtcaacatttatcgggcacctatgatgttcattacggcacttcattctgttaaagaataataatctctttatccttttaactcccgataatagctttttacacataaatttacagttcttggaatcaatgtatcttaacatatcttaatcatctttcttttgtaaggaagactttctcattttaaaggctttgggttttttttcttacagcaaaatcatttggcttgcgttgttaacacgttagtttgaatttttttttataaaagccaaatatatataagcaatgcttttctctctgaaaatttctcctgaatcttagcttttcaacaatttgctattttgtagaccatattcatgatttgtttactcatacacacttactaaggagatgtttactcagctccaaaattcgtgttaagactaggacaggctcaaatctatgacaaacagaatccccaaagaataactttaaaggttatgtaaatttctggaggtatcttattatctttctattaaaatgtcaacatattctatactttttctccatccattctggcaagacaccatgctatcttgagattaagctaagtctcctggttcagattcaaatccctgctcaataatctctttatggcactctgggcagtgtcttcatctgtgaaatcgggataatgattttatctacagtattgggttgctgtaaggattaaatataaagcatacagcatgtgccggacatagagctagcactccatccatgttagcgcaggatttctgattcgtcagcatcattactcaataactatcattcggcccttttaaattgtttcagcgacgactgaatgaacttatttataaatgtataacataactagggatgaagtcatactacattgaggtttcatttccacatagataatattaggaagcagctatgccaacactttttcttcctgtgatctgtatactgcagggtctctagaaacaatggtttggttctttcctggtgacaaaggataagagaagatgaaactgctacaaatggcaataacttaaaaataaaagatacagaaatatatggaaatgaaaaacatatacctatacatacacagctgtttttaaaacatgacctttattctcgaagctcaaacttgatttccaggtacagcaggcctctgtaacttttcttggcagtgaagtcatgaagtctcctgtcctctaaagctacagaaatttaacctggaagcaagcagtaggcactacgcacagcacagagggaaccctggggtgtacgctgtggctcccacctgtccgccaggtcattgtgacgcaaacgctatggccacgtggaacacctgccggagagcaggggcggggtcactctgggcggcggatccgagcgggggataccccaggagatgggggtcgaggagagaccccggggagtagagagagagaaactcactccccgagtccccgaccctccccaagcaaggtgaggtcaacgccacccaccttcccccggtcaccctgggaggggtcgctccggcgggcgtctgctggagggtagaagcggggaagggaggcagcggcggcgcccaggcggcggtaggtagccgggcggcgagggcgcccgcaccccccggccgctgcgctgcgctgcggtgcgcacgggctccgccggttgctattccggctggtggcggccgccgcaggaagggccggttcctgcgctccccccgcccctttccctcgccttcggctgacgctgacgtcggatgagtgatccggagggacgctccgaccgcggccgggaggctcctgggggccggggctccgaggtacctgccctccggggtcggggcgggggcgcgccgggcgggctgcaggaagcagcaggagacgcccggcagccgggacggtcggggacgcctggtaggagctgccttctctgccctccgcgggcggcgcgtgataggcgagtcgcctcctcgggtcccggatcccggtgcgggaaccgcatcagccccttcccctcccctcctccctccggcctgggaaggtctggaggatgcgcgcgccgtgagagcgtgcgtcagccccgggggagcggtagggaagcgttccgcgctccggccccagcgctgggagcaccggcacccatgccagcccaccccacccacccaccgcgcgcctcgccttcccggcggctccggccccaggaccccgagctccctggtgggcagggacttgcgtccagggttgacttgttgacaagttcacctgccgcggcgcctggtgtgtgctttttctcttcccctccgtggccctttttttggcaggggcggcagagagcatatgggtacctctttataaccactagtgccaggaggcctgagcttggtcccccgggggcgaggtgctcagcagtctcggactagacggggcgagaacccctaagcaaccccggttccagcaaaccctggcgcgcccgtttcctttgggcgctgctgactccgcctttcctgctccggggctattgcagctcctgcttcctctagaaacgaacatatcctgttgttatgtctgcctttcccccaaagcggctctccaggaacctttcccactgtctttttacttgtagtacccccaaagcacctgagcttctctttggggtcttaaaagtatcgcgcccttattctggcgaagggcattaactgcctggttggggagagttagtttggaaagaatcgcgttctcttcatttagatggcattaaaaaattagcgcaagaaagggttttgttcatgaatcttagtaaccgagatctggtaacggtataaaaattatcaaggcctggaaaatatgtcaccagcttgcttgggagtgatactgaatgtaggaagaaagacacataaggcatttattggccattaaggtcctataaaatatgactcatcgcaaacatgtttttgtccatacgtttcagtgaagtctcttcggaaaatctcaaattggtttctgtggccctctggtttgaatctgagatctgaactgttctgtggttagggagtgaaataagaaatgcttagtttgaaatctaggctcccgatgcaatttcataccccctgtttaaaacacacactctctaaaaatgcttttaagtaagttttcaaaccaaagatatatttttagatttcagtctttatttttgaaacaccctttgtagagaataccacagggacaaaatcaatttataatcctgaatagctcaaatatcactctttggttttatactaatactgtacatacatcttaattgcaggagatgttgctttctaattgtttctgtttgtattacaaagggaaataattgtactgtttataaagatgaatctttagaaaacgtaacagttaagctacagcgggctatttgtggagagacctgatgttaaaaaacgttaaccctgtatcctccacccgtggatcattgagtgctaaagatactggatggtaattgcctgggtggtttattttgtaactattttcccccatttggaacacctgagtaactatctgactgctttctctacgcatctttaccgcagtgcataaagatcaatctcacgaaaagtatagaaaattttgttactcagagccttcaaaatcagtacgttttcaaggtatttgactaaatagtacattttttt

SEQ ID NO: 1882796 - DNA, 4001 bp, Homo sapiens
gccagaaaaaatgagttcatgtcttttgtagggacatggatgaagctggaagccatcattcttagcaaactaacacaggaacagaaaaccaaacaccgcatgctctcactcataagtgggagttgaacaatgagaacacatggacacatggaggtgaacatcacacgctggggcctgtcagggggtgggaggcaaggggaggcagagcattaggagaaatacctaatgcatgcgggtcttaaaacctagatgacgggttgataggtgcagcaaaccaccatggcacatgtatatctacataacaaacctgcacattctgcacatgtatcccagaacttaaagtgaaataaaaataattttttaaaaaactgactattcaataaatggtgtttggacaactggtgaaattgggcatatggagaaagactgaaccctacttcatatcatacacaaaaactaactcaatatgattcaagacttaactgtgcaaaagcaaaaaagtacaaaaaattagaaggcaatataggagaatattttgttgaacacatgttcctgaacaagatgtagaaagtgtaaaccataaaagaaaaagctgatttcccagctgcattaaaacatttctgttcgaccacaaaaatttgaacacatattgagtattagatgacattaaggaatcattaattttattagataaaatcatggtattatgtgattttgtttttttttaagaaagactctattagagatacatagtgaagtatgtcctagtgcaataatatgacgcagaacttgctttaagatattccaggaaaaaaaaaagtggagggaaatacatgacatgagattagaaaacatgttgataactactgaaactgggcaatgagtatgtggaagttattttacaactctctttacttttgtatatgttttaaaatttccataagaagaaataaagagagaaagaggaggtaagagaggaggaagagtagaattacatttatcaaaaaatactgtgctagtctgggttccccaggaggtagatgacaaggtggaattaaaggtgcaagagatttgctggggacagcacctgtgaagaataaaggcaagaaggagcagcagtgtgggggagagtctgagactatgattcgggcctgacacctaggaaaagagaggggcgagaagaaggattggataggaagagcctctgcctgcagtgccacactgagaaagccctgggcaggcttcagtacctccaccatgctcaggtttgaccagtagcatgtgacccaaaggtgtggctaatgaaggatgtcaactaattactttccttacagtaggttctctctgaacagtgcactcccatggttaccacacataccagaaaggaagtgaaaaaacaaccacagacttgaaggagtaacagaagactggaacactataaacactataaagaatttcaagaaaaaaatataaaagtcaaacaaatatagaattaaaaacaggcaaaagacaaagcaggcgtttcactgaaaacaaaatatatagtccaaaagtatatgaaacgtttcatcagtaacaagataaaaattaaaaccagttcatacccacaagattggcaaaaatgttagagttgaatataccaagtgtttgtgaagttatggaataaaagaaacactccattgaatgcttgtgggagcactaattgccttgggaaatcagtgtgtcattagctcacaaagctgaaaacaagaattcacaacccagtaattccactcttagttatatatctgtttgctttctattgctgccataacaaattaccacaaacctgctggcttgaaacaacaaaaatgtattatcttacaattctgcaggccatatgtctatatgggtctccctggaacaacaggaaggtgttagccgactgcattccttcctggaggctctaggagagaatctgttccctgttcttttgcattgttggcacaattccgttctttgaggttgtaggactgagttccctgtttattcaccataacatgagggctgttcttcatttcagaggcctccagattcttctgcttttggctcccctcctccatcttcaaagacagcaaggacaggttgagaagttctcgagttgcatctctctgatcaattctttggcctccatcttctgcttttaagtacttgggtgattagttttggcccacctgggtaatccaggataacctccttctcttaagatccttaactttaatcccatctgcacattcatttttggccatgtaaaacaatatgttcacagactcagggggttaggacttaaatggttttagaaggatattatttggcctaccacatcattgtaaagacacttacacacacaccaggatacatggtttggaatgttcatagccacatagtgcatagacaacagaaactggaaacaaaccaagtgttcattaatggtaggatggttgaataaattctggtatgtttacaaagtgaaaaaccatacaatagtgaaataatgaataaaccacagatacacgaaataaaatgctaacacccacaaagttaagtagtggacacacagcagtctctgaaacaatcattctgtgtcctctttacttgttttcaagctccagattcaacccacttcccctttagttctcccagattcacaatcccacacgtgttcagtgggctcagcattggcatctgggatctcagttctgaactctcagggctcccataggcactggtttctcatcttcccactggctttccccacaatcctctaccccagaaaggcagcttgatcctagcctcccactcccagccagcccctgacccagctctctggttggacatccctctagctttccaaatcccagaggtactatcagaaaccactcagtcacagacccctctgcaacacaggagctcaccaaggggggaaatgcctatatgttagtgggatttcaggggagggaagagatagaagatgatctattttgaaggtatatttcccgcctaaaaatatggccttggtttctcattcctgttcattgttgaactcaacagctaagttgataacttaaaaagcaaaggaaatgtagcaactctaaacttctgagagagtaaatatgaaaagttagttctctatttataaatagaaaaatactctttttatggttaaggcttggcgatagttatttttactcaggaatttcaccaattctttgctggactgaggaagaaaattacctttcacctaaacaagagaaaaatattattcatagcacttaaatgttggtctccagccttaactgtacatcaaatgacaaagggaactttaaacaaatactgaggtctgggtcccattcctagtgattctgaataaattgatctggaatgtgcctggcagcaagggtttttaaggtctccaagtgattccaatgaacaactaaggttgagctgacaacctgtccctaggataaacatgtcaacacaggtcctcactgactcttcacaatcctgtgagataccagccctgcagatgagaaagctagggctcagagaggttaagtaacttacctatgaccacgcagctagtaagggtatgaaacagcatttccaaccaagttcatatgacttcaagtccatgcacttaatcactagcaagtgggaaaaaagctgtcattgtgaggaagggtgaaattaaatgtggataaggacctgcttagcaactttaatttcccactctagagccattacattcttacttacagacacagccaaggccgaatctctaggactcttgttcttgaaagaaatcttaaaagttttcccagtgtatgcatcatccttgtaccccagatctggaaactgggctcttgtcttatgcctatgaacggaggccctgtggtctcctctagcccaggaaggatgagcataaaccatggacaacagaactagagtcctgggttcaaatc

SEQ ID NO: 1882797 - DNA, 4001 bp, Homo sapiens
taacaaaataatcagcatctccatttcctccgaatcatccttgaatctaaagatcatttgaaaaaatgctaggccatgctatggtggcactcctaggggtgtcttatttccattttcctaatttcagagggaaaaaagtagatagagccttgatgcacaaatttgaaaataaaaccaacattcacctgtatgcactggccccttcctgtgcaccctccagccctgtggtccttagagctgcttcctacaatattcatgacttagaacagcccattcttaaagctggtccaacattcttccatcggcctgtccacactctctggtttgcgctggatccccaaggaaatgggtttggctgcctcaggctgtggtctagggacaaaggaaaaccaaagtctgagttctgggtagatgttgtcaagagacaggaaaccactcatggcttaattccaggagcctgcaaggtcaggcagtgggtgagtgcctgtgagcagagcctggagagatctctgaggtagcagtgccctgggagtctgagccttggaggtgctgagtctttggatgagagggaactgacagaagctccggtccattcagtcattcaatattcatctacccaatgactcccatggctcacgtcctttgcttcttcatgaattaataatgtttattttatgatgtcgtagaaaccagacatagcctaagcctgagaagtctgggaatggtagatggtatagtgttggggaaaccgcacttgctgttgagtcaggctggcttgggttcaaatcctggcctggccagttttaccttaaagggtagcttagcctccctgggtccctgtagttccctccaaaggggccattatgatgcgttccttgagcagctgttgtgaagatcacgatgatacatggaaaacaccttatacagtgctgctcacgtagtaaggactccatatattgtaatggttatcattttttgtttgtcgtagcaaggtgtgggtgaactaaggagcctaaatgagacttcccatgcagaggctgagaaaatgaaaggttactgctctagaagagaggtggggagggtgccacaggcaggctactgttcgccctattttgccttgggcagacattgatgccctgtccccacagtcctttcactcccgctgggagatggcttccaaggtgtggctccaggccaaggccaattactggggtttgcctgtgggctgtaacttctttaccacagtcaccctgagcagaaagccaagcgagtaatttcggagcgcttgtgtgctgacaccctttttgatgaggtgaaaggatctgactcaaagctagccctcgacagtgaaaattaagaagtgtttctaagcctgagaggcagctttgagctgtgtcctcagtcaggaacgcatgttgaaaagaagtttgaaaggctctgaactcttctagatggtcctgaatagacactccccacagtccacgtcccgggaaggggtagacacagctatgagcagcctagcttgccgaagcagcagggcttctgtgcctgtgcacctctgtcatgcctggaatgtccctggaagaggggacttgccctgctcagctccctccagggaagttacctgcttctctgtctcctgccatcacccgaagcccagctctgccctggcttaggagacaggaagggagcccagtcctcagtttccttctccaactgcagttcagcctgtcagagctggcagtgagaacctgggaagtgtattttctgcctcttcccaaggggaagcccgtggttttagtgctcagcagagatccccataggctaaaaagtcttagcaccgatgatgttcacccccaggtgcaggatactgaaaatagataattaataataaacaagtactctacctgacagcaagtgggtaaggggtgacagccagcggagcgttggtttccgattccttcctaatgtggttgctgctgggcggctctgctgctcgttagacaatcagagctgctgccctgctagtgtacggtggggggtggggagcacagccatggcgtgtatttgctgataactcagcccaactcaggtcctttttaaatgacacttcctgatgcacgacctttttccctgcaacacctctccttcaaagacccagaaaacaaacactgagaatgaagccagcctgctgcttcctgaccctggatggatccttccatattccaatatcacagtcacgtctgcaaacatccattctattaaagcagtatgcagatgtaggtcagaatacagagcagcagatgtgtagaacaaagaagtctagggatctaatatacaatatgaagactaaaagaaaaaaagagcagcatacattttgtgagacatacttagaaaagcagcaaacccgggaaaatgaagtaggaggcacagtggtttcacttgatcaaatcagcttctgaagctgtattgtgagggggcagggaaggttggaaccctcaagcattatttgggggagttcacaggttttaaataattccataagactgataacactttaatgagtccctaaccaagaatgagattgttgtggattcactgaataatcatggaaaatagacaatttctatgaaaaaaagtgagcatgctatgggagttgataaggtaacaatggacacagcgataccgtgtaaaggctcaggttttttctcctagcattttggatgcctcacctacatgtaactgataataatctgcttctttgtaccaagaaccacatgcagcctcttccatacactagctcattgattcccaataacaatcgtacacaggatgtattattttccccttcttcagagggcagaacaggatcagagaagtttagaaactgccctcagtcacccagtagggaatggagctcaactgtgaaccctggaactcctgactctgaaatctgctttttgactggctgaccacacagcttcccaatgacagcagacaggagagagaggagggagggagggagggagggagggagaaagggagagagagagagaagaagaagaagaaggaggaggaggagggggaggaggaagaggaggaggagggggaggaagaggaggcggaaggggaaaagagaacagaagggaagagggaagaaagaaacagaaagagagaacgagtgcgcccaagctggagccaacaactctccataccctcgggtctcccttcacagggcctcttctttctgtggctctgtggttctctgtcttaggatgcattctcacaatcacctggagggctggtcacagtccagattgctaactccacccctagatagagtttctgatctcttaagtctgcactggagcctgagaatttgaatttcttagctgttcccagatattgcaggtctggggactccactgaggaccacagctaagtataaacctgcctttcttggagcacagtactagtactgcagagaagctgctttaacatactctttcttattcttatgtataaattgacaacaaacaaacaaatatggttttgtttaacaatgaaccatcaagctttcctttgttgtaaaagtagagatttcacctactgcacaggttcagtaagccccgcggcgggcggggggactccacataccagcaaccgtctgcaggaaccacgtttttttcctatgtgaaatgccctctgagagccggcaagtgactaacatccagtctgtctcagaactcaacctatttggagagtgggtgttcacagccagcatgtgctcaagttggaactctcccatggataaactgttattaaagcactgcagcggctgcaggctcaaggacgtttctcttccaggcctggctgccaggatgtgaggcccgggtggaggaatgcgcttagaattccatgcggtcaagaattcttcccttgagccctgttaggctctgcttctccgatttccactttcccctccattcttgccaaagcta

SEQ ID NO: 1882798 - DNA, 4001 bp, Homo sapiens
agtgtagtggtgtgatctcggctcactgcaacctccacctcctgagttcaagtgattcttgtgcctcagcctcccaggtagctgggattacatgcatgtgccaccacacccagctaatttttgtatttttagtagggatggggttttgccatgtgggccaggctggtcttgaactcctgacctcaggtgatccacctgtcttggcctcccaaagtgttgggattacaggcgtgagccaccgcgcctggcctacaaccaatgttgttttataccacaatgaacactctgccttcataaggtttctatgacaagttaaagttaacacaaagtgaagtttgttcatagataaggacaaggggttggttaaatctttactcacagtaatttaccaagaacttcaaatactgggtgtccacgctaaaaaatttttccagtgggtgtttgatcaaaaaattttatagactcttgttctagagaaattcagtttcaagtggcttatgagattgtttcatctgttaatttggttttttgtggaattcttctgaagatcaccactgaattatcctgaaaaatattttctgagttaggcatgccatcctccacagttcaaaaaataatgaaaggtgataaagagttcaagccatttaaatatggatgtattaacgtgctttttaatagagaccatttttcaatgagttgcttgcaaaacattttttttggggagtgagttctcacagttgaataatttttttgtttttttttgagacagaatctcgctctgtcacccaggctggattgccgtggcgcaatctcggctcactgcaacctccgcctcctcgattcaagcaattctcctgcctcagcctcctgagtagctgggattacaggcgcgtgccaccacgcccaactaatttttgtatttttagtagagacggggtttcaccatgttggtcaggctggtctcaaactcctgacctcgtgatccacccacctcagcctcccaaagtggtgggattacaggcgtgagccaccgcgcccggccagcattttattatacgtaccgttttatcatctcttcacccatccaccaatgcatctcctgtatggacgtcttgattgttaactcacggcactggacctccagtttcatgcctctccacattgcagggtcctctacgttgttgtatcagtcacctttctaaaatacaaatcttaccatgtaaattgtttctaaaatctttcaatagaccccatagactcagaaaaacgtcccaaagtccggaatcctggcccctgcctacctttccagtttcattgctgggtcagaacgcctcacctaagccccacattgaccgatatggaatcaatgtttacagccggtgtgtacttaatcaacccccttccccgactgcgaccactcagatgcgccttcccgggccccacaccccaaaacccctgagccctttcgtccacagctgtctgaccacccagcaccctttcctttatgtcaagtatgaggatttcgtttcttaacctttctcactgctcaaaatgcaaactcagacatgagtgccgggcgctatccgtcctgctcacgtcttgttctcagggccgcaaggcgcaggggcagtaagggccgagagcccatcagggtccggcgctgcccgctgcccagccgggcgcggagaaggggacgggggtccggggtcgcgggtccggagggtctcgggttgtaggaagtgagggctcgcgggcgccgcacgagtgcgcgtgcacgttagcccggcgcgcgcggcactcatctcacctcgcggaagcacctgccggagctgtgtgcaccctttcctgccctcaacacaagccgtcggcgttcactactgtagctcattcagaccccactctccaacctactgtccaggcacagaaacgacagttaaggttcccccggaccgtacgctggaccttgcctccccggctcctaacgggagacgggctgccgtaaagcttcgctttgccgactgctgcaaagcgccttacgactgaacccggaatcgacctatggccagcagtcgtccccgccctgcttcaaacatttgggtttcaggagccgggcggaggtgactgccgcgtgtttgcgttgcacgcccaccgcccgaaacacggcggcggcctcagggctgctgcggcctcggcgggggcaggccccggcgcccgcccgcctcccggcctccatcatcccagggtgcaccgcggcgggcgcgggcgcgcggccatgttgcggtagtttgttgttttcttcctgcggaggcgaagggccagctgtggaccgcgaagcgcccggcttcgcctctgcctcctgcagccccctcccttctctgtcctccgtcacccgtacccgggcccggaccaggcacgtcggcccaccagctggcttggtgggggaggctgaaggccgggccccgcgagtgccatggcggccgccctgggagcgagcggaggagcaggcgccggaggtacgtgaggcagccggactctgggggccaggaccgcgccgcggtgggcgggggtgtaggccggggggcctccccgcttaggagaggacgaggctctccccggctccgactctctttgtgttcggcctattccgttttctccctcgccttccctcgctattgtcattctccctttctcgctcctcctctccgctgtgcagatcgtacttacctgtgaacttctgtgtgtcctctactttgcaaggctgcctaagtgtcaggcccatctctggcgttggcgggcattaagtgccgaagccggcctggtgtcctatgggtaggagagcgccccccccaccccccgagacagtgtcacttagggagagcggggcaggtcgctgtagggtgggtgtttaagattgtggggccatcctgacagatttagattgatttgaagcccattacaaaaacataacgaaaagattcacctgtgtgaaggaatgtgcgacagtaggccagtttggaaagtgagatttcttgagaaagtctcaataaatccctgttttaaattaacttatttgttgtctaataacctgttagtgttttatgtgcgtcttccaaaagtgaaaacgtgacacaaaaggtttagatactgagtcagttcctttggatagtttttcttgtttgcaagcataaacagtattgatgaaacacctatctctaaaaaattgtaggtaaattactttcaggtaaaattacatatcactgggggttttaaaaacgtggagagatacttgaaagtgactttttaagtgattattttgaaaactttgaaaagatggtaaaatatggataacaaaagcatttgggattagttcttaccattgaaacgttgaaaagccagtctagtgtatactcgagaagtattttttagtaaatgctagcagatggttacgttgttatcatcctgtttaggaattttggcccaactgtcaaaacgtttgcctgacaaaatggaaaaacaaaaaagactaagtgtaggaatgtcgcttctggcaatttggtttgctatatgccacttttctttcagtttaaatacatgatgtttgcgtgttacatctgagactaattaaaattttaaaatgtatagttcacctatctttctgggggtcagaattacttgttttatagcattcccagtgtaacctgggaactcttgggtgaacactcttttcattagaaagactaaggtgttatttgtattttttctcttttctttcagtagtgtacagtggagttttctagaggctgaataacatgtgaagacgttatgctgatggctaatggaatatatgcttgtgtattcttttacgtttctcattttaaatttctaaaatagtaatatcactgaatgtaatccagataaacaggcatttttgggtcttcaataattttgaggtcagaagttttgagaattgctattttagaagaataagtaggctttattca

SEQ ID NO: 1882799 - DNA, 4001 bp, Homo sapiens
aaaattagcaaatcagttaccatttatcttaggtaatgctgtttcgtgtagtaaatgatcagtataaactatttttgttcaatattacagtgaatataaatgttatatataatcaatataacatataagtactaaaaccttttcctttacatgccttctttcttttttccactgagtacttgaaaaaacaactcttgcacatcttctaggattcagccccatgaacaggaaatgtgatttaacagcacttaagcttctgagagttaaatgaatctggctattgattgcttaccagcattaggtgggttatcagaaatgtatgctgttaatttggctggcaatgggattgacagtataacagcactaccaccgaaagcagctttggttttaatctctagaacttttgtaccaaagcagcttggatctgccagggatttgtgttttaaagggattatgttaaagattattaaagttgaaccctcaagggacaaggctggatattcatgctagaaatgcaactccggatctctaccggccaagtcacttctgaatgtttgaggattcctgtcacactctaagttgctatgaaagtgtagactggctaaagaaaaatcttccttaggaaaaggctgattgggagttggcaaggcaactataaacaggacccagcctttcccattttagaacattcaacgagtctaagagctggaaatggaacggcagaatcatctgaatacctaaaagttaagaagatagcaaaagtgcacttcattaattaaagaagataaaatcaagaaacagagttgggggatggagctagcaaagagctaaagaggccttcattctgtggtcagtggaagcagtgtcagatgggtgagatggcctgaggcggcctcacggggctgagggcgttgaacaggtccaggcagtcctccaaccctgagctggaccaaagggactggctgcacaggctgaataagaggcactgcccacaaatcaattaaaatatttcataattaagaaaaaagcatttctaaagcacagtgccccaggaaaggaatttggaataagcccaataataaaacaaactggacctctatttgagctactatcctatgtggaagtgctggctgtgtcatgagctccttcctcaagagaaaacctaagacctatgcagggctcttcctagactgccagtaggatgacacattcaggtgacatgaatcacagaggagggaggtactaccaacccccctcccaacatgacacatttacatattcaaaagatgacaaaaaatcaagctccgagtgcttgcaattcatttggaagagataaggctaggacatagccgaacaatacttcaaaatacttattaagcaataaataaccagctgcagttgaacgctctctagattccacagtctagtttaatcctatttcagccatttagattcctgcataagagctctggcgcgtaaaattccaagtggggtaagacacaaaaatttccaaatatatgccttgataatactttcctgaaatggaaatgtacttactactcttattgattaaaagagcagattgagagcagtctaaatatccattattgggtcttctcatataaatatgatgtattcctgttttgtttgtttgtttgtttgggttttttttttttttttttttttttttttgactagagaatgaggaagctcactatggactgatatggaaggaactatgtatcattcagtgctcaaacacaaaagtagaaacctctctatatatctcaagcagagtaggatggaacacaggaaattggttaaaaactactggaaggactgaggagcaaaaaaagaaggggctcttacccaaagaggctgggaagctgccactggcccttggctgaatcctgtcagggatactcagtgttgatcttgctgaaactatccccggattgctggagcccagagcacaggcagtccaggccagctggggaaaatggctaatctcctcctcccacactggaacctagcaccagcgcctcccatgaaaccagctggatgagtgagtctgggaaagaggatggaggattatccagaagggtggacttggacttaagagtcaagagacacaatccagcacatccacccttttgctactcagcatccacacattccattgtacgcaccctacagcaacatcacacttcttcctcacagaatgcaattttattcctcacacagatgaacacaagttcactctctccctaaaacagataattcagagtaaaaccctgtaagatagtggcctcagccactgtattcatcccagggtgatgttaaattttttcctttcagacaccattgcaccttttataatggatgttctacaacctaaaggctaagttgtaaaattaaccaccaacactcagtgttatgcagagtaaacaaagaagaaaatgtgcatagctgctacgggttttgttttggtgactggtaacaaaactagttgactgatgatgataatagttaaataataattgagaatgaacttcttccaacgtccattccatcttccttttaccttcagccagcaactgaagttagttgtctggggttcttttcttggcaagattattgaaaccttcatttttgaagggtctaagtctttagctgtcctgcaggttgcaatattattccagaaacttttactcttggacatggaagtgctaagaggcacccaggagaatttccagggcttcagacatagtcctctctgccaccattgtgtgtcacggcaacccaattactccctggtaataattctgttcagtcaccccagccagaaaagtaaccctcttctttgcctgtccatttagtggcagaagaaacttgaaatgggcagacagaagtatcgaattccagttcagtggaacgttattgtttcccctagaggaagcgttctctcctaggaatcaagacctttaaaccagctgatctatgttttgtagaaggagggcaaatattctgtgagtgatattcaggatgtgatagtgagagtagccactctcatttttaccccttgactcccaggtctgtgtatcctgactatgagagacatagcatcactcatttgctgattcaaagcataatctacgtgcagtaagaaagccacctagactgcaggcagttatcttccagatggtaccatttttgaaacttcagttatctatttctaaattttgtaatgataactacctttgggtgctggagtacatggtaatccaataagtcccatgggcatgataccaatgctgtactacttttgctgtaaaattagttctttggtcacaagcaaagaacttctttggtcataatcatcatgctattaaataaggctctgtgttaagttcacagatggtggtactgataaacccactgcaggcagtgaatgcacagcatatttagaaatagtgtcccagcctgggcaacatagcgagaccctgtctgaacaaaaaaattttttttaaaaaagagctgggcatggtggtgagtgcctgtagtcctagctacttgggaggctgtggcaggaggatcacttgagcccaggagttcaaggttatagtgagctatgattgcaccactgcactccagcctgggtgacagagtgagaccctgtctctatttaaaaagaaagaaagaaaaaataaatagtgtctattctagaggacaaaatcatgtccttcataatagaagttccatgcaataatctgatggctgactggtccccctggggaatgactccacatcagagactcagagatggtagagcccctgtcagcaagttagtcatttatcagtgacaggagccagaccagtttgatgaggggaagtccacattgttgaactcatgtctggcttctctccctgccacaatggccatgctcttcatgagcctattaagcaagcctcggggttgctggaaatggactgactgacat

SEQ ID NO: 1882800 - DNA, 4001 bp, Homo sapiens
attttgtaataaagccaggagaaaccagtagaactgtgtgccacacacggcttgctggttgtctgcggcaaactcatgtaagagggttgaaggctgagcctcggaggcaccggcctgtggtgggaacgggacgccccagcaaacactccccagtaaaataaaccttcagtgtaaaatagacatctgagctgtgtgtgagaaaatgtgtgtgcttgaaaagcgaaaacaaaaaacagccagctgtggcacattttgaaaatgaatatttggaaatagtttcattgccgtgtgaaatgtttcagacaactgggtctcctataaagtcatccacagtcacgactctaaaaagcatggaaatgacattttctaacccacttcacatctttccaaatgaaatgtttccatgggttgaacatatactgaaattattatcataaaaatccaagacatcccaccgtgttaaaaatggtgccgagaatcaggcagggaggacaaggcctttgcagagctggtgagcaggaccgggacggagactccacggttaagcagcacagctgacttcctccacccggtccgccgtgtggggcagcttttcagctgcaggagccttaaatcaagtactgagataaccctgcacttccggccaggcctccagtgacctgtagggcaaaatatcaactcagtatcagaaaaaatgatggtgccgtgcagttgggtggctgtccctgaaataatcaccagagtacttttagagagaggaaagttcattaaatcatagagggcgttagtttttagatgttcatttcatcttttcctcatcctctaaaagtgactttgtatcgccgcccccctgggcccaatcagtggctttcctggctccggctctccctcggctcagccacaggcatccctcagctctaacgctcccgccgggatgtgctctatgcagtgagggctattcctgacatccccccttccagggaagccccatcactacatcacagcaggccgcatccagattatcctaattagagaattacttgtatcaagtgaatccccaaaccactgtccagggtcgctgtaggagggaccctgctggccttgagctccccaagaagcggcaccactcagcgtttagcttcaaaaggtccccagaggtttcgtgctccatgggtttgtttgttgtttggaaactgttgttaaaataatcgttattaggtgaccccaggaaacttgttgctcaggtgtttgagtctgtcacttaagaggccgagctcgagaagccggcgcgtgggttggggccgctccctgggcgtccgcagagcacgagagtcagcaagccccgcacacacgcctgcaatggtgcagccatcctccccgatccggccccacacacacccctgcaatggtgcagccatcctccccgatccggccccgcacacacccctgcaaccgtgcagccatcctccccgatccggccccacacacatccctgcaacggcacagccatcctccccgatccagccccacacacacccctgcaacagcaaagccagcctccctgatccagccccacacacacccctgcaatggtgcagccatcctccccgatccagccccacacacacccctacaacggcacagccatcctccccgatccagccccacacacatccctgcaacagcacagccagcctccccgatgcatacctttctcagggcctcagcagcccccaaggccccgagggacatggcagcctgctctgtgaaacgtcctgtctgttctgcattgtcctgggcctcctcccagcccttcccacaacgcccaggccagctccaacagaggggaagttggccttcaccatccagcgaggcagggtcctggggtcgggcatctttgagccaggggctggggcagtcctgacagctccacctgctcatgccatgccttgcagcctccctgcccgtccgatcgcctgagtcaggcgtggtcctggcctctcttgccccatttgttttttcaaaaacctgcaagcggaatgctgctgcttccgtcttcataggcacagagccggatttaagaagaggaactgtcttcattttgctcaaccacaagggcagtgaccttgggttcaaccctgggcctctctgactgctttcctggccacggctgctctttggccccatgaggagccacgtggacgtgggtgtgccgattgcacagctggagagacgtgggcagacaggctgggactgaaggtttgtcccagagctgagggtggggcagaggcagccacggtatccaggcttctgagcccagcccttgccttcatgtcgggggatgacagtctcgccatcagcagcacccaatgtaggccctgtccagggagtcagtgctgcatcgtcagtgatgggagagggaggcggaggcagggaaatgcacagagccagtggccttggctgctgtgacagcatagcagacggggcggcgcaaaccgcagattcatcgcccaccactcacaggctgggagtccagggtcaatgtgtgggcagggctggtttcttctgaggccctcggagaagaatctgtcccagatctctctcctcggcttgtgggtgccgtctccgtcttcacgcggtgttccctgtggctgccccgtgtccgcatctccgcctttgataaggacccccgtcttgttggattagggcccgccctaatgacctcattgaaacttagccagttacctccacaaagaccctattccccgataaggtcacgtccacaggtactgggcttagggcttggcatgcgaatttggggaactcaattcatcccaaaacacggggagtatctccctcagacctacgggcagtggggcgtggagcatctccgcacgtgtggctcggttattctacatgatgcaccagttccgccgtggaggaggctcctcggacagttcccttcctgagcgctcagctcttgtctgctccaaggtcaggccctgagaaagtgccccaagaccgtgggcctgggagaaagggtcacggggcttgtgctggattttgggacttttctcttcagcctgtacacaaaggttacacacaaagaagacggcaaagggaggtgggggggtggggagagggccagacagaggcaaacatggttctccagggtttaaagtgggcacggtgcgggatgcttcctccctggctggagaggatccttacctccagtggctctgcgggccgtgcctgttgagaagaaggctctgaagttaccccatgccacaggcctttccgttgcaggcccggctcggccgtcatcatgtgagcgtgagcctctgggtctccatcttgctcatgcccctcatgactacatgactcctcggaatgcaaggggcagtgtggtgttgccagtgagctgcttcttgtttcctaccaggaatcacacatcgcatccgtgtgagtacaagaaagacccaaatacccatccactgcctgctgatctggaggcggagagaggacggccccagagaccatccaccctccccattcacccatggtccacacagtgatgggaaaccacattccaaaatcaacacttttccaaaacagtgggcagaaaaagctggtggcatggccactccggacgcacatctcagagggtttgctgctggcgcttcagggtccactgtgctagtattttttttttttttttttttgagagacttgctgtgttgccgagctggagtgcagtggtgcgatcttggctcactgcaacctctgcctcctgggttaaagcgattctcctgcctcagcctcccgagtagctgggattacaggcgcccaccaccacacccagctaatttttgtgtttttagtagagacggggtttcaccatgttggccaggatggtctcagcatcttgacctcgtgatccgcccttctcagcctcccaaagtgctgggattacaggcgtgagccaccgcacccggccagtg

SEQ ID NO: 1882801 - DNA, 4001 bp, Homo sapiens
agcctcccaggcagctggactacaggtgcatactacaggtgcccagctacttaaatttttttttctgtagatatgagggtcttgctatgttgtccaggctgatcttgaactcctggcttcaagtgatcctctttcctcggcctcctaaagtgttgggattataagtgtgagtcactgtgcccagccccatctgttgaattgaatgaaatacactggcttgaatatggagcactccttttttcagtgttagtgcaggcgaaattatgtatggagatacaattatttggggaaaaatgtgtggcttatatgtagacaggatttagaagccttgtactatgcagaagaaagagaatcattattcagaaagtagatgaaaaaaatagttgattcattattgttaaccttgtgcctaagtctttgtaaatggagctaagttaaattttgcaagtttattgtcatgaaagagaattcaaggaattcttctaggacagagttactcatgggctacatgcaaatttcatagtttgaagtcacccaagagcagcttaaatttaacatgacaatttctcaaaatattattttcttatgtgaaaaccccaggctaaacacaaccatttttgcaaacagcatgtcttttcatttctgctctctgttaagtctttgtgttttaaaatgcctttgctttcatgtgagacatcgccagcagccttgtggctgggtggtagaattgctgctgctacatcacagattctgcctttttatatcttcttcaagtataaagcaccttgtatttgcacagctcttttaactttttcaaagtctgtttacatcttttatgcttacacctctgtgaagtaggaagcatgggtttttctacccaccttgtagagatgagaacagtgagccacacagaggttaagtgatgggttaaaggctgcagcatcctcccactatcccatgctgttttccttcctagagtgaaattacgtgcgtacacaagttctcctgaaacaaacactgagcaaggctgtgcgtggctgcttgattcacttgtgtgattgctctctatggcatggacggagggctgcaggaaagctaattaatttgttcagagaaagctgtgtatgacttcacgtgttttatctattctgtcattcaaactctgtggacaagtcagttttcataatgactttagatcattgcactaagacttacttgttttccaaatgatttggtgatctgttcacttaatttatgccagatgctttcttactgtttaattgccacctgcaaaataacatttagatatgaagattttagttttaaaattgttttgagctctcaaatcaaaaacttgcaagactggttaagttgctttttgttcatagcaaagtaaacacacctctagctgagaagcaagggcttttacaagtcatttgcttcacctagaataaaatctgtgaattatcccaatggttacgatgatgtgattaaaaaattgggggaagaaataaaggataacctgttcgcatcttctttctcttttgataattcctatacaaacatcttaaaagatgagatttttcattgtacatttggcagagccttattccttctgttttaatccgagatttccatttaaattttttatccagttttctagcatgtgttcacagttttgtcatttgaatcaatttcattcctcaggaattaacataaaccataatgttttctatgaataagaactttaattctaaaatctggttttgactaatgattaacttttcttaatcctttgataattcttactgttttcctccagaccatgtaagtttgtttccatttttctcattatgatgctctaaatcaagatgcaaaccagaatattcatttttcatataaaataggtcttacctttttatgtttctactagctgtattcaattgattcactgaaaatgattcctggctttagtttttgcagaaagaaagtaacaaggcgaactcactagcaggccaggaaggagctgggaggagactctttctcaataaggcagtgctggaggttggtaactaggtcagcaaataggatctgggaggactaggattatcagtgaccttttactagttgagtggaggttgtgtatttaaaatgcagcctagtgtagtgcagaagtgctgaacttggggacagactgaagttctgggcctctttttgctgctttctagctctagaaccttggataaatttcctaatctatctgaacttcacatttctaattcaccaataggaataataatactatttctcagaatcattttgtctatcagttatctggtgctaagtaataaaccatctcaaaacttggtggcttaaaacagaataatttatttgccaacatttggactggtttcagctgggtagttcttttgttgatctttcctggggcccctcatatagacacagtgatctggaggtttgactggaattggatgatccaagctggccttactctcatatggcagtcaactgggactgtcagcagaatacctcagttctctatgtggctgcttttgcagtggagaccaggtttcttacatgacaatgacaatgatttcaagaaggcaaatcccagtgtgcaagtgtttacctatcctctccttgtgtcatattggctgatatcttgttagtcaaagtaagtcacatggctgagcccagggtaaatgaaagaaggaacaatgctgagggtagaggcttcatttatatggaatcattagtgtaataatccattcactgtgttcgtcaaacatgacaatacatgggaaattatttttgaagtgttacatcagtgtaaacgttgtatggtgtgtgtctgcatgtctatgggtggtggcagttggcgaatggtgatggggaggcatgtacctgaaaactttaatagacattgaatttacagtcctggaaataattgtttagttttaccgctggctttcataattacattaaacatatttaactcaggtgcactcaggagtgtagcatgctggaacctgggtaatgggatcagttgggaggggaagagatgtgaagcttggagaaatggactcagctacagagaactgggaatccaacgctcagcgtttcaaaaatttaccaaattaatggataaattggtcattcctcagaacatagaggttcattctaggtgagttaatttgcaagtcaggagggtagaggtcatgagagcttttcacacatcctgaccatggagggagattatggagatgaggatccatctgaggcagaggaatgggaactagccctagaaccgaggggattaaggtgaggacaagaggcttaagaaagcagagaccaaggcaaatgcctatttctttggactagacaaaaatacaggaagaggaggacaaacagcatatgaatttgggagtactgtgctcagggcagtgttagtcaggtgtgtagactttacctgtcatgagtgcccttaaagttggtcttcaaggaatcttggaatgcagggtggtgggggggcggtggtggttgtggaagctttgcaaccatcctgagccactgggtctcaggtttgaaggcaaggccgacagtgaggctgcggctattaaacacgctaagtcgggacgaacctgaggacgaggtgaaagtggcaggcattagtgggcacaggtagggacttttagaaggctgacacaaatgcctggtaggatattggttctcaaacatcaataagcacaggaacttctggttaaaaatgcccatacctgagcttacctcagagattctgattttagtatatcttacatggtacccaagaatctgtgttttcagtaaacagcttagtattgatgatctaacctgtgttgtccaatatggtacacatgtagttatttcaatataaattagctaaagttaaataaacttaaacaattagttgtctactggtcaaatttcaagagcctaatagc

SEQ ID NO: 1882802 - DNA, 4001 bp, Homo sapiens
ctacatttcttgaatccctgaaagacggtatacacattctgcccttactttggtaaaacctctctgaagagtccacaactctatgaggaggcttcctggttcaagcaatatttttattgaatttttactatttctttgcaccactggccaataaagccagtgtctaggatttgttatactggcactgagacactcagtaaaggaaggctctgctggtgacagcagctctggaattttccacaaccactctaacaatctttttgaatcttcagtacttttactgaattagatacacagtacaatgggacactagccactgtttgtaaatttttcataaaaacaatttggaaaatgacaccccttaaacaattaaattaaattaattaatttatttatttatttttgagatggagttttgctcctgttgcccaggctggagtgcaatggtgcgatattggctcactgcaacctctacctcccgggttcaagcgattctcctgcctcagccttccaagtagttgggattacagtcatgcgccatcatgcctggctaattttttttgtgtgtgtgtttagtagagacggggtttcaccatgttggccaagctggtctcgaactcctgacctcaggtaatccgcccaccttggcctcacagagtgctgggattacaggcatgagccaccgcgcccagccaacagttttctttagggcagtgtttcttatcttatcactgctgaaaagtccttttaagactatttctccacagactcctgttctgaaatattttgtttataaatacatatttttgttaaataataatcttcccaagaggaaatcaagtagtcaagaaatttttttaaactaaaagtatccttgaggctgtattttaagtaaacaaacaattatctttaagtttcctaaaaacttaaagtttcaggaaagcttcagtttcagtaaaaactgaaaataactagaagaattctcatcctctttataccctcgcttccctccccaccctcgcccccagacactggttattactttcctcagctgctgggattctgggtattctaactttgaaactagagttccagaaacaccaggcagatagaataaaattaacaaaagcctgtggattctcctaggttttttgctatccatttaccctccttactgttaatgggtcttttactgtggcagttagccctgcctcaaagtctcccaaactggggacgattagccccagcttattgctaagataacatcaaaagaggcaataagcaagttggcataggcaacacctctcaccttaaggaactgtctcctgagatgtagaataaatcacttgtcctctttaaatgaatctcttcaccatggttttgcttgattcccccatcctgaagttgctgctttaagatgggtgggaaaatctccagcaaaagcataacaaaacagcaagtaacagcaattttttttttaacagaaaaaggattatttttattactttcatacattgccacagcactgtttgggaaagattagaatcaatagaagtttggaaatctgaccttggctggtggaagaatagaaagaatctggttcttcttaatttcccattcaggttctcagtgttccaggaagcagtttgctcaagtttcttttctccatttagctctcctgaatgcccgacttcagtgcctgggcattgctgccaaggatcccgctggtgcattcagctgccattcaaggcaacagccctccacactgcctcgcacttggaagtttgtcttacagcataaaacaggtggaaggacattctgcctttagagttctgctggcatgtcttatcacttctgttgtccagtgccaagaatgacaaaaatcttttgtgtatgtttgggggtgggaaagaccagatataactgggaacagcagttaacttgttgttcagacaagattcccagggcagctgttataactcaggcagcaataactctaacacttggctctgctgctaagatggattgatagaaactttggacaaatcatcaacaaaaattatgttctcatgagactgttgaatatactatggatcaacttaaagataatcaaatattcgctagactcacaacaaggaaatacaataagcatattaatcaactggggttgtgtttatactttcatttctaaacatctgctttcaatgaagtcattagtatctgctggcaaaaatttgaattgacacaggacttgcaatctgtagctacaattgagacaggattacctttttatgtgctgacactcacagtcttctttaaactaacaatttagtccacttcatgatggaattctaaattctaatctgtgaacttgccgactatttgtcctttgccaaagactttaccccgtgcttaatttttagtcttgacacatatgtgtacacacacataaacaatctttttgtattttttatacaaataaaaagattatgttagtattcaaatggtagttatttacactaaattaagtttacacttcagtagaagataaaaatgtgactaactgaaataaataattcctggaaagagaattctcaacataaagttatatgaatctcaacactgtccattaaatctcaagattttctaaatcttattaatgtgcatcagtttaaaaaaatagttccagctgggaatggtggctcacgcctgtaattccaacactttgggaggctgaggcgggcggatcacctgaggtcaggagatcaagaccatctggccaacatggtaaaaccccgtctctactaaaaatacaaaaattagcagggcgtggcggcacacacctgtaatcccagctgctcgggaggctgaggcagtagaattgcctgaacccaggaggcggaggctgcagtgagccaagatcgcaccactgtactccagcctgggtgacagatagagcaagactccgtctaaagaaaaaaaaaaaatagttccgtggttttgccttcttcctttccattttgttaaacatatccagaccaaaattacaattgcccccattgtagaatgagttgaatgtgggcattattgataccgttaatgattctgtatcaccagcaaagcataggattaaaattgaccttggcttaagttgacttacattttaatttggccattaaattgatgctggaaagttgggacacaccacacggttaacagccatctggcctgcctgtctccttctatcctgacaactaccttggcttacctagtgtgttttatctcttctctctcatcattgcctccaccaggattcctgagtcaaagcccaacatggccctctgctgttgtactggccaatctggtctgtcctgctctgcagctgccagtcttctctgtcactcctggtaccccaacaggcccagcagcctctgccagttctgctgttcacttcctaaccaatgcctcaacaactcctgtggtgtcttcttctgccatcacatttcacttccattgaggccccaaatctctgacacacctgctttctgcctctcttggcagctctcagctcactgctggcacttccatatacccacataaagccaaaccataaggtaaactcatggccctaccacactgactttggttatttctctaaccccttggacatggcactgatatttgatcttgctgggactcttccttagagaattttcccccttgctgccttggggtggggagcaccctcctcattcctgctctgggaacggacagtgatggggctgcctcctgcctcctgttgccttctcttaccacctctgagtcaggccagcccagcaggttcccagcctggctcagattcactagaatgcttttgttaccacctgtttatctgtcctccacaattgcagcacttttttttgacaggttgacagtgtttcctttgctgggctttaggtgaaaaatgtctacaaatcagagtagatgtgattagtgttaag

SEQ ID NO: 1882803 - DNA, 4001 bp, Homo sapiens
cacagaaacactgagagctgtgaacttgtgtgtatacctgacatagtgggagaggggggcttccttctaagtaatagagaagagtgaatattctaatcattgagtagtggtcaggcctgtaatcactgctttttcttttgctgagctcggtatcaacggacaagctcaaaaattgtagctatttaaaattactctccatgtaaagggttcctgttcctttgatcctatcacagacttcctttttttctattgaggaggttcataagatctcgtgggcaagggctgaggagatgactattgcgtagtgtagttgttttaaattaaaaatttacctctagttataggtgctactttttacttaccctcaatttggagattacatcatgcaggctgggcacagtggttcatgcctgtaaccccagtgctttaggaggccaaggcgggagaattgctaaaggccaggaattagagaccaccctgggcaacacagcaaggcgtcatctctaccaaaaaaaaaaaaattatctgggcatggtggtacttacctgtagtttcagctactctggaggctgagatgaagtgagaccctgcctctaaaataaataaataaatcaattatgtatatcaggcaaatgatttccatactcttcttgttaaaatatcagtttggtaaagatggtaaaagcttatcacatcccaggaagtcgaggcttccgtgagccaggatcgcaccactgcactccagcctgggcgacaagagtgagaccccgtctcaaacaaacaaaaaaaaaaagtgaaaattccctttcagaatttcacatccaaaaatgtgaaataaaagagttggggtctaagtggcaaagtgctgccgtgtttcaagttaagggcttccatggattgtgtgataaatacaggtgtgaatgtgggtgatttgttttattcttcagtgcccattaagtagaagcttgtattttcctccttcccccttcaagagcccccctccccaccatgcaggcacatggaggccccaagttggaagcacattcacagcctgaagctgaaggacaggctctgaaaaatctttctttcagcaaaacgtctactaatctcagaaagtgagctttgtcaccattgatactctgtaaggtgggatgaaagcaagttttcttactcattttgcccagttgtcaagaaatgctgcccttctctctaacataaattaacaggtttggctacagcctagagaaatacaaaatgtcacattttagccttagtggccggttttcaaagggtgcctgagtgtgaacaccatgtcggctgctctgttaatgtgactgggtctcataaataggtatttttctacccctgtgatggacaaatctgaaaaagttttttcatcttacaagcccagaggatggtatttagaggctgatttttggtatctcagttcctggtagggaagacgaattccgtatttgaaatttggggacaaacaaaaataattctttctctttccttgaagggttaatgctccaaccagcctcagattggttcgcttgaatcttaaaattacttttctggtcacgcgcaccgaaggtctaagcatttgtgaaatgtcttttttttttttctttcctcttgatgctgttctctttgggctgtcttaattacacaggggttgagaaaccaaattaaaattaggcgtgtctggtcaacagtgatcacgttgcatgcttttagctttgcttgttgaagttgcttctcctccccgagtggctttcctccccacaattttttttttttgaaggaaatatcataagctctttcagaaatactcacaggaagtgagagtccgtatgctggttactcaccagcaactgagtgttggcaggtggagaatgctaccgcagcccgcccagacggatctgcagactggccccatcgcagaggattagacagagggtgcatggatcatagggtttttgaacagaagggagttttaagaggaaattggtcactgcgtgtcatctcgaggggtggtgattcagggagcagggctgggggtcagaaggcacgtggctgccatctcagaggttgctgctcacttctcagagggcaggctggcttctaaaaatcaacgctccctccacccccaaacagcgattcttctgcagtgaatcacttccagaaatgaatagccacagttttttggaatgaacgttgtgaaatccctcctttataatggcaggttttcagttggtggttttatcagaatttctcaagatcaaaacgaaaccttctctttaaaaaggaaagaaagtactatcgatacagaaagcaaaagtatttccagtctcctactgaactgtcacggcagacctctctgtatctatatttagagctgtatgtccatatatttgcctgaatgtgtgagttcttggaagtatggattcattgccaggagctggtgatttcctaagcagaggtcgctaactacaagaaatgttacactcggtgagtaggtggtactttctgaagattattggtaacccagtgttggtcgtcttgagtcatggatttaaatgacggctagcaagctcttaaacaccttctgctttatatgatacagagtatggaactgcaggacgcacagacaactgtgaagggtttttaagaatatggattcattgaataatcagtgaatcttgtgaatatactagacctttggaggaggaaagggtgttttacagaaggaagtggtttgtgggggcttttaaaggtacagttatcgcttttctatatttattttcagcatcattcagtcctcctatatgaaagaaagaaatggtctcgatagagaaaaagttatgctgactctttaaatgaagaaacttgatcctcatgttactcttaactggacttttttcctcctaaatattcataagggaaactatcccatgaaggcaactaactttctggcaatctctatgatgtgtctaattcagaacccggtgggctctccatgcattattggcagcacttttatccaggggcacagacagggaatagggttactggaaacagggagtgtagctcaaggaattgttctctctctggagtggataagttgtttgacctactgactcatttcataggaattaggaaaacaacctagtgtggtttttattgttagtcctggaggattccaaaatctgtgtgcctgcaaataagatgagctggggaaagggagcaccagcatttggtgtttctacttgcctcttttcctgatggaatccaatcctctgcttccaggacaagtcctgcgcttggggatcctctgtacgcccgttcactggtgagtatgtatgacagcaatttctgatttcactagttcttgcttctaacacctaaatggtgctttgtctagggaaacgctttaaagagcattttcccccagtacgtttataatacatttcatatttacctccagaaaatactgtggatgtgataataattataaaagacaacccacagacaacaatgaaagttaagaattaagatatattctgatagatttttgcagcatattgacataaaggcagttttggttttgacatatgtacactaaaatgatatctgtaatgctattaaaactcaagtgtacaaggcaccagtatattctggcaaaaataatataatgatcaacagttaatgaaagacttgtgctttgagcttctaacaaaatgttaatatgtagagaatcttgtgattcatgatgctttggttctcaaccagggttatcaaataagctaaaagtatcagaagaggacaaagaaagtacgtaaaacatggataaaagcagaaaccgagaaaagatagctttgatatttaaagtgttagattatggcctctatataatgtcatatatgccagatccccccccaaaatcacaccctcaaattatgatcttcattattcaaaagatgtttggcgtgttggtg

SEQ ID NO: 1882804 - DNA, 4001 bp, Homo sapiens
actgtgtagttcattcatgatttcttcatgatttcctgcaccttctcaagacaaatatgttcatcttctcttgaattatttttttattattattattctactttaaggttttttttaaaaaaaacacaaaggtttccaaacccttttagctggaaccttgttctccaatctagaacagacgaaagtgaagccttgcctctggcaaggaggggtgcctggttcactgagcccctcaggctcttcctcctccccatctctatgcttctgtgcaaaatagcttgagaaagcactgctctaatctactgtctgcgtctctccttccatccctccctggccactttgtgttagcttttaaactggatcagggcaacatcttattgttcaggtttgccctctgcagccagcgtggtttctggcatggaggcagcacccttcaggtcctgaggcaggtgccacacagcaaaaggcaaacccaggtttcatgcctgctccaactctcagtagaacctgggcagctttcttaacctatctgagtctcagcctcctagttcaccaaaaggacataagagtgcctgatgtggtttgacggatgcgtctctcagaattcatatgttgaaacttaatcaccaacgtgatgatattaagaggtggggcctttaagaagtgattaaacgatgagggcagagtcatgaatgggagtaaggcccttataaaaggccttgagagagtgagtttgcccactaggtacagtagcaccaccacgatcacccccagctgtcacaaccaaaaatgtttccagacattgccacaattctcctaggaggcaaaatcactctgttgagaatcactgttttcatgatggaagactggaaaaagaaaaggttaagcaaaatttttgcaggattaaaagtatttctgtaggcctagagttttaggaaaacattttcagccttggaatacgtcatggctgcgggttgaatatatgtgtttttccaaaattcataggttgaaacttaacccccaaggtgatggtattaagaagtcagaccttggctgggcaaggaaagtcatgcctgtaatcccagcactttgggaggccaaggcgggtggatcacctgaagtcaggagttcaagaccagtctgacaacatggtgaaaccccatctctactaaaaatacaaaaattagccaggcgtggtggcacatgtctgtaatcccagctactcaggaaggctaaggcaggagaatcgcttgaacctgggaggcagaggttgcagtgagcctaattgcattgcactccagcctgagcaacaaaagcaaaactccatctcaaaaataaacaacaacagaaaaagaagtgaggcgtttgggaaagtgattaagtcatgagggctccacctttgtgaatgggatcagtccccctataaaagaggttgaagggagtggcctagtcccttttgctcttcccattctgccatttgaggataccgcaaggtgtccatcttagaagcagagaacaaggccttaccagaccctgaatcttttggcaccttgatcttggatttctcagccttcagagctgtgagaaataaatttctattatttataaattactcaagccatggtattttgttatagccacaggaatgaactaagacactcacatattagacttctctgattattggaccagcataactgaaccacacactttagttttcaaatgttggcaactgaagaacttactttaagtaatgaccttcaagtaatgaccaggtgagtctcggtgcagttagtccactgagttcatgtcctgattccctgctagtccatccagaagagaatctcccagatgctgttatcatttgcttcccaagacagttgcctcctggactgagtcagagggaaaagcttagatagaagccacacctctgtctccagccataagcgggctgctggaaggattcccacagagttgccatgggctcttcatgaaggctggaggttagctatggccctggcgtgctctcacctgccccacaacagccacctcaccctccaagcaggcctgcagctgcgcaggagttctagacaccatgcctcagtcctcccacaggccaagagggaaaaattacaaagcaaaccactggtggggatgccagggcctacaccaaaccccctattagctgtggagacaggagactagcctgtggccaaaccctgaactcagcccacaagaatgtgcacggagcacagggaatgacagcaatgctggccttggtataaaagccaggagcagggaaatttgattgtgccaggaggacagggagctgcagagaatcaaaactctgcttccctaatatttattccaaaaacagctccgtggtggggatgttattgctggcacttccgcctactctttgtactgtgtgttctctttccaaaggtagttctgcttgtttgtttgtttgtttgttttgagatggaatttcgctcttgtcccccaggctagagtgcaatggtgcgatcttggctcactgcaacctcctcctcccaggttcaagcaattctcctgcctcagcctctcaagtagctgggattacaggtgtgtgccaccaggcccggctaatttttgtgtttttagtacataaggggtttctccatgttggccggggggggtctcgaactcctgacctcagttgattcacctgcctcggcctcccaaagtgctgggattatagtcatgagccgccatgcctggccttgctcgtatttttaaacaccagcatcaaacagccctgaaaactgctctttctaggagcttggctttgtggggccgctagaaggatgcaaggcctttgaggagacaatgtcagaagagagagaaatcttgaattataagagagagcaaaaagtggatggaagaagagcccagaggaggcagggaaagacaatagatagcccaagtgaagacattagctttgaaagagagtcagccccagcaggagaattgcttgaacccgggaggtggaggttgcagtgagcagagatctcgccattgcactccagcctgagcaacaagagggaaacgccatctcgaaaaaaagaaaagagtcagcccctttttccttgagatcgagggaaataaatggcaagtgtagattgcagatgtacttactaatgagagaggcgccgaaagcaagaaccagagggagggagaggctggtgatatgagggggattagataaaaagaagacccccccaattagtggggtgtaaggaggcaaggatgcatgtgcctgcaggcggtggtgtgagaggaggccaagtggagccattcatactctcagcttctagaaaagcctctgtcctccatcccttcttccagtatccatgaggaaatgcaatgagtgatgcctaaggcaaaaaacttcacttttgaccttcagactatgtttttcatcttaaaaaaaaagatgagggacttggaatgggtggttctcaaattttagtcggcaactgcagaatttattttaaatgcagatttccataacccaccccatagagtctgatctccaggtacctagatcttaacaaacaccccagggattcagataccaatggaagggtcaccaccacctttgagaaattttgccttagatgttagcagcgtcaagagtctttcaaagagtgtgagaaaaaaagctggctgttcatgcagttttcacactctgaaatgaaatctaccccaggcagacacaacaggttttcactagattttctaatatataagaagttagaaaatatgagaagaccaaacctgaaggcagtaacactgagtaaagcatggaaacatacattgtgtgggaacgtcatgaagtcttattacttaaataatgaggttgagaaaggataattatttttaattaaacaaagttagaaggataaggaaagaggggtatctttgagatgggtttttaaaaatgtaatagaacttagcaa

SEQ ID NO: 1882805 - DNA, 4001 bp, Homo sapiens
aaggagtggaggcaccttggacaatatgcttaactttaagcctcagtttactcaactgtaaaataggaataataaaacttttctcaaaatttatgagaattaaatgagatattattttaatgcagttagaacagtgcctgaaacataataaatgcttagcttattatatggcagttattaatcgctagcagttaaaacacaggcaaaatggagaattagaaacaaatatgggcaatataatccagaaacaattttaattgtatgactgaagaaacctaagaaactctgacccaaaaggcattgctaattccagggaagattatattgaatgctgaacattatcccaaaatgcgtttgcaaattaccctcaccagaggcaaggttcttggatgcagtgtattatcattcatttttttttccagttattactctttaaagacaggactgccaagggctactctagaaagtcactaatataataccttttattatatttcccaatttcacaccttcctcaacccaatccccaaagttgttgaaaggtgactgtaattgcatcgttagttcttagctttcctggaatcttatctaagacaactttcacatcccccaaaaccctaaaaataagcccagatttttgctttaaattgcgaagaacttgctttattttgtaggatgagcttgataacctcagcgtggatttcagcagctgccggaaacagcactctagaagttaacacaggtacgctccgtactgaggcactgttttagctaactgctccagggacagcaggctcagtcctcttaggtaagtaattttggaaggtggcactgtgttcctaataaattgaatcagatcccttaggttagtcactattcttaagaaataaagcacgaaatcaacttgaagtcatctgttgagaaggccgtggatagacctgaaaaggaacattttgaacatttaattgaacctctttgatttacagatgaaaaaactagtcatttaaaaaagtcttgcctaaggtcaaatgttttgtttcctggactggcataaagctcatctgtcacagtcgggtggatgttcctttctgttcctggcaacttgacccccccgtccccccaaccccatctctccatctgatttcataaagatccagacctgggattcagaaacggggaagctgaaggagtgtgacctaaaacaagagaaagacaagctattaaattgttattaggaattataagacgagagaggcttgcctgctagaacgtcaagaagcagtatcttttctgttttgtacaacgctgtattcccagcacctacaactgtgcctgctaagcctggtaaggcctaataattgttaaatgaaaaacaatcaatcactcaatcatagatgtgtcagattgtgagagaaaacacgtccttactgttttctctaccaccctccttccagtaatactaataaaatgtgcacatttgtattctaaagaggtgaaatcatatacacagcgctctagcacggtgcctggcccattgtaattaatacatgccagtttattttccttttcttcctccacaagtatgggctactagggaggacgaagggttggtgccgtggtgtttatgtgcctggacagaaagtgaagcgtatccaagaggctgctgagagcgggctgtcggtctttctgatccgtatagatcaattccagtgccctgaaaaacgcacagctattttacccagagaggctggtcgcttttgttgatcgattctcggctgcagtcagctctttaatacaactttttatgagcatcagccacattgcggcgggaggaggggctgtggtggaaaaagcagggaaaccgccccccactcccaaaaagtaaaggaagcccgcggggcagggactgcggtttgccggtctaacgggtcctcgagctggggcggcggtcccggccccttcggccccgcccctcgcccgcggccgcctccgaggttcaagttcggcccccggctgttaggcctcgcgctcccggatctgaagccgcccgtgcgtccctaggtcccccgctggaagacgaggcgggaatcccaggggtcatccgggcgcggggtcgctcgtccacgcactgtggtgccacgtggaggaaaagtttccaactctgccagttggtgctcccactgcgcccaggcggagcaaaggcccgcgctttggcacccgctccccgttctgtctcctccagtcgcgccccctcccagggacgccccccttgtaccccttctctgaattcccttctctcctcgcagcgcaggtagccaagggaaaacacccttgggggctggtggggcttcccgagaaggcggcctcgggccggccaggggtagaggatccagggacaagtgtcccgaggaggatgtggggggcgcgcgcgcgaagtggcctgggagcaggggcccacacgcgtccccgctgcgacaggcgggatcctccggcggcttccacgccctggcgcgccaactctgcccggccgcggccgaccccacgcgggcgccccctccacgcccccgcccccgcccccctcacagctccccaccgcccccagtgcgcaggcccggccgccccagcgcgcatgccctgggctcgcgagcgcggccagcccccagccttttgctttctacacactctacaactggggagggggcgggggaggagggagcccagccgtccacgtgatcccgccggccggggccgcgggggcgggagcgcgcgccgagagaggcgcggggagggcgggtgcgcgggagcgcgcgcactcgagcgagcgagcgaaagcacgaacgagcgagcgagcgagcgagcgagcgggcgggcgcggggttgggctgaggcgggcggcggcggcggcggcggcggtgggctggccgcggagggggaggagcgggagctgcgcgaggcaggcgggcgggcggaggatggggcagtgcccgggctcccgctgcagccgcccggggacacgccgtgcaccctccggctcggggctttctcggcggcggcggcggcagcagcagcagcgttagcggcggcggcgagagcagcgttcccggctgcgcttctccctcaggcggggcggcgagagaagcggcggcggcggcggcggcacaccggtgtctctcccgctggagatttctttctgctttcctcatcgactgactgactcaccccctcccttttttgaggaagggtgacctcttctctgggactggaaaaaatatttttgtgaggaggggggcgggtggcagcgacagggtttgcttcttctcttctttcatctccctctcctcccccctcgaagaccgaaaagcaaaccccacaactgctccagcagcatcctccttcccttcctccgcctcccttctcctccgccgctcgcagtttcgccctctcttccgctaatgattgcattattatgctcccctctctggggggtctcgcccctcttgggtcgctccggagccccggcctcccctggctgcatttcttaaaaatttgggagcctgggagtgagttttctccgaggcgtgtgtgagaggcggcgggggtgttttcctgcgcgaggggcgggtgaagttcattgcccccacttttcccgcgacctttttcggacccgattttggatcgagttgaggggggcgcgggcgttttcggggggcggggggcgcggcggagaatggccgcggggagggctccccggagcctcccagtctcttgatcaaagcattccgctattctgatttattgcttgcttggtgagttatttttttttcctctaaaggagacctgtgtgttcagccattactttgctcggcgctgctcccaggcatctccgaccctcggtgctgtggggagccccacacttgggctcctcgcctctcgccctcgctccccgtccctcctcccctctctccgccccttcccccttttctttctcctctctttcttcc

SEQ ID NO: 1882806 - DNA, 4001 bp, Homo sapiens
acattgttaaataccccagaattataattaaatcttattagccaatagaatctgagtgtgctaaaatctctattagccgggactgatgtagccacgatggccatgctcggcgcggcggctcacacccgtaatcccaaagcatttcgggaggctgaggtgggcggatcacgacgtcaggagtttgagactagcctggccaacatgatgaaaccccgtctctaccaaaaatacaaaaattagctgggtgtggtggcacgcaccagtaatccccgctatttgggaggctgaggcaggagaattgtttgaacccaggaggcggaggttgcagtgagccgagatcctgccatcgcactccagcctgggggacaaagccagactccatcttgggtgggggtggggaggaagaggagagagaccaagcagcaatatcatcgataacaaattacaatccaaattctaggcggtgttctgggactggttcacatccagcttggtctggccttgccactcccacagggcaggacacactgaggtctgcctgggggtgcctgctctggcggctgggctccccgctttctgcaggctcaggtgccccctattcctgcagcccttcctggacccagcctgtcctcatctcaaactcggggctgctggcctgagcttgatcccttcaccgtttctcactaatacgtcactctcgcctcttaaaagatgacaaagactctctcctttgaccacactcgagtcaggctcctctgagccctccctgtgaccagtccctgaccttggccggtttcggccgatttagcaagaatcctgctgagtcggtttagtgaaaatcgtctactcttggtccctgatcaaagtcctcaactcccaccctcggtctgtgaccacactgcctgccttttcagcaaaaatcctgtctatgcagctagaacccgccttgcccctgacccttcctcttagtaattttctctccactcccgaccctacgcctgggctgtcaattcccactttttctatctggagttgagccggatctgcctcccctaacccaacatctcgctttagcagcccccccaccttgaataaaagcagccttgccctctttaacaattaataagcacagactgggacaggacatccccctccatcccagcgcccatgcaccctcagccacggtcctcagacctcaagaaacccagcgggtgacaagcttgggtgtcagcggggctgggattgctgctgggggcacaggagctcgggagcactttgcaggtgagcagggcctggacaggggcttctctgcagcccacccctggggaggactccgggccctcgccctggacggcagagctcgttttgctgttgccctactgtctccgcgaccttgggggttcacttagcacccccaggccaacacctggcctctccatgcaccaacacctggcctctccttccctggcctgccgccctgcctgtgtctggactgtggttcaccgagtgtgcacgtgggcctcggaggctgccctatagagcccaaagtcccagggaggagcaaaggggaccaagtgcacactcacccagcttcctctgcccggcaacgtccctgcccccatctcccctccaccgccaccagggcctgcatccccatctgcaaaggggacagggtgcccacgccttctgaagcacgcgctctccaggccgctctccgggcgtcaccccgccctgctcccctcgcccctgcacagcccgagtccagcctggtcgctgccatcaggacgatcaggaccgaccgccaccatcagtggggaccggccagggcggttaggcccggtccggggccccaggtcccgcgtccccgccgaggccaggcagggaggcctggctgccccgggctttagaaccaaaataagccccgaaatgattggcggcgcccatgcgccaggagaaaacctaaaggacgaacgttcccgagtacatataaggacgattaatatttattgcacaacttttttttttacttccttgttaaagaggaaaaccttacgctaaaaataaaacgactaggagcccttgtgcctgcgtgggtggcgctcgcgcctttaaacctgaagccacaggggctcagccccccacccgcgcagggcggctcctgcgcatgcgtaaacagaaggggtcggggcgcggcccaagacgacgccaagggagcggacgggcggggaggaggtggcctctgcgcaggcgcagagaggagcgagcgactcctgcgcaagcgcagagtgaagggccgggaacagtggagggtgcgaggaagacaatgggggaggaccctgaggcggcctctgtgagccgacaggaacacgtggtcgatcagagagagactcgtaagtgcacggagctgatgaggtgactatggcgttgcgcaggcgtcctgtagaggcgggttgtcatcggcgcaggcgcggtgtggaggaagccccggcgccggcgcaatgaggaggcggccggactcggcgctggcgcagtgtggaggaggctccggcgcaggcgcagacgcagggcgggcaatggccgcctgggtctctcgggcagccctgcccacctctctcgcgtctcctggtcttggcctgcggctctctttctggcaggtgccgcggcgtctcctgcgggcctgaccgtgttctcccgcctagccaggctcttctgcgctccttttttgttgagatttttccatcccctgcacaggaagtgtcctttaattactccagtgtttttttagttactttttaagaaacattttggacttttcgatacagaatagtgtcaaaaaaaaaatttaaccttcttcaggttatattttagtgaatgatattaatatatgttccaaagttgtatgggatttctaaaattctaatttttctgagtatatgctaccgatcataattatggttatgttgttgttataaccaaatttctttgtcaattgtgtctttttgagtatttaaagtcatttccgcagttaattgcttcatgctgatgtagtttctgaaaacttcacaagcacacaaaaatcctagaacatggtgtcttttaggaggttcgtgaacggatggggaggaccctgaaaagcactgtggaatacaggtttctagtaacttcaaaatcacatcatttggactgggtaagaattgctgaaactttaatgaaaagactgactggcttataaaactgctaacccaaatagaataaaaattaattgaataccgaggaaatgcttcaccaggtttgcatacttaatcagcctatactgaaattgtttagatatacaatttgaatgaactccatggtctaagtcaaattacctgtgataacccatcagttatccatgctatgtgcccaatttggagaaacaactggcacccaagaggacataagtccgatgttaagcatggactcatggagaaccaagatggctgccttgtccttcgtgagtccttaaagcttttgttattaaaagttatgcattccatgactcatcctggaaaagataaaatgatccaaattaaatatgttggtgtggtgacttacagattgttaaaatagtttataaacaatgtttagtttgtcaaacccatactcctgggaagtcaatcaaagcttcatgtacatttggctacctgatgaggcatttaaacatttataaaggggtttcattcagttgtcattttcaatgtatgtgttctggttgtactaaagctttcccatgcaggagggctaatgttataacagtagattactatgtatcagtgtattttcaccaggtaaagagctttttatggttcactgaggacaatcaaccccttcacaatctagaacccaaagatgggatcttctgagaacatcagagaaacgctgcccttggcatcatcactgcaacaaaacatcaggatcttgaaccttggggtcataatctcacaactgagcagggtcactct

SEQ ID NO: 1882807 - DNA, 4001 bp, Homo sapiens; identical to SEQ ID NO: 586646

SEQ ID NO: 1882808 - DNA, 4001 bp, Homo sapiens
tgtagagtgactggtgtagtgagggtggaatccccaaagaccctctgaaatgcagttacacaacaggctcccaggaaacactggaccaaaccaggcagctgagcagatactaccaggaatggggtgagcagaggagggtcagagccacaaatctcagcagaatacaccaaactgcaaggagctcctggctctgtgaacagcagctgtggctgcatcaggaccaatcttgtgaggcagctgctggggacagctgagatcacgtgtttttgcagccacccacccaacagcagtgcctcttgaacacagatcacaaaatcctctccattcatctttaaggtgacggatgatggatgaactcacattacaacatccccaccaacacttgcggacgagtgtatttagaaactcccacctaaagagggaacagtcaagagtagaatgagaatattgagggatgggggaagaatgcaggtacttgaccccacaaactctactgaaaacaagggaagagctgttatgctgtggtctccctatacttcacctcaccacatccatagatgccacatggttcttgttcctttattgacaaaggtgctgatgagcccgtgtgtaattgatcctgaaggagtaaattcttcacaaagtacaataacagtgtctaatatccatgaccagagtttttaggcttttttaaaatagtaatccgcattcaggaatcagaaatgaagcctgttggaatgtgtgatatgaacaaggtcttatttttatgtagattaacaccttggtttttacggattaaacacaaaagcataaaagctggagccattccagaatcaaaggaactttccctgaggacacctggaattaagggacatcaattattaggaagctacacgaaaccagaagtgctcccagaagtttccattgtctggacagaaaaattaaacagatcagcccgagagagtaaaggtacctccgtgagtgccgggggtgatgaacattccattcaaagcaaagttgtgaagcctgaggagtttcaaagactccccaagtgctctataccttgaaagtcgctcacacaaagctggagcaccacctgttcctgagaatcaggttgccattgtgtctttgagacactgcccagtcaggcctcggttgagatgaggccaatgatgtcacgtgtaaaatgcctaaactatcttcatctttaggtagctatttggggaactttccaccaaatgggttgggggaaaatggcgcaccagagacacacgcctgggatgtgagattttctcttctgctgttagcatctcctgggtaaaccaataatgaccctctctgccacctcaacatccacatccgcgaaaaaggcgctggtgagggtgacattttcatgaagccacagagcatgttgccccacgcaaagctctgaacttgtgcactggcgggccgggcggcggatttctccccatagcggctgcactgcgctctggctggagagaaaagagggcagcggcacagtggacagtgcctggaccgcaggccagttcccacagcagcttaggaaagcaggtggctccctgggctggaggaggcgtgatgtccaggaaagaccccgggtgcaggtgggagagggaacccagcctagcagcgggaagtgaggtgaggaccacacccgtccgagttggacaagggcgaggtgcacttcgcggcgtcacaccctcctcactgcccaacccggacctgcccctcctgtccctctccggactcacatcccatggcaaggaggtgtccgaaatcagtagccagcatcgctgtggaagcggcgagatccacactgccctgcccaaccctcttgggctgcccgccttctcgcatatcgcctgctaggattctagtccagccgccttgccaccaacgggcggggaaccgttaagagctacagtttccagcctgcgtggccaggagcgcaccgccccgctcctcccgcaagaactgcgccccgcccctgagaccggggcatgctgggattgcagtcccgaagcgcttgaaacaacgggcgggagcggtgaagagactacagctcccagcatgcagagccaggccggcagagccaggccggcacagcccggcttcccccttcaggactgcgcgccgccccatgttcatgctggctgggattgtaatccggtcgccctgcaattaaaaaactggaagctaatcaaagatgacaagtcccagtatgccaggcgtagctcccgccctccaatccacaccttcccgagtccagagcagttctgccatgccaaaggggagcctggttgttcccgaacctctcttgcctgccaagtgacagcgagaccaggcggcttgtcttatcgtgtaattatgtcactacctctccctgagatgctggcttcatgcttcgtcattgccagaagtttgatttctcacggagcagcaggggacctggagctactcgcaaagctgtcacggttgccatatcttggagcagtactcgccccgccccttctcctcgccccgctccttccctctgcgctgcctctcccctcggcaccgcccctccgtctcgccccacccctgacacgccccctttgaacatgcgcagtgtagtccctgcgtaggacgggctaatcgccaggtgtctgactgttctccgacttcttggcatcctacgcgggaagctccctcgtgagtgtctgaaaccgtccgttcgctgccagaaatggatatatgcgttccctgataacctagcacttgccttttcaaagccaccatttcctctatcctctaggctgtcgcaaatcctcctgttcatcccaggagtgccccttggaccccgggctggctgcatgacccacacctgggtcaggcctctcacagggacgctcctgccactctgacaaagagttgaaaacgtcacagcgaaaggcctgaccctgctgcatccagtcaggaaacagccacagggaagggagcccctaagacactttgggagccacatccaccgcttctctgcccccgatccaggctggttcccagaccttggggtcctagtgtggacctcccggccgtaattaacgcaggtgcagggccagagagccccttggtccctcccaacacataagggaagtttgtgtggtgaggtcatgaacagtgtctgcgtttctgctgtgaataggaccttcatggaaacacttaatttccctttttaaatatccctttggaaccacgtttaataatttgctggtggaacttaacagtgataattctttgaatccatttttcttttttctttttttgacacggagtctcactctgtagcccaggctggagtgcagtgactgactcgatctgggctcactgaaacctccgcctcctgggttcaagcaattgttctgccccagcctccccagtagttgaaattacagacacccgccaccttgccgggctaatttttgtatttttagtacagatggggtttcgccatgttggccagtctggtctcgaactcctgatctcaagtgatccgcccgtctcagcctctcaaagtgctgggattgcaggcgtgagccactgtgcccggcctgaatccattttaacatttagttttccagattaactcgaagtaccccacgactacacgctaatgaaactagaggaggcacagcctcagctccgtgcaggagggacgcacaagagcagaatctccgtgggacatctttctggagcatcagtattactgcaggatttggaagaaacgaatttaaataatttccaacgtaagacactggaaatttaagagaaggctggaaagtcattggcctttaataactgtcagtcatctgtgcctaagtcagactttctccaagaaaaaaaaaaaaaaaactctaaggagaacctatttttcattcttctaagtagttaaaattagaaatcacagcaagtcaatagaaagctctgccctgctagtcttctaa

SEQ ID NO: 1882809 - DNA, 4001 bp, Homo sapiens
cttaggcacagtttctcaggaggcaatatataccactccattcctatctgaaatccacgtcaaggacttctactaccctccactttcagttacctcacccagggccattttagaaaacaacatcatcactcttgcaaattacttttttctaagctgattttcctctgcctgaatcttcttactaattatttcgcttttaaaaaacccatgcattgtatgtaatttgtaagcttccttatatgttcaggaacaagaaaaaaccaaaaggtagaggggagaagagtaaggaaggtgagaagagagaggagaaaaaaggaagaaaagagagtggatgttttctgtgttgcccttgtcctccactaatacagacacttattaccaagatgtccagaacaggcccaagagaaagagaaaggagacagggagaattgcccttgaggtagtaaattattcacataacttcagggctgtcctttttttggaaggatcccacaatgtttatcatcagccacaagcttcttcctagtctcatatctctactgcattatctccagttagaagtcttgctgtcacttcaaggtaacaatttctaaaatcattttcactggcttcatctcaatcagctcctcttccctgcattcacatttctattaacagcaccaccactttctaaatccctcacaaactccttctgtgccatcattccatcactggctcctcctctgtcttctctcctttataccatcagtgtttttcatcttccttacattatctctttccaccattcctttcttttttttttttttttttttttgagacgaagtcttgctctgtcgcccaggctagagtgcagtggcacaatctcaggtcactgcaacctctgcctcccaagttcaagtgattctcctgcctcagcctcctgagtagtggaattacaggcatgcaccaccacgactgaggctagtttttgtattttcagtagtgacggggtttcaccgtgttggtcaggctggtcttgaactcctgaccttgtgatctgcccaccttggcctcccaaattgttgggattacaggtgtgagccaccgtgcctggcccaccattcctttcttttgattcttaaccctatcaggcccttatcattttatggttttaaaggtaaactccaataatttcacagtttttctccaggctcatcctgcttgaggatattctgaactgaaagaagaacttgctgaagaagataaactaaaaaaaaaaaaagtgaaatagtaatattgataatattcgttaacatttcttaagcactttctatttgctaagcacttcctaaaatcccttgacatgaattagcacatttaaggctcacaacaaactcactatctgcaccttactttgattaggcagagaaagatgagagtaaatattccattttcgtggtatactgggagttagaggacctgtactcaagctctcaaaatcattatttataaaattagcggacagaggcgatgatctctaaattccctttcttggaaataacctaagtctatcccagcgttgagatgagaaatttggcatgaaatagaaagggaatcatggaattcttcaaattcgattatattttttagactagaaggagaaactaattcatccattaaaaaaattgatccaacaaatgttcattgagcagctactaattaacactggcaatagatggttgtttatgccatttcatgctggcttctcattcactcaaatgcttcccttactattactaaagccttacctgaggtagacagctggccaaggaagaaaagagcaaagaaaaggtaatgaatcttcatggcaaggtagctctgaaacaacaaagtgtcttaaaaagataaaccaatataaatggagatgattttagaatcagagctcctgtatttagaaactttcatgggtgagcaggactttacatgtcttattttctctcagatttctgggcagccaactccccacaagccctgtacacctcctatttgtttagatcccattatgacatgtgcagcccttattacatcttcacaacactcctggcttatccatttccctccacagtgtctcagtgacccaccatcagggcttaacctctggacctcttatcccttaaaagatgtctaacttgatggtcctgttggaggtgatacctcttcacctgacaccattttcacaccctccacataggaccagtgcttgccgttattctttgtactcctttcctggactgctcgtcgtgttcaccaagatcaatgctgcccttcttaatactgacataaggtcaggagctgacttgaatcttcacagccctcaactcaacatcctctcctcctgttctaagtctggcaaacattgttgaaaatcatcctgtgactatgttaatatttcacttttatctactgtcaactggtcctgtcccatgtagctgctctcctactaagtgtgatttccatgacgaaagggactgtatcttctctgctcctgtgtctagcacaatgtcttaacatggtacattttcatcagactttctggaactgttgaactgcctttctccacacttttggagggttttgttatcactctttttgattcctctcaccctacggtggctgtttatatcaagactaacccgcctctctccgttattcgcacgattacttaaaaccttctccttcttactttcctgaaactattgagccatcacttttatattccttcatctcaccttatatttacattaaaatatctctctttaccttcattcattcctatcttttctttcagaagagatgccacttctgccttcaaaaaaactgtcatcttcccaggctctctctctgatccttttctaccattttcctccatcccaaacttcagaatctcatttttctctccaagttcataatttaatcattaattctcactgtggttggagaaaaagaaaaacaaaagccaataaacaaaatggaaaataacccttgaccctgcttcccctctgggttcagtccaatttcatgcccatcttacactgaaaagcaatcagagggaatggtttctgttgcatttcattgaccactacctattctctccaaaacttctgccatctagattctgttccctctttctatcaaacttacccccaggattcaccagtgaataaacaaaccaaggagttcatagtttttatgcccattgctcaagatgtcatcattacttttgatactagtaagcctgcacctttagaactccagcttctaccctgattttctcctaccctttgtttcagtttccttttcaaactcctcctcttcctggagaggttcccccagacttctttagagctgtgctcttctgtttttacctctccctagacatctcccatgactgctaacgctatcacctttggtgtaaactccaaaatcttgcttgtgcatctccaggcctgatcacttttcccaggcttctgtcccttggttccatctgtttatatcccataatcttttccagatccacaggattgaatttacactcaatggaacctcaacaggcagactccaatacttgtagattcatatctataactgatatctcttagatcacaattgcttgtgaacaggaatgtaaacattcctgcagacgatggagaagttaggtttaatgttggacatagatggcaaaggcaacacttaatacaacattagagtctcttacacaggaaattaataatgcagcctttaaattatgattatgttttatcatagattctcctaaaaagaatttaagacagcttatttaatagacacacacgaggttaaaatgatattataaaattggggtggaaaaaataagataaaatcacaggtaagctataaatgaaccacaaattttggttgcatttgttgcagtaaaaacaggaatggacacttaatagttacagaagtcacaaagacatagcata

SEQ ID NO: 1882810 - DNA, 4001 bp, Homo sapiens
cacagggacccagctaaaaacccttccctggttctgtcaccatcagattaaagcctaagcttctagatctctgtcctgcactttttcactttaataacgaccctccaggctcagtagctgatgcctgtaatttcagcacattgggagacttgaggcgggaggattgcttgagtccaggagtttgagaccagcctgggcaacacaccaagactccatctttacaaaatatttaaaaatcagctgggtgtggtggcacgcatctgcagtctcagcaacttgggaggctgaggtgggaggatcccttgagcacaggcagttgagacttcagtgactcgtgatcgtgtcactgtactccagcctgggtgacaaagtgagaccctctctctcaataaataaataaataagcacctccttgtagttactggcctcctctcctttgattcccctcattccaccctgttagtctgaatgttactcattcttcaagacacatgcagaaagtattccccgatcccttccaggctccacgcccgacagcacggcctaaatgcccgactccctcctcggtgctccatcttagctcacactccttaccacactgttttgaaagtatcttgactgtcccttctcctcaactggctaacttctagagagtagaaacatgactgcttggaaggtcattaaaaattcaaatcctgaacatttcttaatcctgcagatatgaatcagtaactcttaaaagcaaaatgttatttatcattaaatattaacaatataatcacattttcttgcatctctggcaagtttcttggtacaacaattttaaggaacggactctttaacagcagttaaagctgcgcgatagctgacgcctataatcccagcactctgggaggccgaggcgggaggatcgcttaaggccaggagtttgacacctgcatgggtaacattgtgagatcccatctcaaaaaatataataaagaaaaacaaagcagttctaggtttagggggggaaagtagctctccaagccaaaaaccaactcccaaggtgctccggtaaactcgtcctgggaaaatttcctatttaatctcaaaggcaaaacgagtccacgggcgcccacgacacatttcccaaccgcaaggactggtcacccgcgctgagacaccgccagctgcctatgacctagcctccaaagcggcagagtccctccctctctctccctaaactgccgtgatggacatctctcggctctcctcccagacggttcggaagtagggacttctgctcctaaccccagccctgcagcctcgccctcagccacggggtggaagtcaggaccacaggcttcaaatcccctcccaactccgggacgcttctgtccccccagggcgacgggggatcaagtcccggcgcccctgtcgcggccaagagctgtggtctgggtccgagcgtcccagctaggcgcgttccagagaggtcatgggaggggccccgcgcgaccacaaatgttgcttcggagccagcgtcctggacggggaagtgagagccgggacgaggggagccgccgaagagggaggcggccgggaaatgctccgcgtcaggccttcaagggcttgtccgggcgctggagatgccggcaacgagcacgttagacggagaagccgcgcactgtgaggattaagggagccgagggcggcctggaactgggaaggcggagctgacggggctggaatgtgggacgaaggacagcgggaggcaccgacgcgcaactgccccagccgcgcggagggcacggaccgaccgccccgccgcccacggcccgagacgcccggccgccccgctcccgtagctgagagccgcgacgctcttacaccagtccgtccgttccgtacctcgcccgcggcttcgccgacatccacacagccgctcgcccgcgtggctgcagtaggtctggtctccgttgtccgctcccgccccacacacaccctcctgctagccccgcccccggcgcggcctgcgcacgcacgatacgcaagccgtgcaaacgtcacttccggggcctttggctcttcaccggaggaaatgtgagccggatccaaagggtcgaggggactggggtgcccccgtgacgtctaagagcaaatagaagagggcggcctccaggctaaagctagggcactggggagccccggagaagcctgcctttcctagtctgtggctcagtccctgcttccggcttccggcgcgcagcagcgggagagcgacgctggccccctggcgatcctggcgctgcgaccgcggtggtagcgcgaatgggaggtggagcggagccactgcgccgagggacgcttcaaaaactctttgagtttcagcccttcgcggatccgaggatgtgacagttgttcgagttaaagggtcttaaggcgatcggttgatccaaaagcagctgaatctttagaagacccacgcaggaggattccttgaggccaggagttcgagaccagcctgggccacaaagcaagatcactgtctctacaaaagaaattttacttgctgggcgcggtggctcacgcctgtaatctcagcactctggaaggccgaggcgggcggatcacgaggtcaggaaatcgagaccatcctggctaacacagggaccccgtcttttctaaaaaatacaaaaaattagctgggcgtggtggcgggcgccggtagtcccagctactcgggaggctgaagcaggagaatggcgtgaacctgggacgcggagcttgcagtgagcccagatcgcaccactgcactccagcctgggcgacagagcgagactctgtttaaaataaacaaacaaattttacaaatcacccaggcatgatggcgcgcacctgtggtcccagctactggggaggctgcggtggaaggatcgcttgatagcccaggaagttgaggctgcagagatccctccactaaactccagctccggtgacagagcagagcgagaccctgccctcccctccccccacaaaaagcataaccgagacccagaagtgcaataaattagccagtgtcacaaagtattaatggttgagtcacaaattgaatcctgttgacgtgattcccatgtaaggaatgtgaaaaacagtacctaaatactgactgctctgcgtcctggatgccatctatggcgtaaggtgcagtcacagcaagaaaaaaaagaaaatactatgctgtggctgtgagataggcctgggttggaatcccagctttgctaattatcgctgctgtgtttttggacaggttgcctaatttttgtctttttttggtgggggagtctcgctttgtggcccatactagagtgcagtggtgcgatctcggatcattgcctcctaggttgaagggattctcccacctcagcctcccaagtagctggaattgcaggcgcccaccaccacgcccagctaattttcttgtatttttaatcgagacagggtttcaccgtgatggccaggctggtttcgaattctgacctcaactgatccgccccccttggcgtcccaaagtgttaggattacaggtgcccgccaccacgcctggctaatttttgtatttttagtagagacggggtttcaccgtgttagccaggatggtctcgatctcctgaccttgtgatccgcccgcctcggcctcccaaagtggtgggattacaggcgtgagccactgcgccccgccaattttgtatttttagtacagacggggttcctccatgttgtcaggctggtctcaaactcctgacctcaggtgatccacctgtctcagcatcccaggcatgagccaccaagcccagcctcatttggttactttttgcatggaatttattttttcattcttttgttttcaatctctttgtttctttgtatctaaagtgagtctcttatagacagtatatggatggatcatgttgtattttattttacttattttttttacatttcccaaggctctgtca

SEQ ID NO: 1882811 - DNA, 4001 bp, Homo sapiens
atgtttattcattctattgatggtaccctgttgcttttagttctgttatcaataaagttactacgaacattcctgtacaagtctttctgtgaatttagtttcatatatcttcaataagtacctggaattggaattgtggagccataggtggtgtatatatgcttcatattatgataaactactaaacttttcccaaaagggttatgccattttacactcctagtaaccaggaattagagttctagagttctgattgttacgtatttttgcacagatttgctgttatcagcctgtttttttttttttttttttttacagacggagtcttgctctgttgcccaggctggagtgcagtcgtgtgacctcagctcactgcaacctccacctcccgggttcaagggattctcttgcctcagcctcctgagtagctagggttacaggcatgcgacaccattccagactaatttttgtatttttagtggagacggggtttctccacgttggtctggctggtctcaaactcccgaaatcaggtgagtagacaattataacaatacactgtaatgaaagttatttgaatgtggcctctcccagattaccttctggtacacatctctttttgaaccagattttcttggataaggggaaccactgtatgtgttacttgattttctgtgttttgctgaaaatactgtcaactcagacatttggtggttggggtgaacttgccaacatgtgattttatgtttttttggaatgaattatttttttgaaaattatttattgagcatttactgtgtttagcactttactagatgctatattatacccacttggagcttatggtctagtaaggggatttacagtgtagggagacagaccgaggaataaataaataaatgttaatacaaatgctatgcagcaaatgaagaaggtattgtgaaaaaggaaaaaagagcatgagatagacaggattgccttagatggtcactataggcctctaaggagatgacacatgggctgaagtcccagggatgaagaactagtcaaacgcatctcagtctgttcagaatttaaaagtgactcttaaagctaaggcaaggtatgtgtagtgtgtatggaccacctacagtcagatatacggaggtgtgtgacctctaaccctgacccactgaatcaatatctggaggttctggggttacaaatttcatttactaaaaaacttaacaggagatttcagttactgaagaagtttaagaagcactgagagttgtaacacgtcttaatgttccatcagctcttcctgagttatattgttcctcagatcccgttatgctccattgctaaaaggaaacatggccgggcgcggtggctcacgtctgtaatcccagcactttgggaggccgaggcgggtggatcgcgaggtcaggagttcaagaccagcctggccaatatggtgaaaccccgtctctactgacggtttcagccatccggcggggggttcctggaatgcatccttgtgggtaagtggggagctgtgtgtacattatgaccactcccgtaaccaaacctagcgtttgacaaaggcctcaattacagcggcattcattaccgtgaatgacagccaaagtcaaagtttggggtggggatactattttgaattaggccataacattatattgctcataagcttcatttcgaccaacattatatacatacaaaaagtatgtaccgtaaggacacacatcaagctggaccgcaggaaaaaaaaccacaacttaggatttacctagtcagccgctactagagagcaagcaccgcgcaaggccgctggggctcgtgctgtggacgtgagtgggttgaggtcgggctggtggggtaacccgggatccagccggaaaaaagggataacgctagactcacactcctaaggaaggccaacgccccaactagcgagctccgcaatgcatctcttccaggaagcgtggccgggcgcacgtcgcgctgcgcttgcgcactgaggtttcgcgtaaggaaccaataggacggaggagtgggcgggctgttggcagaaacccggattccggttccggtgggcctccatcagcaagctccagtgctacgtgtccctggcattttaggtgtcggttgggtaggtgagtttcttcccaccggtcggtacgggcgaacggggcggccacacctttgcgactcttgggggcagcgggcgtgggcgagccggcgtgtctccccgggcggccgtcgcggggcgggcggtaagtggtcccctggctcagggccggggtctggccgccgacatcccaccaactcggcctctggcggaaggcagacccagggccgcggactcccggcgagctgggtggccggcccgcggggctccagggcttagcgtcctgccccggcgtcttctgtgctgcagccaaagatgatgtcctgctgcccgatcccttcggggttggctctgtgtgctgttgtggagtcctgtctgggaagagctgtactcagctctggtcctgccgccgcttccgtggtttaaagtgagagcattggtctagagtctagttcgagagatcatagttggtttttggatctctacccctgacattgagtgcggtattgtgtgtagcgtgcgtttttctggataaagaattcttagcttccttcgtgacaactatgattacaaaaagtttaagccctttggatttcaagagcaaagttgagtgaaatactgagaaaacagacattactgtgtttttgcccccagaacgttgcagaattcctggtgtttcattgacattatttcatttcgttgtccacaccctacactaaggaaggcaactggggcttacagaggtttacattccatagccagtgatttgaactaccacctggccactgttctgagtactggaaatggaggaaaatacaaataacaccctggctgctttacttactatagcagtggctctcaaagctaagatcggataacatttctattgggtaatagattcctcaaaagaacctgtatggtaaaatatatagccctgtttccttaaaagatgtgttcaaatcgaaaagtttgaaatttagctagtagcttctcagaatttgcgtcttcctttagccattctttatactttagaaaagtatgttgtattggcacgttttagaaaaatcaaggttgaaattcacgtttgcctctattctaggctcttgcagcaccgtagttggcattcactgtacaagacactggcttctgcgtagtttaaaataaaatatggaaagtaattgttggatctcaacactgatggttccttaggagcggtgaggggactgtagaatgagaaatggatgggactgcagagtgagaaaaggaatggatgtgttaccaattgcgtaaccttttttaaccttttaatagagataggctttttatattgcgtgtgctgttctttgtcagtgaagatatcatgagtaagatctgtgcttttcttattgcctttgataattaactgaaatttccaaaaataatatcaatttaggctttggagtttgttttttgttttattttaggaggtggaattgacccatgttagacgtgaattcagtggctggtctcatttacatctttatataaatgagcaagtgcttattgtatgagaaccaataccagtgagtatcttttttgttttaaacaggcagtcatggatcaggtaatgcagtttgttgagccaagtcggcagtttgtaaaggactccattcggctggttaaaagatgcactaaacctgatagaaaaggtaattgcttgactatgagagaaaaaattaaatctttgcattttctaagccttttgtttgattaacatcttgattaatagcccttgcattactttgatcaacatttttattgattgatcctgcgcgacagctttttaacgttgtcacttcttcctaaattttttactcgtctaaatttttat

SEQ ID NO: 1882812 - DNA, 4001 bp, Homo sapiens
catggttcagtcgtgtgtgtgtgtgtgtgtgtgtgtgtgtgtgtgtgtgtgtgtgtagggcttttttaatgtaatacatctgaaaagaatgcatatatagagttgagacatgagaaagcattggttcaacactagtgaatctataagaattaggattggggaaaggaaaagattacctaaacatttttagaaattgggaactgcaacaaaaataagctgataaatccctgttaacacttatgaagagccttcataagactctttccatgattttattaaactagagagcctcatctagctgctctagggttcctcatatgtgaaacagaaataaggggattccctgactggtcccaatgttgttaagtgttctcctcaccctcacttcacccccagcttcttaatgaagtaggtcttcattcccataacttgaaaggatatggatcattccatagatgtctgtcttctagcaccacctctcatatttcctgtacataccaggtctccagcttcattctagggataaaatatactactgagttgcaaatctatgctaaggatataagacaatgactgacagggaaaaatttattttaaaatacatattctgggaggccgaggcaggcggatcatgaggtcaagagatcgagaccatcctggccaacatggtgaaaccccatctctactaaaaatacaaaaattagccgggcatggtggcatgcacctgtagtctcagctactggggaggctgaggcaggaaaattgcttgaacccgggaggtggaggttgcagtgagccaagattgtgccactgcactccagcctggcaacagagcgagactccatatcaaaaaaaaaaaaattacatattcaatccagttagtgtatttccaatgtgcaatacttttcttcattagtgaaagaagttaggaattaattttcccccaaatcaggaaatggcaaataaatgtctttgaaagtcacagtcacatatatagtgcatactagaaaagaggagggacaagacaggttccacgcactttcatgagtatcatcagatactggatctattcaagggtaaagagaaaaggcaactttcaaaaagtagcacattattaaatgaagcatttactatacttcttcctaagagcaccagattgagaacatgttttctaaatgagatctaaaaagtggaatgtggaatcaatctgtcctcctccccttaagggctgtccattggttaattaaaataaacaagactaaaaatcaaaccccacccatactccccctcccaaaaaagagggggaaaaactcactaaaatgtcccagattactctccagaatagaaccagggagcagttttaacaattcaaattagtctgttacagagtcaacacagcatgccttgcttttaaacaaaaaattaaattaaaaaataaaattttttttggaacaacaaaacaaaaactaatactgatcacttttctgacaatacacaattactcaaaattaactagtactgggagagggaaggtggggatacttatgggccttgtctcacacgagtgcatgtgtgtaagtccagggcatttgtcattatcgcaaaaatgaattttgatttttaatctctagtttgataaacactgcttttggtatgatgccaataccagctgtgcaggaaaggctctggaaagatgttcatagcagcacacacttgcagctctttttcagttctggaggctccagggcagccaatatggcttcatcagatacatttttcggcctaatttgcagtttcactccagtgttgcttcgatgattttctgtctggatgatctgttcattactgagagtggggagttacagtcccctactattattgtattgttgtccatttctccctttagatctattaatgtttgctttatatatttgggacctccggtgttgggtgcagatatttgtaatgttatatcctcttgctgaattgatctctttatcattatatagtgaccttctttgtctcttttcagtcttttatttgtagtcaattttatctgatttaagaatagctactcctgttcttttttggtttccagctacatggaatatctttttccaccccatcactttcaccatgtgtatcctcataggtgaagtggcagcatatactttgtttcatatccattcagcccctctatgccttttcattggaaaattgaatctatttacattcagagttattatttgataagtactgccatttttttttgcttgttttctggttgttttgtaagtcctctctttctttcttcctgtcttcctttatggttaaatgattttctctcattgtatgttttaattagttgtttttcatttttaataaatctatcatagattgttgtgtgagattaccatgaggcttacaaaaaatgttattttaaggagatgacaacttagattgcaaaaaaagtgaaaaaaaacttgtacactttaactccatgtcccacatattttgacttttagttatctcaatttacctatttttatattacctacctcttaacaggttgctgtagctattattgtttttgatagagttgacttttgcgctttatactagagttataaataaattgcacaccataattacaatactagcatattctggatttatctgtgtacttaattttaccagcggattttatatcttcaaatgtgttggattttttttctgcatggttagtgttttttgcagaacttccttcagcatttctttttttttttttttttttttttgagacggagtctcactctgtagcccagactggagtgcagtggcacgatcttggctcactgcaagctccgcctcccgggttcacgccattctcctacctcagcctcccgagtagctgggactacaggtgcccgccaccatgcccggctaattttttgtatttttagtagagacggggtttcaccatgttagccaggatggtctcgatctcctgacctcgtgatccaccggcctcggcctcccaaagtgctgggattacaggcgtgagccaccgcgcccggcagcatttcttgtaagatggatttggtggtagtgtgggaagggacatatatctccttcatatttgaaggattacttctggttccagtatacttggatggcaggctttttttctttcagcactttgaaaatgtcattgcactccctcctggcctatatggtttgttgagaagtctgttgccagatgaactggaactcctttatgttatttgcttgttttattttgctgcttttaggattctctttgtccttgaccttggagagtttgattattaatgccttgtggtaatctttgtattgaatctgtttggtgttccctaaccttccggtacctgggtatttatctctttctctagttttgttattatttctttgaataagttttctatccctgctcttgctcaactcactcttgaacaccaataattcttagatttggtctttggaggtaattttctatatcttctaggtgattttttcccctcatattttactcccaaaaggtgatcttcatggcttttcactgttttcttttttctcctctgtgtattttcaaatagccagagttcactgattcttctgcttgatccactctgctgaatttttcagtttagccaatgtatttctcagttccaagatttgtttaacatttaaatctttgttacatttgataagtttctgaattgtttttctgtgttatctcggagatccctgagtttcttcaaaactactacttttaattcttggttagagagctcacgtatctccaactcattagggtcagttactgaggaaacattcttttgattcttcctttgaaatacccacttgccctttattcactacaaataattatcgtaattttattcaaggcctcacctccttagatcaagataggtgcaaaaatttccataagtaatggtgaa

SEQ ID NO: 1882813 - DNA, 4001 bp, Homo sapiens
gatagatagatagatagatagatagaaagaatgagaccctgccgatagatagatagttttctatcaaattttttcctagatttgaacatgtttttctaaagtagcattcaacacatcagcattttatagcgtcattagttgttactatgattatgtttttctgaaatagtatcctttacaaaagcacttctgtctttctaagcacatacataggtcctaaaatgaatttgtctgatgttggtgacctcggaaccattttctccagttgattagcacggccagccagtcaataatttcaggtcactgttggccttagaggaagagcccaaaggcagcaagcaagggtgctggtgtccagtcgccttctagaagcattttcaccttcccttaagatttcccttgattaacacagaagtgtctatagaagtgacccagtgctgccccgggcaacatcgtatattaggccaaatttgcatttcttacctttatgagaagcaccctcgtagtctagtggagttacacacacacagtctgatctcagctgtgctctccagagatacaacatagtccaatcaaataacatcctctgagcctgtttctttagctgtaaaataagaataacaattatacccatctaaaaagatagtgtcttgtacttgagtgatcttttttctatgatactgtctttaacacaataattattttcttcaccataccacatttgtttttaaataagaatttcttaaaatgatgttttcagtattttatagatgatgtttgagcagcaatattaatagcatgttacctgacactttgagggactagaagatgacagtggcagctgatatgacccagatgtctctaatcctaacatgaggtgtactgaagggtcacagcagagtgagttcctggtgtatccacaaggaaatgagcacggaactctcacaacagcgtgtgtgctgtgcgctgtgcttgaatagctgactgctcctttatacacagcctctgtgctgactgaatcaacagtatctgtttcatcataatgcagccctatttctttaagcccatacattttgcacttgttaaaagtatttgaacaggccaggcgcggtggctcacacctgtaatcccagcactctgggtggccgaggtgggtggatcacttgaggccaggagtttgagaccagcctggccaacatggcgaaaccccatctctatcaaaaaaatacaaaaattagccgggcgcggtggcgggtgcctgtaatcccagctacttcggaggctgaggcatgagaatcgcttgagcccaggaggtggaggttgcagtgagccaagattgcatcactgaactccagcctgggcaacagaacaattctctgtctcaaaaacaaaaacaaaaacaaaaacaaaaaaaaactatttacccaatttcccttgcttatgcatgcttaaattttgtataagcttaaatatcttttccatctaagctgtactctatccccttttataactttaggtggctgtctttattaaaagttttttcttgaaagtcttaaaacaatatagttcttggcaatttgaaagttatttgagaaggggaaatttataatgacaattcaaatgaagcaaactaaaaaataatgaagaaagacagaggaaaaagcagtattcacttgaacacatcccaaacaaagaaaatttcaaatgtaacaaggaaaaagcctgctaaagctcacaatacagaaataactattgatactcaaaatagctttaaagccctgctcaccttttgaatgttgggaattgaccaggaggtgactgtaactgtaagatggttcttccagtaatgaccattttctttttcaagatgatgattattctccaccgtctaagagaccaaaggccaatgagctaccgcagccaccagtcccggaacccgccaatgctgggaagcggaaagtgagggagttcaacttcggtaagttctcagcgaacgacgtgaccttttccttcatcttctggattctcagtgtgactgataaatgttgcaacatgctctgcagggggaaaatgctttagcgtctattactgcatcataatctcatctttggaaagccaggagcattttgaaaattacattacagacattgtttaaacatagtttggatttaccaaagcataggacattgtcttgtctgatgttaattagtcagctcaagattagtgctaaagacttagtaatttagttatttctcttagctttaaaatctttatttcagaactatttcacctcttggttttctttttttttttttttgctctgtgttactgcagctgctaatctgtgagctctcaatggatgatgtatcctagcaagggactgaatgagatattagcggcaaattatgttgatgattcatattttgaataaatggaatattaagcttgtatacatcttgaaaatagtactttaatattctactgtgtcgtagtcacaatgattggatatgaattgaatttttgtactttttaaatatgtttttgttctttatttttaatttttattattatttttttgagacagagtcttgctctgtcacccaggttggagtgcagaggcacgatctcagctcacagcaacctccgcctcccgggttcaagtgattcttctgcctcagcctcctgagtagctgggattacaggcgcccaccaccatgcccagctaattgttgtatttttagtagagatgggatttcaccatgttggccaggctggaatcgaactcctgacctcaggtgatccgcatgcctcagcctcccaaagtgctgggattacaggcatgagccactgcacttggcctgttctttagcattttaagttgcaactatatatccgtaaagtcttatttccacacaactgagacatgttttaggaagtttgctaaaagacccctggagacctttatcgtggtctcccttttgtcgtgtttcatttgcttgatcttttctgccctcctgcttttcagaaattaaaaggctaaaaagaggtgctaaatgttaaaacttctcgtgtagtctcccatgagactattaaaagtaatggcaaaagccacagttacttttgcaccaacctactaattctaagaaccaccaaaaaggggaaagttcttggaaagcagtaaaatgatatggacagttgggatgtaaaaatgtagaaaatatgtcattgtatgttcagtcatcccaagaccctagtgctgccccgatggtagggacttcttaatgagaattaacttttgctcaattttcagagaaatggaatgctcgcatcactgatctacgtaaacaagttgaagaattgtttgaaaggaaatatggtatgtctaaataggaaaattcctgtaatactttgttcatgagcatttacacaatggcgttactgttcatcatgggggtgatgtggacaagcccagcccagggctgccagtgaaccgtgccacactttcttacacgtctctcattgtaaggtccttagtagtgtctgtctaaatattagaaacagtctttgtttctagattacagtaaagctaaggaaaagttgtatttctgtagttatcagctaacatttcttttaaacttccagcatggatatttgggaatttatttacatatttattacaaagctctggatcttgggggtttcattaaaaattatttttttaactgacagtttctgttaatctactttgttaaatccagtatttgctgagatccccctattgtctctacttttatctttttttttttttttttttttttttttgagacggagtctctgcattgcagtagtacaatctcggctcattgcaacctccgcctcccgggttcaagcaattctcctggctcagtctcccaagcagctgggactacaggtgcccgccaccatgccctgctaatttttgtatttttagtagagacagggtttcaccatgttggccaggc

SEQ ID NO: 1882814 - DNA, 4001 bp, Homo sapiens
cctgccccaggaggtggcctccgcactcttccgtgcaggcaacgccacccccggctgcccagcacgagctatttcgaggtctggcctccggtggctgtgcctctgtcccggccacgctattctggggagggcatttactcatttgtttccgtggcagccgcggagtctgtcccccatcgcgctgtgtttctgggaacctgagcaggcccactctgcttccggagctgatagcacaggaaatgactcaggggtcccgcctccccgtggggggcacgtgcctcgggcctggcccgcgcaggcggagaaagagccagtttctcttctccctggtgtgctctgtcctgagccggaacccacgggctgggcccctagacagggcctctggggcagacctttgtgtcagggagtgggggtgctcctgtctcccctagagatggaaactgaggcaggtgccaaaggtcccgggtactgcccggcctcagaggaagtgtggagggggaaggctggagggcggcactggcgggtcaaccctgggctcagctgccaggccgcagagtcatctcctgctggctttgcttcgagtttaaaaaaagcctagcccaggaaatagagaagacagaggaggatgcggccagcatcccagccgggcatcgtcttggggcctgggcccgtcccaggaggtggccccgttgtgcctggtatccagacaccagggcctgatggggggctgcagggaatggggctcagcccccagcagatggggcagggctgatcccagagagaccctggcagcccaggcctgcccagtggtcagcagtgctgaaggcagagccacctctgcgggaggtatgggatgggcagcttcctgactggacccaccgctttatcccagccccaaatctcatgctactacttatagcccctcttctagttcacactctgggtcctggtgtcaccgtgtcacctcctcccccgccctgtccattctgggtcctggtgtcaccatgtcacctcctcccccgccctctccactctgggtcctggtgtcacctcctcccccatcccctccactctgggtcctggtgtcacctcctcccccaccctctccactctggatcctggtgtcacctcctcccccatcccctccactctgggtcctggtgtcaccgtgtcacctcctcccctgccctctccactctgggtcctggtgtcacctcctcccccatcacctccactctgggtcctggagtcatcatgtcgcctcctcccctgccgtctccttcctggatgtttattgagtgcctgctttatgcctggcacttgtgacgaggaggacctggtgcctgctctggtgtgggggaggttgtggcttaatgggggagagggaccaagaacaggaaattagccaatgaatgtcctgactctggttctgcccctcctgtcccctctgctttcattcctgctctgcctcacaaactcctacacatcctacaagaccccgccaggcccagctcatctatctgcggctgggctttgatagatactgacctccgcagatgaccgaggacctgcctccctgcggtgggcctgggagctccataggtccccactgaggcctttcctcccctgtggaatgcttctccctcttctgtgtctgcccatgtcattcaaatcttccagttaaattccaaaggcatcttcaaggtgccggtttgcatcggcagggcttggggttgaggccacccccaggaattctgctttccatgttctttgcttctcctaaatgaacagatgtggaagagacaaaccctttacccagagatcccttgtggagcctgaaaccgacatggggctcccaggttatgttcccgcctaacttgtcgtgtctcgaggagggtggtggacgggtcaggatcgcgtggactcgggactcagaggacccaggctgtgttctttgctggccgtgacctttgcccaggcccttgtgtggctgagccgtgccatttccatattactcagaaaaacgaacagagctcactgctgccgggaagactgagataaccctcctggggttctgctcttggcccctggtgtggaagccattggccgcctggcagctgccccgccccgtctcatgtccccaacacacgcaccgcaagagcctcgtccaccccacagaggaaacgcccaccacccacgccccgggcttgtcctcatcttcagcgcgggtggccaccctcctgccccagcgccaggccccagccggcagcatgctgaggacttcctgggagaggtgagggtgtgaggggccggcggctgggactgctggagggatcaggtccctgtctttccgccgttggcctccaggctcccgggagccccacctgggccaggacctcggcaaaggggccgggaggtgttgctgccccggctgaccttggcgggacctcctcctcctcctcctcatcctcgcagaatccccacccacccctcgacctctggactcagtgaggcatctcccttccctccgtccttccagcaggacagaccccccctccccccgccgccgtctgtaactccttcatacatgacagggtggtgggagaggccggtgccggagccacttcaaagcagggaccgtttcctccagccctgagctcactgggtcccctcccagcccagcccctgccctggcccagttagcgtggggtcggggctgaagcctgagtggaggggagacggttttctctcagacacgacgcgtcgtggcgtcctgcctggcttctcgccaggcccggggacgttgggaggcaattttgagaaaggaaagagtgaggtcaccctcgtgtaactggagttccccaaatatattgtcctggcaaatccctccccttccccctccccatccccctgcccgtccctgcgcctccccctgcccgtccctacccctccccagcccccccgggtcaggcacaaaggcagctttaaggcctctgctggacccggccctccagagccaggatgtctgagccccgtgggtggatgcccacttcctggctacaggctcacgtgggatggccgggccccctgcgggaaccggctgtgacttatggggctgtcccgtgagtcccaggcggctgtgcacgaacaccaagcacctccatcaacttcagattttccagccagggcaggggtgggcgtcagggagtgcccggcggggccgggcggggccgggcgcaggagctgcctgcaggggccctcctgtgatgtgggaggcccttcgcatgcagggtaaatccgcagggcccgtgtgggtgaaggccacatttaagggaatcaaaggatgctcagtaaggaatctggaatgaaaaagtggcatgttgggtagcccgggtgagttatgggcatatgtattataataattactgttattacagcacccgggggaacggccgcatggcagccccaggcagccccatccagctgctgtgtgaaccctgggtgctgcatgttgtttgctggtttctgtaaatcgcctccctggggcaatgggatggatgtaccctgggttcggggctgcaggactacggctacccagggtccgagtgggtttctgaggctagcggttttccctggttttattctgcgtggcgggaagggacggccgtttgccgtgggtatttaactgcgctggccaagtgccggaggcccatcaggaagccgtcccctcaaggacctggccctggccctttaagccagcagagcttggaggtggacgtcacccacttctgcagggtggacgctgccctctgaccagcagcgtccagggggacggccaggtgacaaaatgccaagagcaccaggttcagtttgaattacggttttccagagactccgaaagtgcctgctgccgtccgtgtgttgccaagagctataatccatttttctaagtataaaaatatcttccaatgtattttattcatggaacatagcatttctat

SEQ ID NO: 1882815 - DNA, 4001 bp, Homo sapiens
tgaggccccctcatcccccgctgggctcctgttctgcaggccgccccccgcacggcagcctgaccttgctggtgcggagctgatggtgcagcctctgggaaaacgcccgctaggagtttgtttccctttgaatcaggcccgagcccctgcggagtcagcgggaaggacctcagtgacatcatcctccctcggttcctggaatccgcctgcactggcggccccagggccttggtgtgtgtcccctgctctgccgggaaccccgttagctcctgcttctccttctgctctctgctaaatgtcacttcccagtgggcatcagcagacatgtcccacgcctccctcgtaggaccctctgcggctcgtggtgatgacatctcatgagaccgtctctttacggcctttctgcacacagactggaagcccccacagtgcaggacgctttggggattctgctacccgagacggtcactgcttcccaggctggctgagtcttctctgggtctgggatgcctgcctgcccttctccttgtccgcctgcccttctccttgtccacctgccccaggaggtggcctccgcactcttccgtgcaggcaacgccacccccggctgcccagcacgagctatttcgaggtctggcctccggtggctgtgcctctgtcccggccacgctattctggggagggcatttactcatttgtttccgtggcagccgcggagtctgtcccccatcgcgctgtgtttctgggaacctgagcaggcccactctgcttccggagctgatagcacaggaaatgactcaggggtcccgcctccccgtggggggcacgtgcctcgggcctggcccgcgcaggcggagaaagagccagtttctcttctccctggtgtgctctgtcctgagccggaacccacgggctgggcccctagacagggcctctggggcagacctttgtgtcagggagtgggggtgctcctgtctcccctagagatggaaactgaggcaggtgccaaaggtcccgggtactgcccggcctcagaggaagtgtggagggggaaggctggagggcggcactggcgggtcaaccctgggctcagctgccaggccgcagagtcatctcctgctggctttgcttcgagtttaaaaaaagcctagcccaggaaatagagaagacagaggaggatgcggccagcatcccagccgggcatcgtcttggggcctgggcccgtcccaggaggtggccccgttgtgcctggtatccagacaccagggcctgatggggggctgcagggaatggggctcagcccccagcagatggggcagggctgatcccagagagaccctggcagcccaggcctgcccagtggtcagcagtgctgaaggcagagccacctctgcgggaggtatgggatgggcagcttcctgactggacccaccgctttatcccagccccaaatctcatgctactacttatagcccctcttctagttcacactctgggtcctggtgtcaccgtgtcacctcctcccccgccctgtccattctgggtcctggtgtcaccatgtcacctcctcccccgccctctccactctgggtcctggtgtcacctcctcccccatcccctccactctgggtcctggtgtcacctcctcccccaccctctccactctggatcctggtgtcacctcctcccccatcccctccactctgggtcctggtgtcaccgtgtcacctcctcccctgccctctccactctgggtcctggtgtcacctcctcccccatcacctccactctgggtcctggagtcatcatgtcgcctcctcccctgccgtctccttcctggatgtttattgagtgcctgctttatgcctggcacttgtgacgaggaggacctggtgcctgctctggtgtgggggaggttgtggcttaatgggggagagggaccaagaacaggaaattagccaatgaatgtcctgactctggttctgcccctcctgtcccctctgctttcattcctgctctgcctcacaaactcctacacatcctacaagaccccgccaggcccagctcatctatctgcggctgggctttgatagatactgacctccgcagatgaccgaggacctgcctccctgcggtgggcctgggagctccataggtccccactgaggcctttcctcccctgtggaatgcttctccctcttctgtgtctgcccatgtcattcaaatcttccagttaaattccaaaggcatcttcaaggtgccggtttgcatcggcagggcttggggttgaggccacccccaggaattctgctttccatgttctttgcttctcctaaatgaacagatgtggaagagacaaaccctttacccagagatcccttgtggagcctgaaaccgacatggggctcccaggttatgttcccgcctaacttgtcgtgtctcgaggagggtggtggacgggtcaggatcgcgtggactcgggactcagaggacccaggctgtgttctttgctggccgtgacctttgcccaggcccttgtgtggctgagccgtgccatttccatattactcagaaaaacgaacagagctcactgctgccgggaagactgagataaccctcctggggttctgctcttggcccctggtgtggaagccattggccgcctggcagctgccccgccccgtctcatgtccccaacacacgcaccgcaagagcctcgtccaccccacagaggaaacgcccaccacccacgccccgggcttgtcctcatcttcagcgcgggtggccaccctcctgccccagcgccaggccccagccggcagcatgctgaggacttcctgggagaggtgagggtgtgaggggccggcggctgggactgctggagggatcaggtccctgtctttccgccgttggcctccaggctcccgggagccccacctgggccaggacctcggcaaaggggccgggaggtgttgctgccccggctgaccttggcgggacctcctcctcctcctcctcatcctcgcagaatccccacccacccctcgacctctggactcagtgaggcatctcccttccctccgtccttccagcaggacagaccccccctccccccgccgccgtctgtaactccttcatacatgacagggtggtgggagaggccggtgccggagccacttcaaagcagggaccgtttcctccagccctgagctcactgggtcccctcccagcccagcccctgccctggcccagttagcgtggggtcggggctgaagcctgagtggaggggagacggttttctctcagacacgacgcgtcgtggcgtcctgcctggcttctcgccaggcccggggacgttgggaggcaattttgagaaaggaaagagtgaggtcaccctcgtgtaactggagttccccaaatatattgtcctggcaaatccctccccttccccctccccatccccctgcccgtccctgcgcctccccctgcccgtccctacccctccccagcccccccgggtcaggcacaaaggcagctttaaggcctctgctggacccggccctccagagccaggatgtctgagccccgtgggtggatgcccacttcctggctacaggctcacgtgggatggccgggccccctgcgggaaccggctgtgacttatggggctgtcccgtgagtcccaggcggctgtgcacgaacaccaagcacctccatcaacttcagattttccagccagggcaggggtgggcgtcagggagtgcccggcggggccgggcggggccgggcgcaggagctgcctgcaggggccctcctgtgatgtgggaggcccttcgcatgcagggtaaatccgcagggcccgtgtgggtgaaggccacatttaagggaatcaaaggatgctcagtaaggaatctggaatgaaaaagtggcatgttgggtagcccgggtgagttatgggcatatgtattataataattactgttattacagcacccggggga

SEQ ID NO: 1882816 - DNA, 4001 bp, Homo sapiens
tcttttcacagcccttgagttctctggtgaaaaccgagagtaaagactgtacaataagccgggcacagtggctcatgttctgtaatcccagcgctttgggaagctgaggcagagggatcacctgaggtcaggagttcaagaccagcctgggctacatagcaaaaccccgtatctacaaaaaatacaaaaattagccaggcatgatggcgcatgcctgtagctcccgctactcaggagcctgaggaagaaggatggcttgagcctgggaggtggaggctgcagtgagctgtgatcatcccagtgcccttcagcctgagccacagaggaagacactgtctaaagaaaaacaacaagctgggcgcagtggctcacgcctgtaatgccagtactttgggaggccgaggcaggcagatcacctgaggttgggagtttgagaccagcctgaccaatatggagaaacccccgtctctactaaaaatacaaaattagccgggcctggtggtgcatgcctgtaatcccagctacttgggagactgaggcaggagaatcgcttgaacccaggaggtggtggttccggtgagccgagatcacaccactgcactccagcctgggcaacaagagtgaaactccatctcaaaacaacaaacaaaaaacaaaacaagaaaaagcatgcctggttgtgtctgtccttacctgattgggcatggtctctattgattaggcgaccatctggtctggttggcacgacgctttttgggtttgaggaagggtctgctctgctgcccaggctctagtgcagggcgcattcacagctgacttatgcctccacctcccaagaggctgggactgcaggtgcatgccaccatgctgcgttcatttcttatttttgtagagacagggtttcgtcatgttcaccaggctggtcttgaactcctgtcaggcctctgagcccaagctaagccatcatatccccagtgacctgcatgtatacatccagatggcctgaagcaactgaagatccacaaaagaagtgaaaacagccttaactgatgacattccacccttgtaatttgtttctgccccatcctaactgatcaatgtactttgtaatctcctctacccttaagaaggttctttgtaattctccccacccttgagaatgtaccttatgagatccaccacctgcctgcaaaacattgctcctaactccaccgtctatcccaaaacctgtaagaactaatgataatcccatcgccctttgctgactctcttttccgactcagccgggctgcacccgggtgaaataaacagccttgttgctcacacaaagcctgtttggtggtctcttcacacagacatgtgagacactaacctcaggccatcctcccacctcggcctcccaaagtgccgggattacaggcctgagccaccgtgcaccgtccggctaatattttatttctgcagagatggggtctcgctatgttgcccaggctggtctccatgtcctgggcccacgccctcctcctgcccagctgggcggggtcttacccaggcggagccccttacgtgcagggcgttctgtgcagtgaccgcggccctgggcagagccaaccccacgcggccacataaccgtccagggggcggggggcagcgcggtgaaatggaaaaggatttaactgggggatctaggtgctggggacactgacattttcggtattattcttgaagcttttccctaagtttgaaattacctaaaaacacgttgttttgagatggaggcctcctggggcccgcaggatgcgcggccgcgggcgggtgcccggggcgggaggcgccggatgggtcgctaggcctcctccctcaggccggcctcgcgctcctaccccgcaggaccccggccgcagccctgagtcagcttccccgctcctcgcccgcccggctgcgcctgcgcggagccgcctcactgtgacccagcaagcgcgccgcctgcgagaagcgaccggacacttcgagaagggaagtggagaagcgaggagtgggcgggcctgcggggcgcggcggggcgggattggccggatggctggtgtcgtcttcggtgtgcgccggcgccactgggccgcggcctggcgggattggccggtctgcgggtgacgttgtcggggcgcgcccggaaaccccaaggcccagacggctctcagatccgggggctgcggataaatccccgtaggccgcgggcagcgagatgttgcgttccggtgtgggtgtgggtgtgcctccgacggcgtctcggtgccagtgtcgaggttctttctgcttagctacccggagccgactacggaggaggacacctgagtttacgtctcttccatctgctgctcacctcagctgcctgggtccccgacgagagccaggtacggggccgggattgcgcagacagggtctgccgggggtcgggcctgccttgaggtcaggttgctcgggggttcggcctgtctgctaggagtgcggctgctgaaagtccggctgcttgctggaggtcaggctgctgggggtccggcctgtctgctggggaccgggcctgccggggtctggctgctgggggtccggcctgtctgctggggaccgggcctgccggggtctggctgttgggggtccggctgtctgctggggaccgggcctgccggggtctggctgctgggggtccggcctgtctgctggggaccgggcctgccggggtctggctgctgggggtccggcctgtctgctggggaccgggcctgccggggtctggctgttgggggtccggcctgtctgctggggaccgggcctgccggggtctggctgttgggggtccggctgtctgctggggaccgggcctgccggggtctggctgctgggggtccggcctgtctgctgggagtccggctgtctgctgggggccgggcctgccatcggggccgtagtaccgggtcgcacggggtcgttaacccgccagccgagtgacagccacgtagatgtgtgttttcttgctgcgggcccggcccgccagggtagggtgttggtttcctaggacgggtgctgtgcgtccagaacaaaatcatttggggattcacatcaaactcttgtgaattccttgaacaaaacaatttcggaacgcctgctgtgtgtcgggcaccgggagctaatagtaaagcagcggatctgtagttggaagctgtgggcgaaggagggctgggaaaggactaatgggcaccttaagtagcgggcgtgtaacatagagggaactggggagggtgggaatggctttaaactgaggcgggaggggataactagacgtttgccatgggcgagagtgttccagtcttaggcgacagtctaggaggcctccaggagtggggagagagctgatgggaaggtcaggaaaaggccccgggaggggctggtgagtactagatgacgggacctcgtgagccccaggaaaaggccccgggagggctggtgggtactagatcatggaggggacctcgtgagccccttgattctctctcgagtgcggtagtttcaccagctgtctgcctgttttccatagtgacttaacagcttgcgcttctccctgatcaactccaggttgatgtcatcgaggaataagttcacagtaagattcaatgcctaagggagttgaagagagaggcgagggacagagttaaatcttctctggataatggagtcaactgatgtgatttagcacctagtaacagagttttgtttatgtgaacaagtatattccatggataaaattgtgacttaaaattcaccaaagtcgtaatcatcactggcagctgtgtgaattagctctcgccccctcagtgtgagtttaaatagaaacccgagttcaaggagtgcttcatagactaggaattaaaaggcctgtgaaggagtccgtgtctcttaatggggttgactacgaatggcggacacctggtatttgtactaaaactcca

SEQ ID NO: 1882817 - DNA, 4001 bp, Homo sapiens
tgaaaccccatctcttcctaaaatacaaaacaattagctgtgcgtggtggtgtgtacctgtaatcctacttgggaggctgaggtgggagaatcacttgaacctgcaaggcggaggttgcaatgagccgagaccgagtcattgcactccagcctgggcaacaagaatgaaactctgtctcagaaaaaaaaaaaaaaagaaaaagaaaaaaaaagaaaatgtgggtaaaacagggttaacgaaccagtccaaggagagcgatgtggccaaggaggaggtcctgcactgatccagacatcttgaaaggtgggagtccgggcctgggcagagccttcaaggggagatgttgtgtgattgggagggacagcaagatggagccagtcaccaccgccgtgcagctggtgaggtcctgctcttttcacagcccttgagttctctggtgaaaaccgagagtaaagactgtacaataagccgggcacagtggctcatgttctgtaatcccagcgctttgggaagctgaggcagagggatcacctgaggtcaggagttcaagaccagcctgggctacatagcaaaaccccgtatctacaaaaaatacaaaaattagccaggcatgatggcgcatgcctgtagctcccgctactcaggagcctgaggaagaaggatggcttgagcctgggaggtggaggctgcagtgagctgtgatcatcccagtgcccttcagcctgagccacagaggaagacactgtctaaagaaaaacaacaagctgggcgcagtggctcacgcctgtaatgccagtactttgggaggccgaggcaggcagatcacctgaggttgggagtttgagaccagcctgaccaatatggagaaacccccgtctctactaaaaatacaaaattagccgggcctggtggtgcatgcctgtaatcccagctacttgggagactgaggcaggagaatcgcttgaacccaggaggtggtggttccggtgagccgagatcacaccactgcactccagcctgggcaacaagagtgaaactccatctcaaaacaacaaacaaaaaacaaaacaagaaaaagcatgcctggttgtgtctgtccttacctgattgggcatggtctctattgattaggcgaccatctggtctggttggcacgacgctttttgggtttgaggaagggtctgctctgctgcccaggctctagtgcagggcgcattcacagctgacttatgcctccacctcccaagaggctgggactgcaggtgcatgccaccatgctgcgttcatttcttatttttgtagagacagggtttcgtcatgttcaccaggctggtcttgaactcctgtcaggcctctgagcccaagctaagccatcatatccccagtgacctgcatgtatacatccagatggcctgaagcaactgaagatccacaaaagaagtgaaaacagccttaactgatgacattccacccttgtaatttgtttctgccccatcctaactgatcaatgtactttgtaatctcctctacccttaagaaggttctttgtaattctccccacccttgagaatgtaccttatgagatccaccacctgcctgcaaaacattgctcctaactccaccgtctatcccaaaacctgtaagaactaatgataatcccatcgccctttgctgactctcttttccgactcagccgggctgcacccgggtgaaataaacagccttgttgctcacacaaagcctgtttggtggtctcttcacacagacatgtgagacactaacctcaggccatcctcccacctcggcctcccaaagtgccgggattacaggcctgagccaccgtgcaccgtccggctaatattttatttctgcagagatggggtctcgctatgttgcccaggctggtctccatgtcctgggcccacgccctcctcctgcccagctgggcggggtcttacccaggcggagccccttacgtgcagggcgttctgtgcagtgaccgcggccctgggcagagccaaccccacgcggccacataaccgtccagggggcggggggcagcgcggtgaaatggaaaaggatttaactgggggatctaggtgctggggacactgacattttcggtattattcttgaagcttttccctaagtttgaaattacctaaaaacacgttgttttgagatggaggcctcctggggcccgcaggatgcgcggccgcgggcgggtgcccggggcgggaggcgccggatgggtcgctaggcctcctccctcaggccggcctcgcgctcctaccccgcaggaccccggccgcagccctgagtcagcttccccgctcctcgcccgcccggctgcgcctgcgcggagccgcctcactgtgacccagcaagcgcgccgcctgcgagaagcgaccggacacttcgagaagggaagtggagaagcgaggagtgggcgggcctgcggggcgcggcggggcgggattggccggatggctggtgtcgtcttcggtgtgcgccggcgccactgggccgcggcctggcgggattggccggtctgcgggtgacgttgtcggggcgcgcccggaaaccccaaggcccagacggctctcagatccgggggctgcggataaatccccgtaggccgcgggcagcgagatgttgcgttccggtgtgggtgtgggtgtgcctccgacggcgtctcggtgccagtgtcgaggttctttctgcttagctacccggagccgactacggaggaggacacctgagtttacgtctcttccatctgctgctcacctcagctgcctgggtccccgacgagagccaggtacggggccgggattgcgcagacagggtctgccgggggtcgggcctgccttgaggtcaggttgctcgggggttcggcctgtctgctaggagtgcggctgctgaaagtccggctgcttgctggaggtcaggctgctgggggtccggcctgtctgctggggaccgggcctgccggggtctggctgctgggggtccggcctgtctgctggggaccgggcctgccggggtctggctgttgggggtccggctgtctgctggggaccgggcctgccggggtctggctgctgggggtccggcctgtctgctggggaccgggcctgccggggtctggctgctgggggtccggcctgtctgctggggaccgggcctgccggggtctggctgttgggggtccggcctgtctgctggggaccgggcctgccggggtctggctgttgggggtccggctgtctgctggggaccgggcctgccggggtctggctgctgggggtccggcctgtctgctgggagtccggctgtctgctgggggccgggcctgccatcggggccgtagtaccgggtcgcacggggtcgttaacccgccagccgagtgacagccacgtagatgtgtgttttcttgctgcgggcccggcccgccagggtagggtgttggtttcctaggacgggtgctgtgcgtccagaacaaaatcatttggggattcacatcaaactcttgtgaattccttgaacaaaacaatttcggaacgcctgctgtgtgtcgggcaccgggagctaatagtaaagcagcggatctgtagttggaagctgtgggcgaaggagggctgggaaaggactaatgggcaccttaagtagcgggcgtgtaacatagagggaactggggagggtgggaatggctttaaactgaggcgggaggggataactagacgtttgccatgggcgagagtgttccagtcttaggcgacagtctaggaggcctccaggagtggggagagagctgatgggaaggtcaggaaaaggccccgggaggggctggtgagtactagatgacgggacctcgtgagccccaggaaaaggccccgggagggctggtgggtactagatcatggaggggacctcgtgagccccttgattctctctcgagtgcggtagtttcaccagctgtctgcctgttttccatagt

SEQ ID NO: 1882818 - DNA, 4001 bp, Homo sapiens
gggactacaggcgcccaccaccacgcccggctaatttttttgtattttagtagagacggggtttcaccatgttatccaggatggtcttgatctcctgacctcgtgatccacccacctcggcctcccaaagtgccgggattacaggcatgagccaccgtacccggcctctaccaaaaatgtaaaaattagccgggcatggtggtgcatgcctgtagtcccagctacttgggaggctgaggtgggaggaccacttgagcccaggaggtcgaggctgcagtgagctatgatcacaccactgcactccagcctggatgacagaaagaaactctgtcaaaaaaaaaaaagaacaaattatttccaaaggggaaaaaattacacattctccaattaatctctctgctggtgaaatggtatcccaataggagagcctcacctatccctgggtcctggcagagtaagaacatgtttctaaaatctcatgatgctaagaaacggctcatgtccacgtgaacagtgccctgcatcctcaggtcacgtggcttctctcttcactgatggaactccttcaaccctagtttatcaaacaccaacatattaatgcagttgtgtgcgagtctagatcctgtatgtgaaacgctagaaatccaacccaaatcagctgaagcgagtgcaaattcctggaggcgcacagctgagaagagcaggtggagccggcttcaggtgctcaccccggcccggcccccgatctggtggcccttcctccctcagcagttggtctcagttccgggacggcttttctaggtggccacagcactgtaacgtccatcccctccacctgccagaacctcttcccagaggctcacagctaagagcactgggtctcaggggtccaggtcaggaaatcagccccgtcccgtatcaaccatgggacacaatggctcaggtgcatctgcccttgggcctgggtagggaggcctgactcagccctcctagggtaagggagagggcggaagagacgggctctctgaccaggaggaggaatgcacacaggcaaaacacaacagatgtgtgcaaacagtcactccaacactcgggagaaacgtttaaagacttttaggttaattacgtccatgcaagccaagctttcccttttgatattcttaggtttggtaggatagaagaggatgtgtggcttataaataagtgagcaaaaattacccctggataatgggcatgggagcgccccagcctggtgatggcatccttgggggctgggtggtatctgcagcctgtgtgatatttgggagtctgttattcttcagggtggggctgccaatgagaacagagcgtccccagctctctgccaagagtctcagccgctcccctgggctgcctccatacaggcgggtgagcacacatggaggggagcaccaccaggaacccaggcttcctttcagagactctagggagaagactctggggacgttggtgtggccccaacattctgccgcagggaaacacctgtcaccatgccgaaccaacacattcaggaaaggtccccccaccaaggtacaaccaaggcagttcacatccagggacaggtgccccgggcagctcagctcaggagggtccctctggggagacctggtctgcaccaggaagcagaccacgtgttcacaaaatgcacacgccacccactttgcttggacccacacaaggaccatgtccacagcttccagctcagatggctgctcccatccgtgtcactgtccctcacagggacgagggcttagccaccctgcgttcactctccacccctacggcagccctgccagcctctcacctgagtgcaggagacagggcggggagagagaggtgcggccatccaggccccgatgaatgcagctggcctcatcggagggtttgcaggaacaaacttggaacacaactcctacaccctctggaagaaggaaacaagaaaaatatcccgatgtgtgtgtgagagagagtgtgtgtgtgtgtgtgtgtgtgcgcgcgtgtgtgtgtgtgttctgattcctaagtggcagagctaggttaaagccccaccttcaccaaaccacccacctcagggcacagacgtgctcagacctcaccgggaagataaactgaaatcctaacccttgccctccatcaagacatagggccaaaaccaaacctgaaatttttccaatagtccaaataaatggcaaaagcactacagcaaactccactaaatatccactgggggttgtaagtatcagcgaatgaagaagcatgagatgctttaagaggaaagagggagggaggcatcacccacacaacctgcaagtcacacctgtgtcaaattcctggggcagatggaaaatacacagcatcagacgctgggaggcgagtccaggagcagccaggccgcccagcccaagcattgcccaactgtaaacgggcgaggtgccctcccactgattcgaggcgcagccatcacacaagagacagggctttgtgacaccaccccgcacccaaccaagtcattctcatgactgtgctcaaagtgtggacacagctggaggatgggggccaacagggtaaaagagttttaagtttatggttaaattttccagttgtacgatgccaattttcataaaatgtataatttgctgtgtttcagtggaaaaagaaaaaaccagagccaaaggtctctacgcagtgtggtgctgcgcatcaggcaaacagcgaagaatcaaagtgggttctccccgctcacacctccctctcttcccggagacgcctcccctcggcccagcaggcccttttctgccactcccatccggagtcatccccacgggcggtggccccgaccatggcccgggaatctgagcaggtgcgtggatgtgggtggtgtcttctgcaggaacccctccacatccctgcaaacaccccaggtgctcaggaaaaccgaacctcagaggaaccataccaagaactgggaatgcagaaatggaggggacgcgggcccccctcagtgagtgaaccgcccagtgggttctgacattcgtctgaacatcctataaacaaacgcatcccggggaggtgctccagcaaaggcagacacaaagggccatgcccagaatacggaaaacaagccctcagcagattcactgacaccctgttcacagcagcattcaattcacattcgcaggaaggcagaagcaactcagtgtccaccaactgatgaacagataaacaaaccatgcctcttccacacaatgggacattattccgcctcagaaaggaagttagttctgacacctgccacgacaccgatgaacctagaggacattgcatgaggtgaagtacttcagtcccaaaaggaccaatactgtgtgactccatttctgagggagctcgggtagtagaaatcagagagtggaagctgctgccttctaccaatggggagcgagtgctgaatggggacagagtttcagtttgggaagatgagaaagctctggagatgatggtggtggtggcacgacaatacgaatgtgcttaatgccacacaacagtgcacttaacaatggttaagatggtacgtttaaaattaaacatttttatcataataaaaaacttggaggggccaggtgtgatggctcatgcctgtaatcccagcactttgggagggtgatgcaggagggtcacttgagcccaggagtttgagagcagcctgggcaacacagtgagacctcatctctgctgaaaataaaaaactagctgggcaggctggcgctcacctgtaaccccagctacttgggagtctgagatgggaagatcacttgagcccaggaggttgaagctgcagtgagctgtgattgcaccagtgtattccagcccggatgacagagcgagaccctgtctccaaaaacaaaacaaaacaaaaataaaagaaagcgaagcttcagaaaggaaggcaggaggtgtctaacaca

SEQ ID NO: 1882819 - DNA, 4001 bp, Homo sapiens
tagtgccccagatgacgtcaatacaagtagttttcagaccttaatttcggaagcatgtgaaaaagcattctttattactgtattcactcattcttcagtaattgtcgagcaccttccagagtgctctgttagaccctggtgggaggcagagggtttgcgtggagacttaagattcagttttcatgtctcaaggcatcaaatgagatgtactagagttaaaaggcaaaaaggacgctgtttgtatcaagcgcattaaccccttttagcgtttctcttacaatgggatcaccttcgtcatacgctcccagttgctactcattaccttaataacactaataaagcaccaccacctcgaagctggggcgaataggcccaagagacggcctacttctgtggtgaccctgaactgctccagaggacccagctctctcaagccaagtggtttccacactttgctgcacagtggaggcacttgtagaataaagaaaataggccgaccctccaggtttggaagccactgggctagcggcctcgccaaggccctgaagcgcccacgtctttgcgccctctatcctcagccccgaaggtgcgcgcggaggcctcccgccccggcgggcctggtcctggcgcctggtccaccccgccccaccgctacccgccgtgcccggctccggctccggctcaggtgcgggccgccggccgggaggagctggtgccggagcttctcaggccagggcgctgcagaaccgaaagcagcagggggcgggggagaggaaagagggggcgggagcggggacgcgagggcgaggcggccacgcggggccgggaatgcccgcggtgcggggccccagagccgcccggtggtcgtgtccgggcgatggctcttcgcctggtcgccgacttcgacctcgggaaggacgtgctcccgtggttgcgggcgcagcgggcagtgtcggaggccagcggggccggaagcggcggcgcaggtgcgggaggcgcgctgcggagaggggtgggggcggggagtgggagtccctcataccccccggactccgacccggtggggagcaacccggggcgtcgccgccctgagaaggctggtgcgagggcgtcgctcccctcctcagagggctgttttggctttgccacccacacccagccacggcggaaggtctgggggcagagcccgggccaggtcgccgtggggcctgaggcgcctggctcgctgccggcccgcggaaattcgcccttggcagaggggccgggccgctggcggttccctcagcatcacctcacggcgagggcagagggtcgtgctcagctcagcggccgcatcccacctcccggggggttcatcggcagcgcaggggctttgccaagacaggagtgctcctggaagcttcacgttttgagaaagaatccgtgaccaccaagcaaaccaccctatacctaacggtggaacagtttgtccccacatttgcgagacgtgtttatgtgtctgttgaaccgtgtccgtggctcaggggacatgggcctcggcggtgaggcgcaagagggcaggggccgcctccaggctgcgcgcggcggggcgagagcccccagccgcccccgagctccgcacctgtgcaggctggggctgcgcgcgagatgctcggctcccggccctgccactccgggctttttgatgatttggtaagggagtgaaagtgacttttgagccttcccagcactgatctgttttaaagaaggggaactttgtgatttcttacaaagttttaaaagtcttctataaatattggagcttcagagcttaaatgcagcttcaaagcaatgatgcctgtaggtctcaccttgtgtgtagggcgctgtccacttcagtgaatttggaagtgggtattaaatgacccacatctacaactcctttcccttaaacgctggtgaaagttttcttgatgtgagttatatatcaagttgctatcttgtatcttcacactctcctatgactatagcgaaattatttgtaggtttccttggcttggaatattattagctccaaataaggagttatatgtttgtgtagcgtatgcattgagtttgcattagtgtcatgcttagtaaggctttactttttttcgaggtggagagggtggtcaaggaagaattttatacaaaaattagctgggcgtggtgacacgctcctgtaatcccagctactcgggaggctgaggcaggagaatcgcttgaacctgggaggcagaggttgcagtgagccgagatctcgccactgcactccagcctgggcaacagagtaagtctccgtctcaaaaaaaaaaaaaaaaaaaaaaaaaaaaaaagtcgcccacatgtctgaaaagtttttgaaggcttaactttttgaaatacaacaggcagctctgtcttctactaccaagtactcctttttctggactcccactttattttgctaaatggcaggtgtctgcaaatgagaagttagatgagtgtgaaatgccacagtcttatgtttccgtaatgtgtgtcgtgcttgaaaagctgtgtgtgacccactgggacctggcttccttgtatctttcgctcatctctgaagaaatataaacttgtgtattgaccttccactaaacaacagatagctctaggtcctcagaaggtactttctggaaatactagcttttctgatactggtagtattttgctctttcagagcaaatatcttggtaagatattagccctgttatactaagagaattatcacctctgataatcaccagtgggtggtagctcaaaaatacccccacacaaattaattcctgttctgtaatttatagcagtggcagggaaatctgggattctgtctcatttctagcacagcagttacaacacacatttgtggaaatcattatcctttcaaagttctggcttttcaaatgtaaattatgaattactataccattgtaatgcctcctctatgcatacttgctttctgaatttgaagccttaatgtttttacatcaacaaatacaattgaagttttcttagaggtgctaagtaattctcatgagatatgtatgatatattcctggcaaaacagagagctgggctgagtcagccatggaaattctgtgcctgtaagcattttggtcaataaggggtcaaggaggaaggagaacagatttggttactgcatttgctcctggttctgggttgaacttttgagaaaacagtttctcctgaaataaaagaagatatttgttaaaaatcaaaacaactacataaaagaatattttaacaggtagctgtaaatgataaaagaaagaaaaaaaccaccgaagtaaaaccgtgtatccactacccagcttaaaaacagagcaatgtcaagactcttgaagtctcttatgtgctcctttctgattctatttctttctctcatcctcacctcctaggttggcaaccatttacatttttatattttaacattactttgactttatttgtagttttagcctatatgtatgggcaaaatatttcattttgcttgcctgtgaactttaaacatactgtatgcattccttttgcttattttccttctcaatattgtgagatttacccatattgactggctagctgcaggttattaatttgtattaattaatgctatatagtgttccatagtgtgaattcaacacgatggtggacatggagatgcaccccttagattttcctttcaaagaacagcttgtcccaggtgctgtgagtatagtcagcaggcagtcttcagctgtcagccccttcagggattgcctgccaagagggctgccctacccaacttcacttccttttgggtatggaccacgtgaaactgagtgggctttaaaggcctggccattttgactgaacatgggacaactccatttcagttccgaagcttcctctttgagggacccaaggtcacctgaggatattgggcctgcgttgctactgga

SEQ ID NO: 1882820 - DNA, 4001 bp, Homo sapiens
attaagagttcagttcttgagtttcacctttcaaatgggtgataaccacagtagctagtagctgctgtactagatagcatagagaagcatttcgatcatcacagaagattctgttttacaatgctggtctacaatgtctaaagctctgaatttgtgttgtggaattctgaagatgagtggaatgtggctcttgctttcaatgtaactcaagtctgtgaaagaaaatacttaggggaaatgtttggaaaatatgaaaaattcagtgatgtggatgatgactatttgacaaacattggggagttagcgtaaacagttcaggataaaaggaagatagaaatgactgagctgaaacctaaagcatattagtgatatttgtgaccttcccagtgcatgaaagattataaaacattccaatgtgggcccacttgcaagaggaggcaaggggaaggggcaattctatttgtatccagaatgttgtatttttcttttaaaatgttctgtattaaaatatttttactataaatatgtataatttcaataatacaagttaaaaatttattttaaagaatcttgacctttgtgtaatagcattgactttctgccccttttctcatctctgaaaactcttcctggcatcccttcccatttttgtcttttagctctcccacactaagggaggcatctaccctcctgtccaagcttcatgtacgctcgtgagcttgaatgccgtttctttttatctcaaatatcacctgatattttattctttttctcttctctcttcaaacataccttctctatgatttttcccttcagtctataaatacatgtaaggtttctgaatcaaccaaccccctgttgatcctacttttctgtcagtctcccttttccaccaaattttctaaaaacatggcttcaatttgttgtctccaattcctcacttataatttactcttcaactctgaaattgaatttttcctctaagcatgaaattgctgtatcatttaccaaggtctccagttattgtcatcaacaattaatcttgtcaattctagcagaccatttatagtttatctttttcttgggaaatatgttgatcactccgtttacctatgttaatgacaccacaatctgtcttatgtatatatgagacagagatatctgagcacatctacaattgcccattaagtaaatattttcacaaggatttgccgtaggcaattcaaacttttctttaacatgaactggtcatctcaccaaaatttcctcctcctgtcccaggtagcaatgattgatacctccttaaagtccctctaatccaatccatcctttccacccccactatcattgacttcatgcaaatgtaacttactcacaaagtctctgactgaatgttcgcccttctccaatccattgtccacgctgcctcctgggtgatttttccagtatcaaatcagctgtatcagttccttttctgtttcctttatttttaacttgcttttctgctacagctctctgatagtttctctcacttttaaaaatacctattgcctaaataaataattttttctttttaagagaaagcaaacacagaattttcaaggttttagcactacattgagaatctcctgaaaagcatccaaatatgacacttttccttgagtttcaccttcccttgagggtctgtcacagtcacactgccaccgccaacatgctaggttctgaagatgccacttctctgataaattttggtttcagacaatacctaatctctttacacaatactcagagaaggaccaagtataaatataattataactaaatgttataaaatatataattaaaattttagggaggactgtaagaaaatcagcaagggaaatcacaaaagtaacacttactggttttattattttaaatcttgctgccttctttgtttttaaaaagctctatagatctcttaggccaacgtgttacatgaagagaaagtaggcttctcgcatagctgttcaactgctttcctagtttatgaataaataagccaagatcaatagagtgctgtttccattccctctctattggcttgtgattgtctatgcagaggctgatgccaggctctggcagaacattaatgtggactcacagttatggatacatgattcacatttaaaaatccaataagaaccagagttggcaggcacgagcctggcagattggcaattattttgacgatgtgaaagttgttttttaactttcctataaaatacatgtgcatgatatgacgctgcttttagaagaattcaatgaatatttcgtggctgttgtgaatagaaagttgctcttgataatgcaactaggactagtctcaagacacaattggctcagtggcctaattactgtcaatgccatcagtgagaagggtttattattagttattctcaaattactatcttaaataatttccaatattctatcaggtcgtggcagagaactccacacagaaaatcaatcagcttaaaaacccgaagacaggttttgcagttaatttgtatgggtttgggtaaaggggaaccaggagacatgagaatgccactttaataaaaactacatggtcacatggtcattaattatcttatgtcttaggctgggcacagtggctcaggcctataatcccagcactttgggaagatgaggtgagagcctcacttgagcctgggagtttgagaccggtctgggcaacgtagccagaccccaattcacaaaaaacaaaaagaattacctggctctggtggcttgcatttatagtcctagctactcaggaggctgaggtgagaggatcgcttaagcctgggaagttgaggctgcagtgagctaggatcactccactgtactccagcatgggcaacagtgagaacttgtctctcaaaaatatatatatataaaaattataatgcctcattaaattaaaatttttccttataaaatgagactgtcccataagaagtatgtgaaacattatttaatttctttagttcacatgtggattaaatctttcatgtcacgagcatatctgcattggcctatgtgtgaacctatagtgatgtttatgttcataataatgatcttgaaacttttcatagaaaatccttatattttttaagacattgttttgtatagtttcaatgttaagattaatttaaggttaaaattaatttaattgcaaccagagtattttattttattttattttgaaacgaaatcttgctctgtcactcaggctggagtgcagtggtgtgatcttggatcttggctcactgctacctctgcctcccaggttcaagcgattcccctgcctcagcctcccgagtagctgcgactacaggcatgtgctaccatgcccagtgaattttttttttcttttttgtatttttggtagagacttggttttaccatgttgaccaggctggtcttgaactcctgacctcaagtgatctgcctgcattggcctcccaaggtgctgggattacaggcatgagccacagcacccagccctcaaccagagtctttttttttaacttttaggttaaagggtacttgtgcaagatgttacataggtaaatgtgtgtcatgggggtttgttgtacagattatttcttcacccaggtaactagtacccattagttatttttcgtgatcctttctctcctcccaccctccaccctccaaaagtctccagtgtgtgttgtttccctttatgggtctctgtattctcatcatttagctcccacttataagtgagaacatgcggtatttggttttctgttcctgcattagtttgctaaggataatggcctccagctccatccatgtccctgcaaaggatgtggtctcattctttttcatggctgcatagtattccatggtatatatgtatcacattttctttacccattctatcattgatgggcatttgggtttattccatatctttgctattgcga

SEQ ID NO: 1882821 - DNA, 4001 bp, Homo sapiens
ccctaggaggcagcccaggaatgggcaagagggcaacccatttctgggtacacattacactgtaccctgggaaccgctgaggatcacgaggggcatattttaagggtggctatttctgccagtaatgctggaaagcattcatggcataatgccatgatatgtagcagaatccaccacagtgtctgtacgaaatgtttaagtaggtaattcattctgtcagttattaagtgttatgaatctgaaatcattaaaacaatgtactgcacaagaaataggcagataagcagaccagaatacagtttatacacaaaccgataatgaaatatcatggggtaatggtgatttaaaataaatgttgaaagaaaggatcgtcaaataaagtgtattacaacaaacgggtagccattttcctacctcactccatataagaaaataaattctggagggatcaaaaatataaacacaaaaaatgaaactatgaaagtaagaggaaaacataagcatattataaataaaccttggtgtgagcaagacacacaattcaatagccctaagaaaagattaattggtttgtgtggggaaaaaacaagtacgaaataatcataacagttctaatacatataaataaaccaatattcagagagtttataaaaatttttaaaaaccctagtaattcaatattaaaaactggcgaagatgaaatgcaaattaccaatgtataaaaaaaactcaaaccttaagtacaaatcaacaattatcagatattaatgcagtgataaaactagtaagttcaataatcaaaaactttggtaaaaggggcaggaaaatatactcgcaaatgttgagtagtagtataaggtagtacagtacagtttaagaaggcaatttggcagtatctatgaatatttaaatgcatacattctttatctcagcaattacttgctaggaacttatcctatggctgtacccacacaatcatttcaaggatgttcagtgcagcaataattataataaaagtatccaactcaattatcaatagaggaatggcttaaaaattgtggcacatccatacagagatctagttaactattaaaaagaattatctctaagttattaaacagtaagcagaaaaggcaaggagcagaatgatgtgtttagtttggaaatgagtacagttctgttattttctgtttatggctggacaaagggactgctgggtggggctgtagcagattatagcttttcattttatattcattctcttttaccaagcacatacattacctttgtataaaaacttaaaaatatttttaacaggaaagacattatcctcaaaccatgcagtaatgcccaacttgaatatatttattcaagatctaaggaaggaaatttcaggggtactggagttattgaaaaataaacctaaaaacatgccaatgaaagaaaatggctgtgggtctcagaaaaaaatggtacactgactgcacctgggaaaaaactggaactctcgaagaattgaagttaactgggctttggcaaatttgtgaatatatcgactctttcacatgaagttgtacctgagccttattctttaaatccagttcaaatgccacaatttctttgaaacttctcagatccctaaacacttaatatacagtcctcttatagttctttgtaaatacctctatcatagtcctgaggaggctatttgttcactggcatgtcagcccccaacccaaatgtgagatccttcaggcaagccttaaccacaggtttcgccctcctttctcttctatagctgacaaaccatgagcctggtgaaagtttgttgaatgggtgatttaatgactggaggaaaaaaaagagctgttgctttttttggattttaggatagaaaacttgtaacttgacatgtaaattaattattaactaactcgacacagttttctccttaccagtgttaggcacgaccctacctttgttttgtcatcagagatcacttgttgcttcagtaaccaagagcactgagctacaccaagtgacagtgctttggaatgtctaatggtcactgtagagaaaaggaacctgagctctcctccctaatagcaaatacacacaatcttctgcccacacttgaggttttgttctttttctggactgtattctccaacgtaaatgcgaggttttttgcctgatggtgtatgatacgtggagttcaaatcaagattttctcaagcagaaaacctgtttaggagtccctccatatctatgagaaaagcattttgtttagaggtctccataaaaatgaaacagaagaaagtagggggcatatggagaacttttcttcatagtgaaaggatgctcaccatttacttccttttaattgatatataatgtacatatttatgggggagagagtaatattttgatacatacaatgtatagtaatcgtatagtaacctttttaaacttttttgttgtggagatggagtcttgttgcccagggtggacttgaactcctgagcttcagccttctgggtagctaggacaacaggcatgcagcactacacatggctttgttatttaaaaaaaaaaatcctattatgtcccaggcacaattggaaacaagacagatttgatctctgataacagtgcctggcaactattaggatcgttcctagaatctatttgcaaatggtgggaaaaggcagggaccaaatatgtgagttctatctagcagtacaatgggtcaaagaaaaacagaaagaatgaataagatctagtatttgatagcacaatagggtgactatagtcaataatttaattgtgtatttaaaaataactaaaagagtataattggattgtttgtaacacaaaggataaatatttgaggggatggatactccattttctatgatgtgattattacttgttgcatggctgtatcaaagtgtctcatgaaccctataaatacgtacacctactatgtacccacaaaaaattttgttaaagtacatagctcaggttgttcagggaagataagaaattgcatttagtacaaagaccactaacctgggagtcaggaaaattgagttctgttgccacttctggcattatttgtgtcatttttctaaactttaacatctctagatctgtttctgaatctttcaaacgaggcgttagaacatctttaagctctagaaatcagtagtcctatatttttatgtgggaaagggctcagtgtcttctatttccatgaataagagaataagacttaagccagaacagatctaagaaagatatgaaaataatctgacacaaggatttgagaataaatagtaacttccgagtactcttcacccttggagtagaaggagagaaggatgctaagacgggtccacatgaggctgctggtcctttgtatgggtcaactatttaccactcttgaagatggatacctccttcatctaccctcattatgaactagttcagcagtctttatacccttgattgaagaaagtaatttcttatggcaagataaaagaatccaaatcagctttgagatctttccagctcatgtgtgtacctgcttacctctactgctgcttaagaatgtctgtggacattcttcaccactggttgtaaaaaccctagggagccagggccaacagcttttttttcccactttacttctctaaactgtgacagtataaacatgattttttaaaagttcaaaaaggaaaacagtgaattattgaatttctttccaatcctagtacccttccccaaaggtactgccaacagtttttgtatattcatacatttataagttaaatcatatttttccttatttgacatcatatctatgtttggtcttaattctgtcatctattgtaaattctccctttagctctcttatatggcctgtgttatctttaattttgtgttttcattttaatagttatcaggcttacagttttggtgattaccttcataactat

SEQ ID NO: 1882822 - DNA, 4001 bp, Homo sapiens
gagtggacagaggccaggcacgctgttaaacaatcctgtaatgcagaggaaaatgcctaccacacacaacaaagtattttccctccaaaaatgtcaatagggccaaagttgaaaatcttttaaatgtaatttttactttcctgacatgaaagttataaataataatcatcgcacttaagctttattcttatgtttagtcttaatgagaagaacttatgaataatttactaaaataatatatttggagagaatcaaaataataagacctgaaaataaatgctgattcagtaacccttttccctacttggagttcagtgatatgttcttactacttttccaaatgtaatgatgaacccatagggcaaaatgcagtccatttagaattacttatcatttggtttttagaaaataaacatatacaggaagttagaagaaaaataggcactattaacagcagccttgcacgctaaggaagataaaatgaagcttgcttacctcaagccctagcttaaaattactgtccagtgttccttttagacatcacatatttacttaaggtcacatagtgatccaaagctgtggtcaaaatgttgcacttttcaaatccatcacaggacagtgtatgataggaggagtcaataattatgccctgttgtgtttcctttgactggaagttcattagccagcatgtctgcattgctggtaaggttcttactgatagcacaaatgacattaggaggaaatgttggttctaaatgtgctgtgctataagctgaaactgaatgtaaaaaaaaaaaaaaaaggaacacgtgaatttgctattcattggacacatatagcgttatttttactgttttgaagatgataaagtgatcctcatatattcctagttatttgtttataatctctccacacagcagattaaaaatatatgttggtcaaaaataaacagttatattaaaaaggaaaaggtaaatatatttcaaaacgaaatataatggatataatgagaaaaagaattctgacttcaaaatgaagccaatattgggggcaaagtgggttgtggttaagaaaatggagacattttagctgatattagtgtaagatttttgcaattggtggtgaaaagtgaaaccataaaaatggggtatagcataaaagttggggaagcactgagtatatcaaaaaaatgataccttggtcatttttggtaataaggggagattaggacaatattgtggagagttcattttaattaggagacaaagtgaagctctttataaaaagagatatgacaagagttgggctctagaaaatatttttaaaattccagggtagagaaatcttgttttatttctctcttattttctagagacatgtgcagtactcaggagtagagtacaagtttttggtctgcttagtaaatgagaaaaaaattcaagttgggcccaaatgagttcattcataattatctttaatatgttagtaatctagtaactcactttaggctacattttaccatttttagaagcaaattatggtatgcagtataaatgcaaaagtaatgcaaaggaaatgattacatccatatctaccttgtcttaaaccatggtagcatttttaaaaccatgcatatagattatagctctaacagacacttcaccaaatccttactaaattatcttttggataccagttttacgaattaatctatagcctgactttattgaggtgggaggttttcattggaagcattaatttatataattaaggatgtttcattgtctaatgttcttggttaggactttataagcgccaacatgtgtctatcactgtatgagtctgttctcacactgctgtgaagaaatccccaagactgagtactttataaagaaaaaaggtttaattgactcacagttccatgtggctggggaggcctcaggaaacttaaaatcatggcggaaagcatctcttcgccaggcagcaggagagagaataagtgttgagcgaaggggaaagccacttaaaaaccatcagacctcgtgagaaattactcactatcacgagaataacatgggggaaaccgtaccatggttcaattacctctggatctctcccacaacacgtggggattatgggaactacaactgaagatgagatttgtgtgggaacacagccaaaccatatcaatcatcatgcacccaaatatgtatggttgtttccttagttttatttgctgcaaataatttggtattttggtcttctggaagcttctctattattgtctctcctccctaattcattcatattcccattgaatttgggcctcctatgtgcacaattatgaaccacaacctgataccacaacatttgctccctgatattaataaatatttttaatgttctagtgaataattattccaaatccaactttatgaactcggttctgattccagaactctgttctgagttcttgagatttggatttggaatcactattcgtgagaagattaataataatttctcatttagcaaattcaaaatttcaaacaataaaaattattttaaagagtgattttgttaaatgtagttttgacatgaaatggttaaaattataatggatatagatgtcagtaacaaaagcaaactctgacttgaaaatcagtttattttgactaatctgtatggattcatttaatgtattaaattatgtgctgattaataggatggcattagttctactatgttaaactcttcagactagacttttatatttgatgcttgcagttgtcttttcttcataattttacttgtcaaaaagtactgcttattttggggtctacttagaaaagtagtactgcttctgaagagcgtaacatttacttagaatatcccagatatgcagtatcaatagaatgtttcttttatttatcatgttattcaactgcacatttttcatttagcatgaagtctttggcttagggcataaaaaataaagaataaggctacaaaaagggaagctaaataatcacttaaaataatattttattatcactctgcttatggaggccctgatattaggtgaactatcactatgaaaaagggggaggacacagggttactgaaatgcatacaggctgttgactatttgtgtaagctgattatttttgaagttatcttagaggattattttaaatgttgcatgcttcagtaggtgcctagtaggtcctaattatttccaagatattttccttgatattttaaaaataaattttaatagatattcaaaatgagttactagtttttgtggctctttataaagtaactataaaatgcaatctcagatatcaaaggttagtgcactctgacaaagcttaaattgtaattttaatttgccctttctctctgaatctatttttaggaactgggacttgtcattactggaactcttccggtcttcaacataaccggccaatttgaaaataagacaaacttaaaggttaaaagttaattgataaaattaataataataaatgacaaactgtgacgttgaagctcaacatggataagatatttccataagaaaatacatgcagtgtaattgtcttgtgaggccagaggtcaaaggcaacagctgcctatgcgataaccacctgggaaaaaggaaatgcaggtcaaactctctgttgccctagagccaagattcaacttaactccacttaactatgacctgatgagaacacagagtcagactctgggagtaattatatgataaatggacagtaatattgtgtgcacattttaagaatccatctgagctattaatggagtttagaaagaaaaatccaaagaccaaaagcatggcgatgtttgtatcaggtgtacattggtatattaaatcattcctccccaactcccaaacaatagctttttaaaaattatcttgtaacttaaggatctgatttaaattaatatttctctttttttttctatttttagga

SEQ ID NO: 1882823 - DNA, 4001 bp, Homo sapiens
cagaggttggattatatggtcacaagccaaggaatgctgatagcaaccagaaactggaaaagacaataaatggattatcctgtagagactctggagagtgcaacgatgctaacaccttgttttaggtccagcgataccgatttcagatttctggcctgcagaactgtgggagaataaatttctgttttaagccacccagtttgtggtaatttgttacagcagccacatgaaactaatataggcccccagttagtattttcatgcagaacctctgaattttcaaaaatggattcctaatgttcaggaaatgatgtgatgtatatatttctgtttcttggatgaaagtctacttttataatgtatatgtttttatggaccctctagttgataaacttcaaccacaacttcttactctgcattcaaaaatgaacctgtattactaggttctgttgtgaacataaacccttgatccagaattttttgagactttgcttctgtctatcccattgtcatctattacctgaaactacctggctgaaggtggagagtgttttatattgaaggtgagagttttgggctatttttcaatagaaaaccaaactctaattgaatcagataacctgtagagggtcaattaagcgtcacaccacacttcatggaaagaacacccagtaatctctttggaaaatagtcttaagcagaattgatttattgtattgccacctctcattaaatattgagtcttggtattactgctcactcctattgcccactcctggtctatttgtttctcgctagttatgctggctcactccattatcggcagagatccagaactctacatacctcagagtgtaggctcagcctcccattggatttagagtatattcctcctcacctcaagtcagatacttacagtactcctggctgtaatttatgacttcccagggaaaatctcactcccatgcatgatggaatggtctttctccatgaacctgacaaagtagtcaaggacagcacagtattctgaagtagaagcagcagtagtagcactatgtaaaggcagtacactctggggacaggcagcatgtgatgcattcattgtagaatgctccattatcaagcaagccctgctgagttccagctccattagcaagtggcaaaagaagtagaagttgatattctggatgacaggaaagcagtgttaaactcccctcttgtgtagtactataaaattgtcataggcaaaaaaaaaaaaaaaaaaaaaagatgattttgtgtcatagtcatgatctaatgaaggccaggcctatgaataacaactaaatataaaatattcaaaaacagttttcaagagactgtttttttttcaatagaggaaataattatcttaactaaattataagcttaataagagaaaaaatagtttatatatcttaacaggtaaaagtattaatatccaatctgactttgccacttacttgctaggtgacattgggcaaattacataaggttttaaaacatctgttatttcatctttaaaatgggcatttactcaggattagatgatacatatggagtacatagaacaaaatctggaatttgaaaacaaataatgttagtcactgacgctattactcctcctgctcccactcctactactgtaacaaatattatttgatattctcatggtgtttagtattaatcacgcatgtttaagtcatggaattatttgcaaactaaaccaaattaagacaagccaagaaattaaagcatatttgttttatcagaaataaggtgtcagagctattaaaaagtaccaagactttgttttaccataaacaagtaatgaaataacaaaattcttaccaggaaatttagattacaatattggagctatcaaatccatgctttggaggcacaggcacaaccagtaatattaagaagtctgttgacaactatacttgatgttcttctaccataaacatttaaaaagaaagtactcctcttgcttgaggcactgtaaataaaagatatctgttaatgagttatctgaattcctagaataccacagaaggagggattactaaataacaagatggttattttgtttggtgttaatttccatcccccacccccaccatgccttcaatctatgtcaaggactatcatgcagggcaggaaaaatgtagcaagagaaaaaaaatacatataaacatattaaaggaattaaaccttttcatagtttaaatgcacaattatgttgcatttggactcttcatcatctggttcccaacccaacagtaatgacctagctttgttattctcccttgttcttctgttttattcatttttttcacacatgggcttacgcttataacactggcaaattaccttcttctcctgtgtttcatgccacccatgtggaaaattttcctgaatttgaaaactggtatttgccatgtcttgacagtaagtacaatgtcttaccatttaacttttttaagatttcctttttttgttagtcttatttaacttttttgactccctcaactgcctctgacttgcacgtttaaatttgtcattgatgctgttatactagattcagaattttaactttcatctaatgcattggaagaggaaaaaacaagaatgaaaacgcaaatatgatgtttttatattgatttatccttttcacatttactttttattgaatttcagttttagtaactattttgctatttaaaattatttggactcactttttttttaaccagttaccaaggataagtaatattgtgtgcaccatgacaaaattatacccattcagagcccaaagacgattggtgatgattgttttctaggagatattactggtagcttacctaatgaaggagtctaatttataatatttatgttggtagctcctttatattcattatttctatatttttcaaagtaattacccaagtaatacaattattcttattttagaaatgaggcaacttattgctattgctaaatctgacttcagagcttgttgttttcagtctcccaagatactctctgtcatggagtctgtcatgcagtaataaagaactgcaaatggaacaaatagatcatgtatctgaagccacaaaaaagataagaaatatgtgggcacagcacatgcctaaaaaataatgaccagcattacctatcgggtagtaatgatccagaagcttgaataaagtataaacttaaatggaattataaattccaaatcccaacaatggttcctcccaagccaataggccaacagaacaattcaagaacaaaaaccttacttaaatcagaattacatagtaatggttcaatatagctaattaacaaatgcattacctcctatggatttatacatggaaaacatcatgttgtatatggtaaatgcatgacattgtatctgtccatttaaaaaataaaaataaaagaaatactttatggtagaaaacgactacttaggaaatacttgtatatttattgttttttcttttgtttggaggctttcataagctcattcatcagtcgttcaattgatatatattttttgtgtccttactatgtgtaagttattgattattctaggtgctaggcaaagtgttagtttacatataaaatgtatttattttattcaaaataggaatgggtttctttaaaagatgttatactctaaatgtaaaatcacctttatcaaaaacagtagaagaggaccagagcccatatcttaactgcagtcatataaaaagaaagctaccagacaaaaaactttggattgcatcattaggtaatgtctgagtgtgcaggggcaaatataaaataaacagtagtaatcacatattcaagcaagcatcattgaaaggtagaaaagacagacctggaaaagtgcataagggtaagatcaatatagtagtatatattagtttacatcaaggggtggaaatgtttatacacagttgtgtgtg

SEQ ID NO: 1882824 - DNA, 4001 bp, Homo sapiens
ctttgccttccttaatacatggcttccatttccagtctgtatttctttttgccatttgccagacagcaagaagagggaagagaaagtgtatagcaagcagctttccttttaagggacatgatccagttctactcacatcttacaggacataactttttgatatagccttaccttgctgaaagggaggccaaggaatgtcatgtctaagtaggtcaccaagtgccctgctcaaatttgaatgtagagttatttcctcttactaaaaagaaaaaaaatacagaatgaaaactggagataaggagaagacacagtctagaagataactataggaaagtaaagagatggcgacgtatgtgaagttgtggtgtcataaagacaacaacaaaggagctaatttataggtagtcagtgacaagtgagcagtcttgagtaaagggagagtatgagtcatgtagatttctgcattccagacagagggaatagctagtgaagaagccctgaggcaagagcatgcttgtcatgtttaaggaacagtgaagtcacagggataaaagacaaaccagaagaaagtgatgatatgcaacaaagtgaatgagacatgtcaagagaggaagtagtcaagaacaacagaagttgcaagagtgaagctttggccattgaaactggcagcatggagctcacaggtgaccttgacaagtggcagtttcgtggcatggtgggcatgaaggactgaatggagtgaattcaagggagagagggggaagtggaattacagagagcaaatatgatcctctcctttgaagagaaaatgggaataacttgagtatgtgttgaaagtaaagaaccagtagaaatggagaggcaaagatacatggaagtgaagtaattgatggtgcaaggtcccagaagaggagatatacatggggttcctcctcttactctttgtcacctaaaagaaggtaagaatggtagtgaatcaagatgttggaggagggaaggaggaagcagtgggaggttgtgcaaattctagctaatagttttaattttcttttctgaagtaggaggcagtgtcatctcctgagtgcaagcagaaaagttgtcctcaactatgtatagtaggagtggataaggaagagatttgtattgatctgaggttttgtgtgggggtttgaggccagggtcaaaaccactgagaagattggcaagatagtgtttgaagtgatgaatactgtcatgtctcctctcagtaatacagcactttcttcagcctacattcttctaatggcaggattggaaaggcaatactttccccaaactcatcatcttatcaaaaccatctgccaccaagatcatcaggactaagctcattatgctgtttacagccatcaccaccacaagcccaagaccacccacttttaatcatgaacagacaagcaaagactgtcagacatctgaagactgcctcgaggtcagactcgtgacacctgaggcagcaccattcactcagttttgggaacaaaaaacttggaatcctctttcaccgtcattcacttggtcagtcaccaagctctgttcatcccgccttctaagtattccccagggcccccacttctctccatgcccactctccgtgccactggtaacctgcgtttctatcatccctcattctgatactctatccctccagctctctgcgcaaaaactgatcatactggccgggcacagtggctcatgcctgtaatcccagcactttgggagaccgaggtgggcgcatcacgaggtcaagaaatgagaccaccctcgccaacatggtgaaaccccatctctcctaaaaatacaaaaaattacctgggcgtggtggcgcgcgcctgtagtcccagctactcgaggtgctgaggcaggagaatcgcttgaacccgggaggcggaggttgcagtgaggagagatcgcgccattgcattccagcctggcgatatagccagactccgtctcaaaaaaaacaaaacaaaacaaaaaactgatcataccacttgcctgattaaaaactttcgatgactctaacattgcctttaggtaaatgccatccaaactcactaaactggtttccaacccgtttctgaaagcaccttaatctctccccacttcctctgctcattcatccatacctactgcctcctcactgctatgtcctctctcctgacccggcacttgctctttcccagtcctagaaggctcttctcttccagttcccactgcccttttccctttcctggctaatcccatactcatccttcttgtctcaacctagtggtccttaaggaagctttgctgacccccgacaccgagcgggcgtccctcctgtgtagcactgtgttagccctaccaagtcaaggctctccttgcctgtttcctgccggaaccatgtctttttacttcactcctgtctcctcagcattccagcacagtgctgggtacataacaggtgctcaagacaagtttgtggaatgactaatgagtgaataaatcattaaccaaacaccttggatctcctactacatcatttgcaaaaaaaaaaaaatgtttaatagaaattaaaatggacccagtgagctagagtgtgtgaccctgcttaaaaacgacagagtggttctgagaagcagtcccagcctaggaacccggggatccggcctgtggacccacgggcagggcctgcggggtgcaccggcgctttcgggcggaaggcggggcctcccggccagtgaccccgccccgaggcgcctcccgggcggggaagggcggggctcgcgctgggaaactccccttccaaggccgaggcgccgctgcgcgtcctccaggcgtggtggtggggtcgtgggtcccagcccagtggtccaggtcacgggccgcacggccgcggccgccatcttgcccgcgtccgggctcctgcggcgggcggggcggtgtcccggccggaagcggctgtgcggcggccgcgctgccacctcaggtcagtgagcgcgacccggttcgcgtctcgactctcgggagcgccgcggccgcagcgaggggccggagatagcctagttgaaaggcccgggcgtctcggcggggagcgcgttccgcgctgtagggtaatcgcgccgggcggccggccgcctggccgggcctcagcgggagccaccgggggctgcgggcggccgtgggacctgcggagacctcctcggggcgcagggaacacgctacagccttcgccgcggcgggcttgtggggagcggcgtcccagcctttcccgggaggctcagccaggtgcctggagcgggagagtcggactcagattcctgctttacctagaatagcaacgtgccctgttcccgttgtaccctcttaaatactatacttcttaaacggcctgtctcccggtgagctctgttctcttctcatatgagtaatgaaaattaagaggatgaatgaaacctcacacatgttgtggactttgctgaataggttagcaaatgactgcaggccttttgtatattttaagggaaatttggatatgtgcagtgcatctcctcgaagatgctgatggtggaaatttcttgaaaccgctctcgtaatttgccacggtaagaaaagtaaaagacaacatcaaaaagcatgtggttggatcctttgtacactgagtagtattttaatgtgttggacttcactgtccagtagccacatgggattgagatgtgctataagtgtaaaatacacatcggatttcccagagttggtgccaaaaaaacgtaaaaatcctcaataatttttgcattgattacatattgaaaggataatgctgttgatatgttggctaaataaaatgtgtttttaaatttcattccacctaattttactttttaaatgtggctactagaaatttttaaatcatatggctcacactgtatttcttttggacagtgctgttgcaaatattctggtgaatgaacacagaatcagca

SEQ ID NO: 1882825 - DNA, 4001 bp, Homo sapiens
cttgagtttatgcaaatgagatgactcaggctgggggctgaccatatcagaatgaccaactatgttattgcatgtgatataagctgtacctcttggtagggtggtgggtggtgggtggtgggtggtggggagggctggggattcagttcaatcatgtgaccaatgattctgaaactgatgcaacagaccactagatggtttttttggataaatatagaaattgacccttatggtcttaaagcttgaaacttacctatcttttatgtgagttcctcaggaaaggacccccaggcctctcaaaaagtatcaaagaggccagggacagtagctctcacatgtaaccccagcactttaggaggccaaggtagggcagattgctagagcccaggagtttgacaccagcctgggcaacgtggtgaaacctcatctctataaaaactacaaaaattagctgggcatggtatcatgcaccgatagtcctagctactcgggaggctgaagtgggaggattgcttgagtccaggagggtgaggctgcagtgagtggtgattgtgccactgcactgtagcctgggcaacagagtgagaccttgtctcaaaaataaataaataaataaagtatgaaagaactgaaactcaccagacaatgagagttcaagccctcattcatcacgattggtttcttaccccacctgagttcctgcttttccacacgtaattatgtttctttcctgctaaataaacccctaattttagttggtcggggagatggatttgagactgatctcctatctccttgactgcaggaccccattaaagtcttcttccttggcaataatgattgtcttagtgactggctttctgtgcagcaagcagcaggacctggaccaaacccctgatatttcaagttacagttcaatcaatcatgcctatataacaaaactccaagctgggtgtggtggctcacacctgtaaccccagcacttcgggaggccgaggtgggtggatcgcctgagatcaggagttcaagaccagcctgaccaacatggtgaaaccccttatctactaaaaatacaaaaattagctgggcatggtggtgcgtgcctgtaatcccagctacctgggaggctgaggtaggagaatcgctagaacccaggaggcagatgctgcagtgagccaagatcatgccactgcactccagcctgggtaacagagtgagaccctgtgtcaaaaaaaaaaaaaagaaagaaagaaagaaaagaaaaaaaccgccagtaaacattctggcaccaaggcacaggtgagcttctgtaactggcaattatatattaatgattcaaaaaagtaatgctcttaggacacagaagcttttgtgtttggaaccttcccagactgcattctgtggatctcttcattttctggtcctgatctatatcctttataataaaactataagtataaatactttcctgagttctgcaagtcatttctagcaaattacagaatctgatggggcaatgggaatgcctgaatttgtagccagtcagtcagaagaacaaggacctagcaatcccgggcttgcaactagtttctgaaggtgttactggtggaagatattgtgtccggaattggtgggttcttggtctcactgacttcaacaatgaagccttggaccctcgtggtgagtgttacagttcttaaaggcagcgtgttcagagtttgttccttctgatgttcagatgtgttcagagtttcttccttctggtgggttcgtggtcttgctggcctcaggagtgaagctgcaaacctccacggtgagcattagaactcctaaggcagcaggtctggagttgttcattcctcccagtgggtttgtggtcttgctggcttcagcagtgaagctacagaccttcgtgatcagtgttactgctcataaaggcagtatgaacccaaagaatgagcagtagcaagagcttttgcaaagagcaaaagaacaaaacttccacagcaaggaagagaacctgagcctattgcccctgctggctggggaagcctgcttttattctcttatctggccccacccacatcctgctgattggttcattttacagagagctgattggtctgttttacagagacctgattggtctgttttgacagggtgctgattggtgcatttacaatccctgagctagacacaaaagttctccatgtcctcactagattagctagatacagagtgctgattggtgtatttacaaaccttgagctagacacagagtgctgatcggtgtatttacaatccgttagctagacataaaggttctccaagtccccagtagactcaggggcccagctggcttcacccagtggatcccgcactagggtcccagcgggagccgcctgccagtcctgccccgtgtgcccgcacttctcagcccttgggcggttgatgggactgggcaccgtggagcagggggcggcgctggtcgggaggctcggtctgcgcaggagcccacaggtgggggggagggtgcccaggctgcaggtcccgagccctgccccgtggggaggcggctaaggcccggcgagaaatcgagtgtagcgccacagggccggcactggtgggggaccccgcgcaccctccgcagctgctggcccggatcctaattaccctcactgccccgggcctgcggggccggctggctgctccgagtgcgggcccgccaagcccacgcccacccagaactctagctggccagcaagcgcggcgcgcagccccggttcccgcccgtgcctctccctccacacctccccgcaggctgagggagctgcctccggcctcgcccatcccaggaaggggctcccacagtgcggcggggggctgaagggctcctcaagcacggccagagtgggtgccgaggccgaggaggcgccaagaaccagcgagggctgcaagggctgccagcatgctgtcacctctcagtatctgagttaccagcgatgaatctgtacaggtctgcagcaacatcagttcttgcctcctcagaataaagaatttgatggaggggcataaagcagaaaaaaaagagacttaggcaagtttcagagcaggagtggaagtttattaagaaggcattagaacaggaaagaaaggaaagtacacttggaagagatccaatcaggcaacttgaagaacaagtgcagtgctttaccttgatcctaggactttataggctggcccctttcccatgattcttcccttagagtgggctgcctgcatgtgcagtgcactccttgtgcttgggaagtgagcgtgcgtggtgtgtttagttgtacacatgcccatctgaggcttttttcccttttctggtgctgtgcccttggaaggtcatactctgccattttgtgtcttaatgtgcatgctcagtaagttccttctctctggcatctatattcagtggacacttcagtgcagtagctgtggatcatcaggaaatggcctctcccttgcactggctaccaatttgtcacttttagagagtcaatgtgataattgctgaaccatcacctgacattcctagtggctgggggagagccctcacgtgccccactcatgcctaactacctataacaaaataagggagctcttatggaagactgtacccttaacttgtgaaatttgacctcactctaggtaatgtcagaattgcattgcacacacctggcacattgtcagcaagttgcagaaaactaaagatattttgaaagctgtcagagaaaaatgacacattacatataagggaattgtgatttgaatgattgatgtcttctcatcagaaaaataatggagaccagaagacagtggaacaacatctttaaagaataaaacaaaactcaaaactacattaaattctatatccagtgaaaataattctaaaagaatgatggtgaagtaaaatacatttccagataaagaaaactaaaagtatatgtagccag

SEQ ID NO: 1882826 - DNA, 4001 bp, Homo sapiens
gatgtgctgcttcctatttgctggcaattatttctggattatataaacatgttaattaccagcaagtaaatcttgttttaaaaggcaaatgataagtgtgaacaattatcaaaatggaggattcccacttgtgtctctggcttaaagtctaattagtgacttgtagtgatccaatatttttatgtaaatataaaatctaatgatttgccttcttaaatttataaggtatatgagattatagatagctttataaatacaaattttgttcagaaaactggatcttattttagaagacatgctcttaacacaaatgtattttatgaattatcttaagcttaaagacatacaattattcacttttatttttaaagaaaaaagtattataatgcattgcaaaatatgtgctactgaaaatgcatcaatttttatttccctagccttacctcacactataacatagaatcagttttataaaggcaaaaatttgatttactgtgagattagtaacatggttttaaagtcaaaagatttatagaagtagtatttccaattcaaacagaattttgccaggttttaatttttctacaaagcacttaagtaaataattttgtgaaaagttttgctttaagatgttttaaagggtttcaagtattctacagatagagattttggggagaacaccaaattctttccaaaaagacagctatttcaagttttcttttactccattgtagaaagttttaaagacttttttttctccaaaatctaattttcacctgaaataattgtattcaagggtttctcagcaggtaaagtatacattcttacaaggtttcaaatttcagatttccaataatgcatttaaactgagcactcctctttttgtgtatgtatctactatctgcagttctattatttacactaaattttagtctttttagctcctctgaaatacgttagtgaaccctcagcagttactaaccacttaataattgtgagcccgccagccccttcaagtagatcgttaaccataagagtgcctgacaatttccaaaccatatcctctgtctaaaaggaaaagatagggctttgtgaggcagaaaggaagcgaaggaaaacaaaacaaatgtagctcatgctgaaagtgaaaagtgcttggatagattagtattttcttttctgcaaggcatcctgccaaactttttctttatttttttaagagaagagttattttttggtctgatttttcagtttcttggaaagtattggtatttaccacccccattggccgctcataattattgttggttgttttgtgtttttcccatccgtccacgtcacacagtgaggatgccccccgcttcaccctgtcaaaaccccaactctgggcgaccctgggtttggaaactccgccgactcccgacgacacgtcccactctctcccactaatgccgcttattttagtcgcaggatccccctactacagtttcagcgaaagccggaaattttcatttaactctcccccccacccccacccccaccgcgcccttctagcccccgactcgtagaagggagctagggagcccggagctcggagcactgccgggactcggccgcctcatttctctccggaaggctttaatttgcacactttcttgccactgcgccacgagcccccagccccgccggggggtgggtctccggcagagttggcttcgcgggtccctgcccccaccccgcacggtcgccccagctgcctccccggctggggcccccagcgccggccggagcccagcggcccccgtccgcccccagcgagcggcgcgggcggcgccctccgccgtccctccgccctccgccgctgtgcccaccccctcgccggagagagtgctggtaactccttccccagagtctgattacctgctccgcgaggccgcggacacgtgcggagagccgactgacactcgcagccccctcgggaggcccgacgcgactgggcccctcaggtgaggagctgtgcgctcgggtgggtgggctgcggggtggggggtcccgggggagatctgggggattggccggggtccgaggcagaactgtgggtggggtaagtggagggtggcggggggtgggggggacctgtgtttccttggaatcggctttggttaaccccttacgaactgagacgggattggttatgggggccagttttggggagctagaggattctccttatctgatgagagggggagatcccagcctagggacacccgcgacaccgagatcctgcttccacgtatccgtacgcacacacacccacacggaacacgcctcatacagtttctccaaacggaactggaactctactcggacactcacataataattcacatttagggtttaaaatgcactgcctctagggactccatgctggagaatgtgcttgcatttccccctcgaaaactccctctccagctcgctgaggtgtgggtgtgggctccaccttcccctccacgagataaatgttaacgcaggcttcctgcgggcgtgttatacacagaaaagtgcacgcagccggccagtgcccaggcttggagccccgcgaagacgcacgtttgctgtagtttccaagtttacttttataatttaaaatattggagttaaacacacgccccgcagtgagcagccctggtccccgcagcgcgcccgtccgtgtgcatatgggcgcatctgcgtgtgcgcacacgcgggagtcgcggtccccggtgtggcctcttgtcgctgtgctggtggcgacccttgtggtgcttggcaggcttcgggagaggcgcatgaaggatttcattgagtgtgaagacagagagcagagacagaaagcagaaggaggcggctgcagcctttgtagtcgcggaggaatgcggaaatgttgaagcactatgtcaaactttttttgaaatggggtcaagtcacattcagccagcgtgggaaagcaacaacaacaacaaaaaaaagtggaggagagggggggaaaaggcattgctgctcccgtttctctccgccgaagccgaccgtctggggggcgagtggggggagagccagggcagtgcggggcccggcgggggcagcaggcgcagttccctgcgggggtgggacgtccccgacgcttccttcgctgcggagcccggggctagactcgagcgggagggggttggggggatgcaggacaggcgggttgggcggccggcggcggctccccggctacctgtgtggccctcgacctggctcagacccccgggcagtccctgggggctctttcctcggcttttaaggaaagttctgaatgtagtgagtgccagaagctctgctctcgccgcggtccgctccacccgctcatcgtgggggtcgcgccgtttgtttaattcctggcaaaaggcgagcgggccagcggttgcgaggcaggtaattccgaggtgccccgggaattccggacatgcggccgtcgtggtgaaagtcctgccgaggccgcggcggccctggaggagggaggccccctaggtcccagatagctgctgaatggggagggaaagttagggtaccctactctggcgctttgttgtgcagagggctccgggggcgtccggctgcagactggaccgggcctttagccggagggggaatggggcagccacctctgctacctacagcggggaggtcctgggaatgggaaaaggttcgcgagtccgggccccgaggacagagaccttctctctcacccctggaggcgcaggatttaaccccccaccccccaccctttgaaagggaggttgagttttgctcaggtcgaaatcagtttaaaacttaaggacgaggcgcgattatgctatccccttcctgaagttattctttaaggagacgacaagcgaaattgtggcgaacacccctttctcccacccttgggatcccgtgggggacggtgtctcccctcccccaggaccgctcgctcg

SEQ ID NO: 1882827 - DNA, 4001 bp, Homo sapiens
gggagggctgatggggattgagtgtttaatgaggacagatttttccagatgggaagatgtaaaagttctggagatggatgctggtgattgctgcacaacgaaggtgcataatgccactcaactgtgcacttaaaattcatcaaaatggtaaatttgatgttatacatatcttaccccaagaataaaaagaagtctgatcatagcacttaccttgaaatggtgtttggagaaaaagggcatattgtctgcatggtctggaccctcctcactctggagccggcagcctcccgggtccagctcccagcaatgctgtgccgggtggacagagctgaggttcatggtcactgagttgctgcctgaagggctccagactccagatccttgatctttccacgtggagctcatgagagctcctggatcttcaccggggaggtgctatctcctgccttggccattccaaggttggttttcccaacaaccagggggaaggtgtgggcgaacctggcagcaggccgggcctcttcctcaccagtagcaccagctccagactcccattctccagtgtgaaagacaaatgtcccccaaccctaacgccacccacacatctgcacagacaccaggcttcatggagcgcaagacgactcacacagtggcccaggccttgtcacacgcagtgaggacaatcagaggagcacggtcaccgctcaggcctgatgccagcaggacacccaccagctgccagatgagcacgcaatcactcctcatttgcaaagcacggctcccatcattccagaacccaagacactgtctcacaaagacagctctctgcaaggaactgggaagtaacttgagtccagtcagaccggcaaaaatcagtccctcggccttgacctgtgagcagcatgtgggcttggaatcaggctggacgggcttccctcccagtttctccacagctgctccaggcctgggacaagcttctcaccttctgtgagctggaaaccccctctctataaagtggggaaccacccctctgggctgagggctggagcccagcacagagaccttgatggtagctgccagtaccgcccactgcaaaccagcctgcacccaggccataacccagcaacacaactgcgatctcaagctgccaagggacatcttgtcaaggccctttcatttgaccctgtggtgggatttgggtaaactcagctgtaatcatcattccgtggtagcctggaacaatggagggtaaatgaaaggcaaggagagtcaagggctggagaaggttctgtggcctgcggcagaggtccagagagggctccgtgctgcccccgtcccctggggcctgtaaagggccatcttcctcgaagaagatgtttctgacatcatggcgtgtgctccttggggactgcccctcccacacgagggcaggcctggctgaaggtacacactggatgaaggacaatgaggaggtagagctgggtacagagtgcttcatgctgagcctccgggcatgcttcgtgtacactccgcacactctccacacacacacgttacatggcagcagtcctgaaacacatgaagatagctgagggctccgagagtctggcatgccgacccgctgctgagatcaggccgccattctgagagtcccgcacgccgacctgctgctgaggtcgggccgccattcctcatcaacttgactgaatatgctctgagctggcttcccaggtgccaagtcatggcctcccctgtgatcacagcagcactgtgcctgcccaggcagcgcacgctgtcaccaagaggctacgctgaggagcccacactgtctctggggcctctggttcccaaggggctagggacattgagagggaagaaacccctcatggaaacaagcattttaacataaacaagggacaataaacccttttataaaatatttattctaaaaaaaaaaatcacactgtacaaatttagatagaacattatcaatgctcagatttataaaaatgggaacagaaagactaaagctagcgaaggaacgtacatttctgttttgtctttttaaattaggaaggtaaaagtgattttttcttcaggtgcagtgatagtaaatgtctagaagacatccgaagagccagaaataaaaagcacaggagccgcctgcagactctcagagttctgtcttcacccactgaatccgaagtggatgcgtgtggcgctcccgcagggtggcctggccccgtggatccacgccgaacgctcaacgagattcccaaggctggctgtgtacagcctaaaactttgtgctcagagaaaaaccagcatgatgggttcatcaactcctgtttctcaaacaaaatgagttttctgtacacttgttacaaaggtctgtacaaaagcacgaagctgctgtgaggtgttatttccgaaagagttaaaaatggatggaagggagctgttcgtacagttccgcctgtacattcacagagggaggacaccataaaaaaaggactcactcagaaattccagaccggagaatcctggcttcttaaaagattattttgaaagcttggaataagtttcagctctgccatttccaaccgcttcgcccagcatcgtcatagttcagcttcctctaaaactatattctccctttcttacacgcaaactaccaggaaaataaccgcaacccagtgaaactatggggcttctgtgaatataaggaacgaggcagggagaagtcgtaaaagctgcgggctcagagcccggagcgcccttcacattccgggtggccgtggcggccacagtcacagccaggggtgccaggcggggtccatgcggcacagattgtccaggctgtttgccgcggccaccagggtgttcaccttgctttccccgccttcgaactgggcgaggttgtgcaggcgggtcatgatggcggtgacggctttctgaaccagggacaccagttgctggctgtccatgttctctggctgcccggcggccgagagaggagaggacgtgtcctcttgtgtttttttgtgccaagcaatgatctcgtcccggagaaccgttttcagaatgccatccacctgcgtgagggagagaacgagacgacttgtgtttaaccaagaacagcccacaggggcagcttcctaacaaggtgggactcaaccacagcggccgctcagggccaccaagggccagtcgagtttcagcaccaggccaggctgtgtgccctcaggacgggctggggaagccgctgggggacaaaccccttcctccacttggagcagcagccagaaggcctcagtgttgggcagcgcggacctagatgacaaaggcagccatgctgcgactgaggcccaatctgtttatttgttcacttgacaccttccggcatctgccgagtgtcaggcaggcccgttccaagcactacagacaagagtgaaccaaagagaaaaccatcccttgccctcacagcaaaggacataacacacaggggtgctggccactgtggagagcgcagagcccgtgaggcacatcagcagctcctgcaaggccgtgacgcgcgggcatctgagtggctctagcctgcgcctgtgataggacgacgtggagacccaccttaaagtttggctgggcgaagcaccgggcgaccgcaatcatggacgctgtcaacgggccggagaccccgatggtggtcagaaactcagaaatgttgggcgtgagtcgaaatgggacaggacggttggcatccaggtctccagtcgcgtcgtttatgtcaaatcgaaagtaggcaacattcagtttgccagtgtcctaaatttcagaaggagacactttaggaacttcagcagaaaggcgatgtcacgaggagaggatctggctgttcaaagcaggttacctgagcgatctgtaacatctcggggttgagtctatttaaatgcaggacgaattccgcgaagcctatcagagccagctggatggtgaacatc

SEQ ID NO: 1882828 - DNA, 4001 bp, Homo sapiens
atggttagaactgtggcagtttctgaggtgttagagttcaggttcaattcaaagcatcaatgatgctcttcatactagaccaggatctgcctctgtaagacagactcaattcccttctcttctttttttgcaacaaccacagccattaccccagcctcaaattcatatccattggttcagaagccctaaggaagggcattgatttcagagaggaagcccaacatgtgcaggattttttgccctggatccagtgatatctttgagaatcagaaacacttattctaatgtattttaatttacttttcaaatggagcatttaaacaaaaactgtttattgggttcaaattcagagccaagttgtgtgtcgagagagtcttaatttttcataacaggacatgtttggctctaatgtgtgggttatgagtcaatatatcaaatttgactaaagtatttgctctaagtagggagcaagccatttagcattacaaatcctgaactttttgcaggaaggagggaaataactttgatttctaagctctcttattaagatgaatcaaagttgatgaataaactttctggattgcttaataccttccagatatcagtatcaaggccttggcaaggcaggtgaaaatatttccatgagcaagaagcaattgagaaggacttcctctgtgggataaattcttggtaattcctgtgggaaattttcctttatcctaacatctttttttttttttttgccttgcccaattctcagtgtttttaaatacacaaaatacggctttctactaaaaactggtaaatgaagttggaaaaatacaaacacacacacacacacacacacacacacacacacacacacacggtagcccttttattgcagccatgtacgtagcttcgctgaagagttgacaagatatattgtgcagccacagagagacaccacatcttccttcctcccagcacaacttgtacagtgattaaatgtgattaaagtctcaggaacttggacacagtcatatctattttggtaccactgtcttgatccatccctacagccagaagggaatcaccctctttgtgtaaatgtttgctttgttggaaattctcaagcagaaattaatagtatacatgcttcaggaggagtagtaaatcaagcatgataaacaactcctaggcagtgtttagactggccaaaagtcatcttaagaatcgtgcacaatgatagaataccacgtttggcatctatacaccagaactatctataaacaaaaagcaaaatggagatctgtcaattaaccaactagtctgattaatgggatctgtcagcataggtggataataaatgactagaaaagtagcaagtctccactcattctatgtggtgtagacacagttaaatgaatcatgaatgtttagtgctctttatagcagttagcgaacacacttggaacttgtctcgaaattagttttgatctcttgtttgaagtcagatgccaatattctagacccctatgacatcatctattacagactcctggttatcgaagagttgaaactagtcagatagaattggcatgaaaagaattttcaacagaaaacaatcatgttcaaggaagccaagtctaggatttcaggagctcaaagtttcaaatatttttataaaaacatacatacatacacacacatacatacattcatgtggagagagaaaatgaaaagcaagaagaccttttcttccttagtccaaatccaatttaataattatccagggtattctcagtaaaaaccaggtatttatgcctctatatgtatgtcaccaaaatggagccagcttacctgaaggtcctctgaggctgtcactttcctctagtgctgtcccataaacctgaaggatatacaataacaaaggggacaattccgtgggacgaaaatcttattttaaataacttctctatactgacttcaagccaaatgaaaaaactacagcttttttggaattttattccatttctgttgtctgattcataagtgttgttaaatatttaccaggaacctgccaacagtttctcaacattagttaatcataggtaatgctattccattaacaactcaataaacttctttaaagttgtacaaggtaaatttcagtaccttaacactgctaacccatccttgtagaataaatatttgctttgagtttctctatgccaagatttatgggatcaagtaatctaaatctccttttgtaaataaggtgtgccctcaagaggatgagagtgcagactctacagtcttgtctgccttctctccacaggtccttgaataaagcgttccatgtctccagataaacagacttggggcacttctgaccagtatcccagcagcagaggctttgggaaatattttcaagacggttcaagcctcccttccacagattctctcacatctgccagcctgaagtgggctgtgttggttcatgtctaccaggacactaaatggctgaaggccattttttctattctaattattgttgcttctttgtaacaatttttataaaagtccagcctaatttctttcccagcacacatgtatcttcagacacacatctaaatccaggctttcatgattaatcctactctgagtcagctgggatagagctctgatgatgggatatcctacatggtcattaactgctgtttgcacaaacacatcactcaacgtgacttccactggatctaccttgtatgcagagtagaaagctgcttgtatggagtgacttctctgttgcctgaccaaccacatgcaaaaataacctttccactcactgatactgaattctaccaaagaagacaagccatccaatcaacaactctcatagtaaagcacatggcaaacattataactgtattactgtattataaaactgtattattaaagtctactcttacagaatactcgaggaaattaaaaaatgacaaattctcatttatgtacacaccacttatatcaggttcttctggagaatatattctgtttgacggaagaggaaggaagagaggataaattatgtttattggagaactacctaacccagactttgtactaggtgctttttgaaaattatctctttaatttctgcaaccacaataagccacagataaccctgtctttgcttcagagatgattgtgcccagtctcataggagttaagcaatttttcccaagtcctatagctggtaaataatcagtttaagattcaagtaaatcattttatcaaagcaacattgaggcaagaaagaagagtatgatatacaatttttaaaagcccagacacccacacatttcctgtaaggaaaaaaatgtattgatgtgtatgataaaaattaggccctcagctccttgaaaaagaattgtttgagcccctgtaaatctttacccagttagtgttcaaataaatattcctgtaaagatatcttcagggtgagaaaagccataaacaaactccattgtcatttccagcatttaaatcaggactaatcacaaggagccagtgttagcccaatccccctcacctagttcccctcactctttgccaatacgcagtttttaatctgtttcaggaaggagtccgaggcggtttggaaatacaaattaacctgaaactacttcctaaggcattaccagaaatcacgttttagatgtcaagatgacttgcattgttctaaacttccaggctgtgccaatggccacaaaggtaaatggggcattgggacaaccatgtgaaggactaagttgcaacatgaagcaagcacactcttccgcatgagtcacctgaaaatgaaaagagaagaatagctggaaaagatgatactgtctgacaacagcatttcaaataagacacaaaaaacttgtctgcatttgctttcaggtcatgaaataccacatgaactgaatgtttgagaacccattagctatggatcaccctgattcaacaac

SEQ ID NO: 1882829 - DNA, 4001 bp, Homo sapiens
attaatccccactatcccttcccaaaattctctggttagctgacatgttaataagattccaagaatgttctaaagaaagcaaaatcaccacaaaaaaggactgtgttctgaaagtaaaaactgtgcttttttttccttctctcataatttatttttaattaaaataaattctgtccttgaatgtgtatacataattatttggtcaggctgtgttcccttataatcaaatataaatactgaaagccgtacagattattcctttttttttttttgagacagcctgtcacccaggctggagtgcagtggcatgaactcggctcactgcaagctccgcctcccgggttcacgccattctcctgcctcagcctcctgagtagctgggactacaggcgcctgccaccacgcccggctaattttttgtatttttagtagagacggggtttcaccgcgttagccaggatggtctcgatctcctgacctagtgatctgcccgcctcggcctcccaaagtgctgggatttcaggcatgagccatcgcgcccggccaagattattcttaaacgccaatttgaattaccattgccagcataccaaatatcccagggtgggtatattaaaagccctaaaaagattctgcttttactttttagccaaatggacatcttttattcaggttcccaaaacaaaatccttctttggcttacccacatttctttgaggctgtgtgttttctttctaaattctagcagccttaatggccctaatgtggcttcttcttgctccatcctcatctcaaccttgaatcttttatcctttcactccttcacccctgctatctgcacctattcagctcccacccatctaagagcttcagtgctttgtgggatcaccgcttacaccccaccacaccaggacaatgcctactcttccttgaggttcattatttctttccaagaacaaatttccctgacccacccccacttccagtttcacatgatggcatctctacgtttatatctcgtagcatcacagcctctccattgcaactgttagtatgcatgccattttctatttaacggtgtcattttttaaaattatctattacttagcactactaaagtcagagttcatgctggttttttcccattagcctcaagcatctatatgcctgccaaaaaatagacacatatactctacctattgactgaatgacaataaatgaatgtctgtccaaatacacacataaacactggcaggcaaccagaggattgaacagaggagtaagcaaaatacatctctttgtgaactttgtcagccattagcatttatactgacccagggtcctatacaatttttgtcctatataatcaattaggctgtgctttataaaacactgtggtacacacacacacacacacacacacacacacacacacatgtgtttgcatgagcatgccaacataaagatatcagtgttttcggtggttaagacctctctactcaacagggtaatcaagttaatcaagtttctggtggtggtggtttttaataactcgtattattaaaaatctccaagagctaaagaactattttacattacaatcctgcagaaaaagtcccaaattaggcaggattagagaggtcccaagatgctgaagggagctgatgaaaacactaggtccatgcatgcagacaacagatttctgataagtcatattttccttctgtcagtctttcaagagacgatgaaaaagagtagcaagtctcacttaaaatgaaacggcaactgtttccctgtaagtcttaacacgcattttgtttttactattctgttatgcagtatgattttttaaaaagaaatagaaacaggtttttcaagcagaaaacctactttgtactggctatgtagcctcagacgttctctccacttctgagtttctccccatgaaaaatgggggtgatgctggtgaaccccactgatgaactgaagaggtcaggtgtggaaagcgggcagccgtgactggccacagggtgtgtgcttgcttcccctctttctagctgcctcctgggaacactgccttgatcatgttgatagtctctagtttacccagatatctgtgtgatgtaattattcaaacagctttgacttagtaaatttaaaataacactgaaagagagagagggcacttttcttttttctttcctttctaagaacaaagcagcctaatacttgtatttgaaacatacacaaaaatacatatttgaggataaaacccatcttggttatcagttaggctgtgctttcatcaggaaaaaaaaactggttttgagcatgaagaaaattaatataatgcttttctgagattctttctttcctacacacacacacacacacacacagacacacacacacagacacacacacacagacacacagagacacacacagacacacacagacacacacacacacacaccattacctcattttccctcccatcaaaaacacacgctttgtttctatacttcctcagaagtggagaatgcagttactctcaaaacctccaaagaatttactagtattaaaactccagttaattctctccagtgtttagtcacagggtttttcattctgtccaaagctgactgaaggtcttgtaacacatctctgtagttatttccatagtgagcactccaggtatacagaaaatcataggcaggtttccacatcatctataaagaaaaaaaatagattggagtagtgtggaagtagaaaggagaggaaaatcgtttttaaaaaaaagatgtaaaaagcctcttaagatttaagataaaacggaataccaattacacatggacttatttgatgtcatagaaaatatggtttaataactatcagcttcctgttatatccctgtgtttttaaaactagagattttaaaaataataactacaaatagggccttttttcccttgatccatcatctatacattgctgttgctttcatgtgaatataaaattccttgcacaattttttgatggtaacaaatgttattgagataggctttttactatttgagagacttttagagttaattattattattatacctatctgtggtgagttttatgacaccaaataatgtatcaggagagaaatagtatatttaacattttaaattattttactcgagcaagtctataaacaagcaaaaatctagcttcttgatcaagtcaagatgaaagcaaaaatataattctctaatttaaaatatttatttcatgatatattttatcatcgaaagaaaaaccaatactcagtgctgcttctttttgcttttcctaagcacctacccataccaatgatgtcattgtttccatagaaataaatgtacgtcaaagagaaacttcacatacaagcatgcatgtaatggtaaccaaggcaaccaggctagagggagaatagagacaaaggcagaccaaataagacaaattgtagaatacacacacacacgcacacacacacacacgtcacacacacagcaccttaaaatgaattttctctagggaaacaacaaaatgaaccctgcacttgtaagtggaatatttgaaatataaactttattatttgcttattttggggggttcactgaactaatttggttgtgattctatcacttgcaaaatgtaggaacatagactccgagctaaatatcatgcagaactgcccttttaaagtagaacctctatcacagttcagtaatatcacatgaactaaagccttggcatataattttcaccatcctccaatatcctcatatagtctaattttaaagttaaaagaattaaagacctaaatagggagttccattatgtatttgattcaatccacataaaaggctctaaggacaatttaatgttatttgtccaaactggcattcctgggaagccatgaacagccatttcctcatctctctcgacaaagcttaattttgcaaggt

SEQ ID NO: 1882830 - DNA, 4001 bp, Homo sapiens
tgggccagtctttgagcccaggagcggtgtaggctggctctggcattaatgggttcaggggagcaatttggagtcctctaggtgctctgctcgaatcctggtagtggcagcccctgtgggcggcaagctacccaggcgccgaggcaagagaccgaggacacgagctgttccagtacaataaaatataaaacaagaatagttataccagatatagatcttagagatgattatatatgaatatcattaatcattagttggtagtaattaatttatcccaatattataataatccttgctctaaaatcataacctaggaaaaaccaggccatacagagataggagctgaggggacatagtgaggtgtgaccagaagacaagagtgcgagccttctgttatgcccagacagggccaccagaagggctccttgggctagcggtaacgccagcttctgggaagacgccccttgccgagcggacggtagtctagtggtagcctcagtgtcaaggaaaaacacaggctacttagcagaccgggaaagggagtctccctttccccgggggagtttagagaagactctgctcctccacctcttgttggagggcctgacattagtcaggcttgcccgcagttatctggaggcctcaccatctccctgtgatgctgtgcttcagtggtcacgctcgtagtccgccttcatgttccatcctgtacacctggctctgccttctagatagcagtagtaaattagtgaaaatactaaaagtctctgatatgcaaaaataatggcgtaagctgtctttctctttgtctctctctctcgctgccttggctgccaggcagggaagggccccctgtccagtggacacgtgacccacgtgaccttacctatcattggagatgactcacactctttaccctgccccttttgctttgtatccaaaatataacagcgcagccagacattcggggccactgccggtctccgcgcattggtggtagtggtgccccgggcccagctgtcttttcttttatccctttgtcttgtgtctttatttctacactctctcgtcgccgcacacagggagaagccccccgaccctgtggggctggtccctgcaagccccagctaagctcgtggttgatcccaggccctggagcagtgagtgtgatgtggatgaggacagttgcagttgggtggtatcccacaggctgggtccctgaccccagaccccggggaggagtgttcagccgccaacggtggcggaaagggcagaacagccaccaatccccaggcccctggccctcctgctcaaggtcctcaggggacggagccgccagtggactgtcctcaggcccccggggtttgggctctggttgtgacagacagggaagggctgggccccaggcggcggacggaaagctcaggcggggcagggcgggcgcgcagttggctcgtgtctgggtcccgcggcagcggcgggattatttgtcctttgggactcctgagagcgcctggcctcccctctccctccctggccctcagctggcggcggcggtaaccgcaggcaaggcaggagctgccctcggggctggactctcggggtggcaggggctgcagctgcagctgctcagggcaaggaagcccgtgggctccacgtgggctccacgtgggctcctgcaacgccgctggggaatctctcgcccgctgccccctattctggaggtccgcgagggtcggggggctgtggaagtccctgggggaactgcatagccccggggtctctcactcaccctttccccgcgcgcgggagctgcaggccgtccccgccgatccaatttctccgcgcaggctgcctgggtgcctctgctccgctcctcgggctccccgtggcttctcggctgaatcccgcgttctcttagcggatctgctgcaagtgtgaaaacctaccggctccttcggttcccgtcagaggagaggtgcgtgccggctgcatctaccaggccatcttgagcctgtagtcctaggtggaaacgggccccaagtgcgcgagttactcaagggcgttccctggagggtctgggtcggccccgcccccttcactcccgggaaggccccgccctccccttccagactggactgaaagctccgtgtgcacacaggtgtgttagctaatagaaatgggagcagactatttacacttttccacaaaagtgttcatttttcacttttttttttttttttgagacggagtgcagcggcgcgatctcggctctctgcaacccgggtccagggtcaagcaattatcctgcctcagcctcccgagtagctgggtttataggcaagcgccaccacgcccagctaatttttgtatttttagtagagacggggtttcaccatgttggccaggctggtcctgaactcctgacctcgtgatctgcccgcctcggcctcccaaagtgctgggattacaggcgtgagccacggcgcccagccatttttcactttctatactggggatttgtgttagtactcacagagccaccttattcttttttttttttttttttagacggaatctggctcttgttggccaggctggagtgcaacggcgcgatctcggctcaccgcaacctccccctcccgggttcaagcgattctcctgcctcagcctcctgagtagctgggattacaggcgcacgccaccatgccctgcctaatttcgtatttttagtagagatggggtttcaccatgttggccaggctggtctcaaactcttgacctcaggtgatctgctcacctcggcctcccaaagtgctgggattacagacgtcagccgccgtgcccggcctgccttattcttttttacagctaaataatatcaatataatcatctatattggaatgtcacatattgttagatgtttgaaaaatcttttatgttgaaatatgcatttttatagatggcctttgaacagtattgaaaaacatgatttgggggtataaatatgtttaaatgtgaaatttcagagagatgatttcaacaatcattcctttcaaaggtaaagatggggctgagcacagtggctcacgcctgtaatcccagcattttggaaggccaaggcgggcagatcacctgaggttgggagttcgagaccagcttgaccaacatggtgaaaccccatctctactaaaaatgcaaaattagccgggcgtggtggcgcatgcctgtaatcccagctacttaggaggctgaggcaggagattcgctggaacccaggaggtggaggttgcggtgagccaagatggcacattgcactcccgccccggcaacaagagtgagactccatctcaaaaaaaaaaaaaaagaaatgttttgtttttatattataaacctaaaaatttagtcactcagtattttttcatatttaacaatactgctatcttgtgacaaactatccataacataaaatttgccaatctaacctttattttatttttttttttttgagatggagtctcactctattgccagtctggagtgcagtggtgtgatcttagctcactgcaacctccacctcctgggttcaagccatcctcctgcctcagcctcccgagtagctgagactataggcgtatgccaccacgcccagctaatttttgtattttcagtagagacagggtttcaccattgtcggccaggatgatctcaaagtcttgaccttgtgatctgcccgcctcaacctcccaaagtactgggattacaggcatgagccaccgtgcccagcctgcctctttagcctaggctggagtggagtggtgccatctgggctcacttcaacctccatctccttggcccaagccatcctcccaccttagcctcccaagtagctgagactacaggatcgcaccaccacgaccagccaaatttttactgtagagacggggtttcaccatgctccccagactggtctcaaacttgcgagctgaatccatccacc

SEQ ID NO: 1882831 - DNA, 4001 bp, Homo sapiens
attagtgggattgtgaggaatgcttgcttccatctctttccccacaggagttagctgaaattccccagtagcctcataacacaaaggtagcccctttcaattctaagagggaagaaataggggttttccaggggaaagaagaatcccctgtctcttctacaccattgttcaaaatcataaacaaagagacaaaattactcaggttaggccatgtattttgtactttacaccagaacacataccctgccatttcagaaactacatccaggtagtccatttttatcagttttgtgcattaatttcattcttaccgaacagattatggcactttaaaaatgttcttcagaaagatttctttttcataggtgtctctggtaatacttgcttcttgcttttcacattttgccacttcttccaacttcaaaatctaaattgggagagcaaatactttggttagcacagacaatattgccagacagggaaaatcatttctgccaatggaaatttatgaaacccagaggggaagcacactcctattatgtttgagatggagagtcatcaaatagaataatctataggaaagaatatagaaaatgaaaattgttagcagtcttcaatatcaattcattggcatatatattagggcatattttggtaccactgaaaaaaagacttaaagttgtataaatgtatggagcaaacagtaggacaatggtcttacataatattttatctacactttaaaaagcattttgtgaaaattttattctcatcctagagtctttgtatttattacgggtataagaagctattgacgacccttacaaaggcttatttgggcatgagagggttctggaaagatggcagaatagaaagcaccaggcatccatctccccagccaggcatctacagtggcagaatctgttcgatgtaaccattttggaaatctggaatcgaaggtttgcaacttccaggagaagacatggatggtaaattatggttaacttcagtcaatgtcagcttttagcttgacagcagccacccaccccatacccccagatttgtggcgggcagctgtgcatgtgttcttggagcagcttacacaggacttgcaggagccaaggtgggcaataaggatcctatcctccaatactggagatctgtgttctaatcactgatagctccttctgattatggaagtacaaacaccagagatgggcatctgttactgttgtacttctctgaacttttggaagcccttttccctccagatgaagtgacctccaggagatttaaagggtcagtatcccattccccattcatttgtctcttctttcccttttgagagccagaaaaactaggatattcaaaagcaattgcatatatgtggaaaattagaaagtcaccataatgctaggaacaggtggaggctcagaaaagaccttgtttacacgtcagccttatcctcagcacagtaacagcctacaacactcaaatcaaaacaaaacaaaacaaaaatccgtaagaaacgctgaggaggggaataatctgatttccagaattaccacactactagatttaaatgtccagtttaaaaaaatcataagacaaactaagaaacaggaaagtatgtttcattcagaggaaaacatgagccaacagaactgatggcagatctaccatacaaaaactttttaaaaacagttgtcttaaagatgctcaaataactaaagaaaaacctggaaaagccaagaaagttgatgtatgagcaaagtggaaatataaagagaaaggaaatctaaaaagaaactaaaaagaaagtctgaagctaaaaagtacagtacaatagtcccctagttatctgtagctttcttttccagtttcaattaccttcgatcaaccatggtccaaaaatattaaatggaaaattccaaaaataaaaaacttacaagttttaaattgcatgctattctgaatatgttggcgaaatctttcactgtcctactccattctgcccaggatataaatcatccctttgtctagtgtatccacagtatactctacctgccgtgagtcacttagtagccatctctgttatcagattgatcattgttgtatcataatgcttgtgttcaagtaacccttatcttacttaataatggacccaaagtgcaagagtagtgaggctggcaattcagatataccagagagaaactgtaaagtgctttctttaagtgaaaaggtgaaagttcttggcttaattaagaaagaaaaaaattgtatgctgaggttgctaagatctgttgtaagaatggatcttctaattatgaagaagaaaaatacttgtactgggtttgctgttgcacctcaaactgcaaaagttgtggtcacaatgcattacaatcgtttagttatgatgaaaaatgcatgaaatttgtggatgaaagacatgaacagaaatgtgttctgattgatgacaatggggtttggtactatcttcagttccaggcatccactgcctgaaacatctcccgtggaaaatataggaccactgcaactcagatgaaaagttttctagagagattccaaggaaggtttgagaagtcaaaagaagtaattggtaaacatgaagatgggatcattgaaattattgaatctgaagaacagaaatttaaaaagtaaacaaagtactaaggaacctgtggtatactatcaaccggaccagcatacacatcttggatattctagaaggaaaagagagagataaaaagtcacagcatatttgaaaatttcctgaatttgatgaaggaaataaatacaaacatctaagaagctccacttgtataaagtacttatcgtagtcaaaatcataaaatagaaagtaaaaaggtggttgccaggggctgcgggaagggagaatggggagttattgtttaatgggtacggagttacagttttacaagatgaaaagaattttggagatgaatggtgttgatggttgttgcatgacaatatcaatatacaattgattcttgaacaatatggagattaggagtgctgacccaaaatatacccaccaacacagccaaaaatccagatgtaacttctgactctgccaaacttaactactaatatcctgcttttgaccagaaacctaaccaataacataaacagttgattaacacatatgttgtatggtacatgtattacatactatactcttacaataaagtaagctaaagaaaagaaagcatttttaagaaaattataacaaagagacaatatatttactattcattaagtggaagtggatcataataaaggacttcattgtcaatgtcttcatgttgtgtaggctgaggaagaggagggtgaggaggggttggtcttgttgtctcaggagtggcagaggtggaagagaatacacatataagtggactcacatagttcaaacccatgttgttcaagggttacctgtgctagcaaattgaattcaagagcctattaaaagtatccttcaccatgattaagtgggacttatccctagaatacaaggatggttcaacatacccaaatcaataaatttgacacagcatattaacaaaatgaaagacctgaagacattcatactggatggccatgaaatgggaggtataggtatttgctgaagatgagagtgacagtaatgatctagaggacaatgtagagatttaggactgtccctgagggcatatgaaagggagtttaccaggaacaaaccaaataaaaatgaaagaattgaatgaaatgacaaaaaaccattaggtatctaagttacagtctgctgtcaagagccaattagaaaatgcaagcactttggctacaccaaaaaaacctggaagttaaaaaaaagtagtaaatataataacaattttatttaatttacattaatgtttctatctataattctgatgcacatatgaaaaagtcagtagcatattaacttgccatgaaaagaatat

SEQ ID NO: 1882832 - DNA, 4001 bp, Homo sapiens
aatgggaatcgctcctgcccctagagggaaaagagaaccatcaccgtgttaaactggaaacactgccttgtttccaatgcgggggactgagttccctccctcgacttagcgtggtaatgacaggacccgaggaggcgcgctgcttccgggcagttgcccagcataacacccgcaccctacttgcacctaaatttctgagctgcaagcaggcagaagtgccttccactttctctccttagctcccctctccccgctttgctgctgtctgtaactttttgttccgtttactgggaaggtgacgcttaagatcaaaagacccactgtaacttgcaaaagcccagagccaccaccagacgctggggaaaaacagggctgtccagtccagggttaaggttttgagcagagaaggagcagcgagaaatctcggccagtcgctccgggaacagcccctgcagactggtccaactctccaaaggctagggacaccggggcagccttgtggtggggtagaggacgagctcctaactgcaagcaaagtgctgagtagagggcgttgggggcaggggaggtcccttgactccactttgtatgcagcagctgcggggcagtgagtatctccgaacaaagcggcgagcagcgcgggggtgagagattggggtttgctcgcagctgccgctggcgctgagcgagtctcccaccacccccgcgagcgttggggtgcaaggattcgggggaggagggagaagggaacgaggcgtgccattcctgttgcgcggctacgcttcaggagttcttgtgaacgatgggaatggcaactatcagagccaagggggaaaagaaagagctggagtgagcaaaacaaagagcgagtgtgggccgcggtgacttcatgcctcaccaatgtcccgcccacgctgctccgagctgttactgctgctcctgcccgggctgcagccgcgcctgcgggcagccgaggcgaggcgctccggtagcgtggggaggtttcctagcaactctctgccctgagtgcacccggctacccgcaggtctggagccccccggggggccagagcaggaccacccctctcccgcccatcgccggcctcgcctctctcgcatcctagccgtgtgcaccccagagcgcgccagcaactcgggctctggactgcgggacgcctgagccgcgcactgaggcgaaaaggacaagggcacgcagcccccgccccgcgaagccgggctccggcacctcgcggaacctcccctcctgcgctcgcagccgcaggccccactccccgccagggagggagcggcgatgcctcgctctgtgcctgcgggtgtcggcgggtgcttctagggcgctcccagagccgcctccccctgttgctggcatcccgagcttcctcccttgccagccaggacgctgccgacttgtctttgcccgctgctccgcagacggggctgcaaagctgcaactaatggtgttggcctccctgcccacctgtggaagcaactgcgctgattgatgcgccacagacttttttcccctcgacctcgccggcgtcccctcccacagatccagcatcacccagtgaatgtacattagggtggtttcccccccagcttcgggctttgtttgggtttgattgtgtttggctcttcgctaagctgatttatgcagcagaagccccaccggctggagagaaacaaaagctcttttctttgtcccggagcaggctgcggagcccttgcagagccctctctccagtcgccgccggggcccttggccgtcgaaggaggtgcttctcgcggagaccgcgggacccgccgtgccgagccgggagggccgcaggggccctgagatgccgagcggtgcccgggcccgcttacctgcaccgcttgctccgagccgcggggtccgcctgctaggcctgcggaaaacgtcctagcgacactcggcccgcgggccccgaggtgcgcccgggaggcgcgagcccgcgtccggaaggcagtcaggcggcgggcgcggggcgggctgttttgcattatgtgcggctcggccctggctttttttaccgctgcatttgtctgcctgcaaaacgaccggcgaggtcccgcctcgttcctctgggcagcctgggtgttttcacttgttcttggactgggccaaggtggtaagttgttttgttttgttttgttttcttctcttccccaaaggtcttgggctggcacgaagagctgcccggccagagcatcccggccaggtaagttgcggtcatcagagaacttcaagggggcgggtgcggggcagcgtcctccagcacagatggcctagaggccaggtgtcaagcatttctgccctggagcgacagcaaggactaattatcagaggagacactctgtgttactcctaggtgttgaggaagccctaatagaaaggaattttggaaaagagggtgtcctgtttacagaagtcatttaggggccctggtccattcttaagggcatcgtctgtacacaatgttctccctatctttctaacatttgggtccactaaggactaacttgcctttaactcgaggctgtagataagttggttataatgggagtagtcttcaatttttgagtccagaaaaagacagcatacaagtttctgctatcattagtgctcaatctgaatgaattacccacactggagggatattaatgctttaagtcatcatcctttcggcttaaaaaaaaaaaatactatctaattgatccctcactgagatcaatctctgagacagagaagcagaaagaactctgaaccaggattaacagctttctgtccaggcaaaccatttgtgtaagagctaccttaatgtggagaggttaactctttacgaaatgcattgtcctcatctgtaaaacgaggtttattaataatacctgccttctctaaatcacaaaggaaagttcaagtcaaatagcatatgagaaggtgttttaggacttttgatttatgaaacaaaatcaaatgtaaggtggtataccagattggattgttggaaaattacacaactaagtaataggacgaatcatgagtttaggatgagttcttaatggttttcaatataggcccaacatttatttttgctaatgcagtgactcttgtcatactttctttttttttttttttaatttcactttttctctgtttggtcaccaagtccttaaattatattagagcctttctctgacctcttgggctcaaggagagtttaattaatagttgtaattgttttgtaggttaaaatttactcctatactttaaagtgtcaaggttttgcctgaagctaattaaaacagtcaaatcataaccttataagtaggttttatatatatagatatagagatatatggaaacatccagctatctttaggaaattgttgcatatacagttttctaatatttgtttcagggagatttgctcagttatctgaaatggagaaattagagtaaatctctttatcttgtggttattttttggcttgtttgttgatttcaaaatagtgaaaaggcaaaggaaaaagtaacattcattatcagttatctcttaaatggaagaaacatgcatttgttgcagcaaattttccgctaagcataatttcatcctgtttcaataagtaataaagtgcttttctagatttagtaaacacacatacacactagtaaaatgaccaaaatttgtgttaacacagtatattttgttcccaacgtacaggcaaaggaaaaagtcctacttgcctctaaaatttactatttaaagtacatttttaaaaaccattaactgtgcttataaacattagtcaggctcttgtgaaaaagcattgcatttctacccagtgtctaaaactgatttgaaggaaatattatgaatgggcctacttgcacctgcagacctgaaaagggaatgcttatctgaaatcagaacaaggcatccttttcccagtctctgtca

SEQ ID NO: 1882833 - DNA, 4001 bp, Homo sapiens
aggcgtgcatttacagctttaagaccaaacagctagtccgccacgtgtcactacagtgtgcacgcgcagaaatgcacaaagcaaaaaaaaaaaaaaagatgctcttaatgaaccaactataatccttgctaaggcataaagccagagggaagtatgtatctgaaatcattttctacccctcaccctcttggagcccggcactctggctgcggtgctctcttgtatcccagttgctagatgcaaaacaagctatttcctatctaatttttttttttaagagacggagtctcgctttgttgcccaggctggtctcaaactcctggactcaagcaattctcccagcttggggtaacgtgttacattattctacttaataaaaagcaaaagttgttttataaattctaacttaaatgcccagaaaataacttatcatgcattgccttgtcgtgcaatagtcaatatttgcaaaccaagtgttaaccaaaggcagttcatcaaagatttttgaaaattaaaaaaaaaaaaaaactcatactcacattgtcctcaggatttcctgttttcgaaatgttcctgtacgaatcggagtctctataatgattgtaattgaaaagataagtcaggttttttgtgtttttttttcattttaaaatcataatacgcaatgttttccacttgaacgctataccttgtgtattgtgcttgcttcagcctcgagcctctactgatgttccacctcaaggcgacaggaatgccacctggagaaactcctgggcggtatgggaagaaagccggtctcatcagagtatatttgcggggatcgacgaccaaggtgttaaattccaagcacgctttggaaagttctaggtgcttgggaagagatccgtaggcggcagggatgcccgcgccccggcgtcccagcgcggagggtggcggcggggcctggccctagcggggcggggcgggctcgggttaccgggagtcgcggggcgcggccggcactgcccgcggcgcctcctcctagagccgcacctggaggcagcgcgcgcgtcgaagaggcagcggctgtggagcgcggcggggcggctccgcccagggcagcccgggctggtgagtgcgcgcgggcggccgcggggccgggggtcgcggtccctcgggaggggactgagctgaggcccgcgggcccacccgagcaggggccctcgctgtcaccgcctctgcccctgtctcccaggccccatgtcgcgctttttccctaaacgaaccggtgacagggctgacctgcccgcactctgctggtccctacgccgggaaggagaaagtctcacgaagctctttcctttgcaacccctgtccccttgccctctgcagctccacacagcatttttacttcccgtttgcctcctcgaatcccttcggtgctaatccagcccttcgccgtttccagtttgggtctggcctgtttgtatccaaatcgaattacacaaaaccaggccctcagttctgcctctggccctctttccggagacgggccctgcctcctcctgtgccgggctgggcttgcccggcattggccgcccggagctcccagggagcaaggctgtggtcccgaaactgggccctccgctcagcgccgggcaaggctcaaaccccgggtctctgacttatccggtcacgaagggactgctcagagcctaacagccctaaaatttggtattggccccctcccgggaaatccttctccctaccaatcaggcatcgcggcaggtgctctgccatcatagaggctctgacacgctgaactctcgaagctcgcggcagtgtttatttttaggagagatttagttgatcgggaaccaattgacttggttgactgcctcatctagtgcgcacctgggccgggccccgccgggaaggcgtgctggacgttctcagtgagctccgagacctacagaagaaacagctgcaaggatccgatcagctagctgtgaagaaagcctcagatacgctgtggggtgggcaaaattcttttcctagcttcgatgagtactgtggattctagaatttaaacaacattcatggagactcttaaaacaacaaaaaatatcaactttttgcgggcacagactgagatttagctttttcctatctgaaaactgaacaatgtgcactagatataaatgtattatctaaagtttaggaatttacagcatagaaatgcaggggaattcggagtatgcaatacgaagtatcaacctttttgaaaatgaaatttaaaatgtatttttgtcaggcattccttctaattacggtagtattgctttgtatcagaagactttcaggcaaaggacaggagggaagagagagaaattcaaactaatttgcattagaaagaaacttagggtgaagaattgcctaggtaaggttgctatagctcatatcttaagtgcactcttggaaagctttctagtctattaggtaacacctgaagccccaattctcttatgtagcatttctttttttctctctttaactactctgaaactatacagagttacacgttcctcattaatttatgagtgaaaccaaaagaattgactcaatccaacaagtatttgagtgcttttcgcatagaggcgctttgctaagaacagaagaatggaagactgaggaagtttctaacaatcaatggattgccttgtgaggtgtagatgcaggtgtgcactgcctatttaattgacgatcaaagtcagttgagttttcatctcattctaaatatcatgtgttgccccctggtatcttaatttttctaccgttgcaggtagtctgcattttagtaacccaagtgaaacagttttctagggaaatcatgataaataggaagcacgtccgtattcccaggtgttctcattatcattaagttaataaagttaagaaaaataagatgatgattttcctttcttttggtttcaaactagtgaaatcttgcacaaaagacacagcatggataaatttaatcattttgtgactcagagtacattttatgtaagtccattctgttggaggatagatccaatttcatgaactcttttaatccttcttttgaagactagttccaggaccaacttcataaaatgttttattgtaggtaccaacaactatcaacatcattatcttctccccaccttcacccttgaaaacaattgtattctagaggattatgaaggaggggacaggactctttcaaaatctggaggacactagggacttaccccagaaaaaaaataaaaaagctcacccattcaaaatcttgtacacctttcagaggattcctggtgcccaggttatgaaagctcacttcagaacgggtcagcgaattagtcagaggataggtagatggagggaaagggaaatgaagcaatgtgggtaaattcacaaactgagtggatatgacttaatttactttcaaatagaataaatacatggccccttgagtaagtattctgtgaatgggaaggaataattgtattctttgtaaaagactgaagacagattagcctaattaagtttttaattgatcaagatcaactcttatcttgaacattatgagtctctcatttttctacttttcttgctcttttcaaggcaactgctctaagaggatttgctcccactactgatgatgccccattctggacacaatttctcatatgcaaacttgtattcatgaattgctacatatgggaatggctgagttcaaaaattgaactatatctttctcacatcctagcagttcacccttaggaagaagatataattatatataattagtctatcgcatgtaagccactgtgatagcagtagctgtgccttggaagggagtgggttggtattaggaatgaaaggagagcgttaagaaatattttggacatagcttctttcaaaaaacaaaccaacaactgctgaattaacttccttttcttcttctatacatagggcca

SEQ ID NO: 1882834 - DNA, 4001 bp, Homo sapiens
cattattttatttccagtcaatcatggaccaatgtttttgtcaaatgcaatcaaaggcagttagttttaaatgaacacagacttggatgttgcggctgggccaaactcgccccagtttctgttctgtcccccagagaagcggccgcatggggccacctcccacgcaaggagcagccgtgggcggccccaggcgggctgattcagggatcttccccctctggctccagtaacacagtctgtggacatgaggtttacacacttcattagggctccaaatttgagtattatctgagtctttttaaatttttgcaaagctagttatttttccagtcattggcaagattgtgttacgttggcttgaatgaaaacttgccttgactcagggagagaagttacaagtgcggttagtgtgggcctgagtaacccgcttgctcccgtgcccccagccttggaggtcccccggggcgcgggccccattcctcacgttgaccagctctgcggtctctgtcagtccacagcgtcatggacgtgtttgttactgggctgggagtcaaagctgccacacagcggcaagtctaggtgcgctgggaggaagattctgcaaagtacccaagtcaaggtgcttcctggcgtggtcacccatcgcccggctcccaggagccctttgaacaaagcaaactttcttgcgccctcagggctgcctgcattgaggccttccatgattccgctttggttcgggttaagtggaaaataggggtcccattatgcaaaaaccaaagcctccaactactcgggcctcacccagacaccacccccctcagcagataccagaagtcactcatgacacccactttacagaccgataacatgagatgggagaaggggaggcaatggtggtaaacacgtgcatagcactgggtatggccagaccacatttttccacagagcaccacgttcaatctgccagccaccctatgggtggggcactgtttcaatcacgctgtatccttgcgttagtggaaacagtgttgtctttgaggacagcgcagggtctcctccagcaggtccgatttcccgtgttaaagcaactggaatccacgggcagtgagaaactcaagaagttcaggcaaatcggaccaagtcaatagtcctgtctcctccttaaagcaggcagggcagccttgtgccgctgggtggcaggacctccagtgcctgcagccaggggcctcacaaaccgccccttctcacaagtcccgcttgtttccttgatgcggaagcaatctgctcagctctgcaggtacctccaggttcccagggctcaaaagatcccgggaacagcctctgggtcattgacaaaccatttcagcctttatgtggatgtttgctttcatacatttaaccaaaaatggcccaaaatgcaggttactctgcagccagccagccgaagtatcagtatgaaactttcctcttccaatctctgtctcatcagcttggccaaaaacatccctggccattttggccacagacagaaacggacactgccttacagggctgcctccattgctccgcgtggcttccctccgcttcgttccacctagaccgagcgagcagcgtgacacaccttctgagctctctccctcggcaattactcccccggttaatggatctgacaagcaggcacttacatagaattaataatgcattaataatggctacgatctggcaaaccaaacaggctgtgttttaataacagaatcaatagttcctcgaagtgttgcttgtttattttaccacgcatagaaacagaggcacgcgtggctttatttctatctcagctgggagtgtgatccttccactcacagacgggccgattccacgtcccggtcgcattttccttggcttttcttgtttgtttgtccaattgttttcagtaaaagaaatgatatagcataaaacatatttcttaaaacatcgttttcttacatgcctcgtctgtattcgatgttccaacatagaacactttcacgttaatctaacacttcgcattgtcagcccggcgcgcaatcattccgagagctgcagaattccctggtgagctctgcggctgtggtttttccattttacagcgggggaggccaaggttgtgtcgacacacacagcagagagaaagaaactggctaaataactccagaaagggaaagtcaccccgtggcacccggcctcaattatcggggattttgcctgcttcgtccagttaattgtctccatcttcgtctcactctctacaggtagacgctggcgggaaagccgctcctccaggactttccttctctattttctatctgctcaattcaaagacaagtgctatttccactgactgttgtctgtacatgaccccgaatagaagcagtgacccatggctcttcattaaaatggtcctgagactaaaaacaaaacgtccaaggcatgccctcaataaaaagaaagaaagcgagaatgaaactgtagacagatacacagtgtcctggaaggagttttagtggaggattccactcatccatcacttcgtgtcctgcgtctctttgaaattccttgagctgacccagctgccgttcaataaacactccagtgtgggggtgacaaatgtaattttcacctaaactgcgttgccgtcattctaatataaaggcttgcctctttgaaatacagttcttttccgtccctttctttctgtctttgactcacgtggttccctctgtggtggtgggaggcaactctcaacgagacagaggcaacagcaggtatttttcagcccctcgcaggccgagctggcgtccttccagaaccccagctccctgttttcgtgccctccgggtctcaaagccagcatattttgcttcattgcattgtaaagttaaagccgcttgtgtctgcatctcacgggggtcctgggtggcatctctgtgttcccaccagcactgtcgacgtttctcccgtgagagggggaaccgtgaggcaatggggatgctgggtgacaggcacgaagctgggagcctaagggaccagtcgcttaggtaagactgccgggaaggggccgccttcaggcccgcgcacacatgcctgtttctcctctgtgctggcccatgggaacgactggatgccttcctaccttacagtccaaccaggctctgagcatgcccacatggccgcaccttgcacagttcccagacacccccactcacacaggaagcacctgctcaggtcactccctgccaagggtggcccagcaaagacgcccttctgattcccactgtccgaggacctctgccactggggagctggacagggagcccagccctgtcgcctgtcacctctgtcccctccatctggcggtggggtggccccaagcccacaagggcacttagtaaacatgagggccctctctgctcacagcccacaagggcagccaatggaagaggcccacctgtgcctactctcagaacgaaggtataagtcacatttgggcaaacgtttctctgctctggggtggaggctggagtgggagggagagggagaagggagagcactcacacctttgccagcagagatctgagccctccacgctcctggcactgccagcccagagaagtgcctcacgtttagaaaatgtcacttctagtgtttatatcccattctgtctctgatcacacacaaaaaaaatgtccccaaaggtcacaaggtctggtgaaaatcctacaagcttttccagaacaaacaacagaccctgaccccggccctctctttgcataagaatcaacaccgggcagcggtcactgcaaggggcagccaggactacacaaatgccagcttcggatttaaaactgatttttttttcttaagaaaccagaagaaaagggggacttggtgctcatctgcattacagatcaggcctctcagagaaaatcggacatccataattcattacatgtttcctgcagggg

SEQ ID NO: 1882835 - DNA, 4001 bp, Homo sapiens
aaatgtattgatatgcactctattttctggtttgttaacctcaagaataaagcatcacactactgaatgtatcatgattaagttcaaagccttttggcatcgctgtcttatcttaatatgactagatccagattcattccaattgatatctttgtaatactaatgcacatacttttcttaaaagaattgcagtctctcataaaatatctatatttttaactgagtccattggagatattataaactgaaagcgtatttgtaaatagggactgtgtttttaagttggttcctgtttgtatattatcttcaattcctgttatttcctgctccctactgtcagaggcatttgaaccagagcaactccatctctaataggggctgagtaaaataaagctgagacctactgggctgtattcccaggaggttaggtattcttagttacaggatgaaacaggaggtcagcaggactagtatcacaagatacatgtcacaaagaccctgctggtaaaacaggatgcagtaaagaagccagtcaaatcccaccaaaatcaagacagtgacctctggtcgtcctcactgcttattatacactaattatatggcattagctaaaagacactcccaccagcgccatgacagtttacaaatgccatggcgacattccaaagttatcctatctgatctaaaaagcagagagaccctcagttctggaaatagcccatccctttacctgaaaattcatgaataatacaccctttatttagatataataaagaaataaccataaaaatagccaaccagcagccctcagtgctgctatggctatgaagtaaccattattttatttctttactctcttaataaaattgctttcattttatggattcgtcccaaattctttcttgagtgagatccaagaagtggaaaggggtcaggatcgggacccctttccattaacactacaacttcacttaaaaggcaacacatctacttctatagaaattaaagaactcccaattttcgctccatcaagcttgttggtattgcctgctatgagcctgccctacctagcatttgtcttgataggttgcctcaagtttgtatctggttgctttcttacgtgcttggatttgaatcccagcatcaccctttacaacctgcatgatcccaagaaggttattcaacctctcagatgccacagtttcttcatcagtacacaggtgatactaatagcacctatctcacataggcaattaagcaagcactgcaagtgttataataatcgttttgcctggttgtttctgttattgctgttgttaatggtttcaattgtttgcttgggttcacatatccataaacacatgaattaaaattcagtcccccctccacacacacacaaatagataagccatagaatcatctctcttcccctcttcttctcaccctccgcttcaccctccttcctcccctcttccctctccccatctctctagtggaagcaaggagaatgaatttgagagcaagcctgagactgggagaccaattggaaaactagaccaaccagccctaggtatttgtgaggggagggattactgagtacagaaacagataatgatgtatttatagcatgagaagcatcaatagtacagtctgcgtttttcatgcacctattaaaaagcacacgacgttgggaccggggactggggctacaatttccagatctaaaagtcagggagggctttgtgggaactgggatggccacctgggagctgggtctcctccacgcgggttaccttagtccaggagtgagtgcgctcactgaccagggccacgagcagcgccgccgaggccgcgccctgcagctggctgtgcctggaccgcttcgtccacggcctctaaccaggcgacctgctagaaaaggacatttgacttcctgggtttaggtcccaagacgaggagcgggaagctgcctaccttggggtggagaggactggagtaggcggtaggagcgagtcattgtcatatccccctcctaggcattttcatcatcatcacaaagggacccagctcacctgggaaggggcgggacccagggaaggtacaatgcccttctagctggccacctctaccccaaaagcagggcctgctgctgccaccctggattcttaaacaagcaaacaaaacctcttcctctatgctcatcagtacgaatatttccgttgataagccttactgctgctcctccatcttcttttttttttttttgatacggagtgtcgctctgtcgcccaggctggagtgcagtggcgtgatctcggctcactgcaagctccgcctcccgggtcacgccattctcttgcctcagcctccagagtagctgggactacaggcgcccgccaccgcgccctgctaattttttgtatttttagtagagacggggtttcaccgtggtctcgatctcctgacctcgtgatccgcccgcctcggcctcccaaactgctgggattacaggcgtgagccaccgcgcccggcctcctccatcttcttaataataataaaagacaaaccattgtttttgacttgtgttttcccgtgcattctcttgtgttctccttgccggtgttcccggctgtgggccttcaggtcgaggggtcagttgaagcctttcttcccttcattgctcctgcccgcagcgcttccagacccctccttcagtgccggagccccgcccttatattgtgaacttcttccaatgtctcatcagtttccagccagaatcctgtctgatcctcctatatttgccttaaattctttagttatgtagtctgaaattcacctactagcaataagcttcctatttaaaatgcaggctgggcgcggtggctcacgcctgtaatcccagcactttgggagtccaaggcgggtgaatcacctgaggccaggagttccagaccagcctggccaagatggtgagacccaagatggtgtggccaacatgggcgccaagagtgaaactccatctcaaaaaaaaaaaagaaagaaagaaaaagaaaagaaaaaataataaaatacagatactactgggtgggtaggcactcttttctatccaaattagaattgttccatcatcccgtattttcctaaaaatttaacacagcggtttcaaagggaagctagcatagtggaatcagggaactgtggaggaaaggtactgggctgcaggtatcataggcgtagtagaagacaagaacaatggaaaggagtcccaggctccaagaatcactttcctaccttttcaggtctggtctgggtagagctggagaaagtattcactttagtaatgcaagcgctaaaatgttacaatcaaagattttaacaaaaaataaacatttaaaagctaattctttaccaaaatctcctgcaaaacactgagggaaaactccatttgtaatctacagtaaaacctgataacctcttttcacatctgcccttatcaatgtatctcacactgtaattgtcatcccagatccttccctcctttacttcacaattcccaaaactttcccctacaacccaaacaggacagctattcttttggtttctcaggtatgtattctctcacctgctggaactaaagaaatgttggttcttgttgtaattcatcctaagcgtgaaaagttccttgataaacttttgtccaaactgtcaataaataaatgtgtcactagagaataaaaggagagagaaaagaaagcagactttattttttaataagacaaggaaattgatcatcctgtcttcctaatttgctgtttcttcatggttagtgagtcgctttgcattttttccaagacgcaagacacatagttcaatctccttcccatgagagcagtgtctagttgtattctgagaattacacagtgtttgatttttacagtccatgatactaatgacttcataagcatcttcagttcctaaaaataaacagatagatgaacaaa

SEQ ID NO: 1882836 - DNA, 4001 bp, Homo sapiens
atatgggccaggtgcggtggttcacgcctgtaatcccagcactttgggaggccaaggcgggcagatcacaaggtcaggagatcgagaccatcctggttaacacactgaaaccctgtctctactgaaaaaaaaaaaaaaacattagccaggtgtggtggtgggcgcctgtagtcccagctactcaggaggctgaggcaggagaatggcgtgaacctggaaggcagagcttgcagtgagtggagattgcaccactgcactccagcctgggtgacagagcgagactccatctcaaaaaacaaaacaaaacaaaacacaaaacaaaacaaaacaaaacaagaatatatgcaaatggccaacaagtaaatgaaaaaatgttcaacatcactatcaataaggaaatgcaaataaaatccacaaagaaatattaccttatgtacctgtcagaatggctatgataaaaaatatgaaagataaatgtggagaaaagggagctcttgtacgctgttggtaggaatgtaaattagtacagccaatatggaaaacagtatggtggttcctcaaaaagttaaaaatagaactaccatatgatccagcaatttcacttctgagtatatatccaaagaaaatcaagtcagtatgctgaagcaatatctgcactcctatgttcattgcagcattattcacaatagccaaaatatggaatcaacctaaatgtccatcagcagataaagtgttatatatatattctttctaattttggctttatatagatacacaatagaatactgtgataaagaatacattgaatagaatgtgtagaataatgctacaatgtattcatagactatacaatgtattcatagaatacgttgtagcattattcacaatagccaaaatatggaatcaacctaaatgtccattggcaaataaagtgttatatatattctttctaattttgtccctttatatacatagatacacattagaatactattcagcctttaaaaagaagaaaatcctgccatttttgacaacgtagatgagcctggaggacattatgttaagtaaataagtcaggcatagaattacaaatactgtgtgatctcacttttgtgtgaagtaaaaaatgttgagcacacagaagcagagtagaatgatagttgccaatgtctgtggggagtggtggtgtgggaatggggagatattggccaaagttagacaggatgagtaagtgctggagatctattgttaagcatgatgactatagtcaataataatgtataattgaaaattgctgagggaatagataagttctcaccaaaaaatgataagtatgcgaggtgacgcatatgttaattagctttatttagccattccacaaggtatacatagttcagaacatcatgttgtataccataaatatatacaattttatttatcagttaaaaaaaggaaaacagaaaaaaataaaaaatgtactgggaaaaaaatttatagcactcctaaacatacagtaggatgcccaaagtgcatcttgagcacagtttttcagtctcagcagcataattgacattttggaccagataaatcttgttgtgagaggctgttctgtgcaatataggatgcttggcagcaaccctggtctctacccactagacgactgtagcatgtttcgttttgataatcaaaaatacctgcacacattgctaaatgccccttgaggggtaaaattgcttctggttgagacccagtctagacaaaggttgggaaatttgttggctgtatcttcaaaatatgttcagaattcaaccactcccaccacttccattttctctctttgtcaagccaccatcatctcttgcctggattattgcagtagtttcctaatcagactcctggtatctactccattttctactcttaccttttcagtgttttctccacacagcatccagagtgattctttcagaacatgccagtttatgtcacttatctcctcacaactctccaaagactctctctttctctgagggtaaaattagtaggtgaattcaggacaatggcatgccaggaactatgtgacgcatcacaaccaccagctgaaccagggatttgtgaaggagccagaggcatgtgggcagccaatggcccctgagaaggctcaaaactttctggatgttctttctgaagtcgtcttcagagccagtttagtcaggcaggactactactctgattccctataatcagatactttttcttccaaatagtcctctagttggatcattaatcaattcaccagactactgatgacaattatctctatccaaaaattaaagtctacacttaaaaaattaggatttgctgccactgggttcatttgaaacaaagcagcaggttctaaatgcaaacctttaagaggaatccctgaaagtgtttttaattgatggcaagatcaatggactaaagtagaaattcttaaggcagttatgttgaagaagataatgttcacttagatttttatgttttgggtattaattaatatgagctttattataatatttgaaattacttcctagagtaatttagtaacttgatattttataataataacattttgaaacatttcaagaatatgccctagatatatggaaaataagtcacaaattcaacaataagatagataagagatggagaaccacaattacagaagaaccaggaggtattctcccccaagatcaacatgaaataagatctcatgaaaacagcaaaataaaggacagttaaaggtggcagagttaccgaaaacctcactttgatacacaaaaagtgtcagcaatctgttagagcacagaaatagtgattgcccctttcactacaacatggaaagattccacttggctttgctagttgctttctgtctctccatatgggaaaaatataactaactggataattttcaaccagcaaaaaaaggtggagcataaattctaaaaataagtatgatataaaaatgctgaaatgctaaaaatgttcgataagttataaatgggaaaacagataagaaaagacatagtaaaagatttttacagctatgtgaaatagggcaaaattaagcaaaaacaaacttgaaagtggaataccagagaacatttttatggtaatgacaaatggtaatgttctattgtataacaagagcccccatttcataagagaatttgaatgtaaactgggaatactcagcgatgttctcaaaactagaattcttttctagtgagagagataattctgttttttttccttcctgacatattacaaactaatttttcagagttttgtgaaatattgttaatttttttcttttactacttgttttctggccatcatgcttctctagggagagaattatgataatctgagagcatgctgttttatacacccttagctttaatccccttttagatactttttactttttctccaggcttttgacttgggatgactttttttttttttttttttttgctgcagaatatagtgccatctttcatagacagttgcaaaagtaaacctcctctaataacattctaaaaatgtgattattaaataaaaagatgcaatttaataaaagccatggttcataaagccattagttaaatagattcattaataagaacacattttcccacatgagacactccgtaagtggtggttatggtctccagctagcctgccaactttatttaatttacaatgcatttgaaactgaatgttctataaatcagatacattatgggttaatagggcctttggggagacagtgagaggaatagtcagggaatctgacacccattataaattatgtttaaggcaattgattttcaagtcaagtcttcgaatgccaagacctcaactataacaagttccaagaaattgagagattgggacagaaaaaaaaaggaagaataggaggtgaaattttcttccttgagggcacaagtaac

SEQ ID NO: 1882837 - DNA, 4001 bp, Homo sapiens
agagattagacatcactgtctgatgccagagaggaacctgtgaaaaggagataggcgtgtctcagtgccacttcagcaaaaggttgccctttaccttgcatgccatgactgtgtcctccctgggaaaagagtacttcaagagtgttgtccagggtgtcaacatagtgagactctgtcccttaaataaataaataaataaactcctgggctcaagggatcctcccgccttggcctcccaaagtgccaggattacaggcatgagccaatgtgccgggcaataactattttaattgcagctacaatggttattatatgaaagatatgtatcctttgattggagtaatcgatagtgtaaagtggggaagtggaaacgagtgaaggggagaatataaggctggtttaaatacctgctctttgtttgtttgtcctcatcctgcaggttttgtttttgattcttttttctttggcaaaacacacacctccagtggcattttcaggtttcttttcttgaggtcttgcaaatctgattatgctactggttgatcaggtaggggagaactggccaggattttccctttttgtctcttctgatggtcaggtcgattggaattggagtgtgagctaatggaaaatagcatctagctcattttaccaataatgaagatgagcccagtatgtgcaggtaaatgtttaacaattggcagtctgaaaaaaagaaggcctgatttctggtgtttgctggttactgtggtataaatactcctaccatagttgatttcaagctaccaacaagattactgaacacatagttggaaaaagatgcccagaagcaaatcatcatatgtgtaatctgtctaccacacagatacaaaaaacataactctagatcacagataatagtaaaatgtagtaaaatcattaggaaatgataagttttgagtactttgaacatatgttttaaaatgtaacttcttcaataacagtttaattgttaacggtggctctgttgaacaactgactctcaatatttctgaaaatttaaccatcagctctcttgcgctggcttgagcacatcaggtgggacccagagaagttactgtcttaccaaggtcctcggatgagtcatggcaggacctgggttattacagagttgtttctaaaaaccagactactctagacagatttacttatcaacgtttctttttattcatttgtttatttatttactccatcctttaacaatccataaaagggatttaagactattacaggctgttattatctattgagacagtaagagtcagaatatttgaatatatctggaataaaggtgggagagtaggccgggggcggtggctcacgcctgtaatcccagcactttgggaggccgaggcgggtggatcacctgagatcaggaacctgaggtcagcctggccaacgtggtgaaaccccgcctctactaaaaatacaaaaattagctaggtgtagtggtgggtgcctgtaatcccagctacatggggggctgaggcaagagaatcgcttgaaccgaggaggcggaggttgtagtgagctgagatcgcaccactgcactccagtctgggtgacagagcgagactctgtctcaaaaaaaaaaaaaaaaaaaaaagacgggagagtggaaagcagatgagatttagagccataagtaaattctggctttgagtcttggccttgtcatcttgatcaagtcagttactccttggtaaaagttttctaatctgaagatgaaggaactggaccacatgaacatttaatatcttgtaggtctaaaatatggttccttatttagattcatcaattcaataatatttgcttagtaccaactatatgcactctcattatgaactgtactccaggcagaatgaaattcagatatgataataaatattattataatagcatctcacatttatgcagagccttctgatttgccgaagagaaaatttactttgagtctctgggattctgtggctttaggagatcaggacatatcttaacagaatgttagagaaagaagaagctattctagaagtacaaatagaaccttattcctaggaaacagaagaggtcatacccaggtagtaataaggaataagcactttttctgccatgtctagcagttgcttcactttgtttttttaaaaaagcaacaaaattaccttttttctgagtataaaatttttgtagaaaatttagaaattattaagaagtattaaataaggaaaaaaaccatatatccaatctaatatcctgcttttctttacctaataatattttatcatatttttcaaaacattcttagtagaatcattttaattgctgtatgtataataattttatctttttggtatatagtaacttatctgatgtcttactgttggaaattttatttattgacaatttttattattctaaagaacactgtggataaatagctttgttccatatcaaaaatcatacattggacacatgattttcaactttaatatttaaggtttagtaagacaattttagcaaattatatacttttgacctttagagtctttgattctgttgatattgttttgtatttacccagattttattctgtttctaaacatttattaagaagaacattttgtttgaattcttcaatatgatatgtttgaactggaaatagcaccactgttttcatattatttcaagtaggtatgataaagtgtagggttaacaattttctttttcaactttctgtgggagatatcctctgtctagtataaggtttgttggtttagaaattgctcaataaatgttcaataaataaaaggactcatgctaatttaggataagcaaaaacatatgagagggtgtttaaaaaacccacttctccatttatgataatagctttcattctcataaggagagataacagctaagcacagttcaggaattctgactgttgaatgagaactgtaaaatgaagtatgtcggtgctttaattcacctgaatgggaaaccatgactcagatagttatttgattaaatgttaatgagatctactaaattgacccaattcttacttttatgtattagatttatatcaattaaaacaggaccagttttacctgttttccttttttaacatctttgagtcaacatctgcttacaagggaagtgctgtaactaccctggttatttaaatattaatggcttccattaaagggagctagggattggcagcaggaagattgagaaattagatggcatgattggtttcttgtttctgtccccaggggaaaaaaaaaaaacaaaaacctcttactggaagagcttcttccattatttttttttaatattgcatatatatatatatatatatatatatattttttttttttttttttttttttttttttttctgaaccagttagagagtaagattgttgatttcaggcatcccttgaaagtagctgtgctataaaagcatcagtgtaaacaagttcaagtaatttaaaaaaatgttttcacagtgccatagaggtcattaccctggggcttcttgggaacctaatttcagttcctaaattcattttgttctttattatagtcagtaataggcaaaagcattttttagctccatcctggatttggttggccttatttacattaagtgtggggaattctagtaagttaaccctgagagacatgacaagggttatatattcaatcacattataattataaacctttatcttactggggaaatgtgcctgaaaagcttttaaaatttgctataaccaatattttcatgttatgccaaattgggttgtaataagcatgtcgttaaaagatttttacacgttttgtatttttaagatgttctaatggcttggcattttaaagcactgaacaaaagcaggcattatatttgcataattgtgtatctctttttgcatccagaaatgtgaatgtgtggagtaccc

SEQ ID NO: 1882838 - DNA, 4001 bp, Homo sapiens
gagaaacagtctcagatttcagacctcagcctgtatatagattagttatttcacaggtaaccaagtcaccgttttctgagtgggcaccgtttactggtgcccaataagtaatactgaatgttaaggtgttttgttttgttttgttaactatatataactgaccctaaagactctcaagtcttctttgtagaattgagagctgctctgctgttactccaataaaactgcatagtgagttggcatttggaatgattggatttaggttgttgctacagtcctgcaaaccctggacttctcaaactaaaacatgtcaaattatgaaactgtagtcacttaacaatctgaactggaattttatacttcaacatgttcatcatgagaattttcagatttacaatttgtagacctaatcattgtaaatacctatgcattcaacagctcacctctgatggatgcagagacccttaactgagccaaagggacaatttttccccctgcaataggtggctctactgttgtgggtgggaaacatgtacaataaattatttctgctaaagaaagggtgttgaaatctaaagcccaatttgatatcttgatgccttctaaattttgcaagcccatattcaactgtcattgcagttgttattaccttagtatacaatataagtgatgacatgtaaccctttatgaattaacagtgtatgcaaatactaggagcttcaatttttttctcctgagtgtttgttattcaaataaaataatcttgagggcttataggtataagtagatatagaaataatctatttttaactatttctaactaattattttacagataaatagagtgaggcctatggttaaaaagcaaatgaataggccgggcacggtggctcacgcctgtaatcccagcactttgggaggctgaggcgggtggatcacgaggtcaggagattgagaccatcctggctaacatggtgaaaccccatctctactaaaaaacaaaaaattagccaggcatggtggcgagtgcctgtagtcccagctactggggaggctgaggcaggagaatggcgtgaacctgggaggtggagcttgcagtgagccgagatcgtgccactgcactccagcctgggccacagagcaagactccgtctcaaaaaaaaaaaaaaaaaaaaaaaagcaaatgaataataaaggcagaacttacactcttgttcttgaactttttactgatggtctttctcctattatacactgattccctttctggaaataaaagtaccttttagcctcaagtttttccaatattattaacttaggaataaaaggctttatttaatctccaaagtctatggcattttagcaaaacatcctaacaatatttcagcttgactacttgaaaatataattcattattttgaagatggtaaagcatagttattataaatgattcctcatgaatatttgtgacttcaacagcaatttcttgcatatatatacatatacacacacacccctacacacacacacacacacacacacacacccctacaaacacatctttcaggaatgccatcccttacataaagatgcatataaatgtgggtatgcatacacatacacacatatatctacacactcacagacacacatctttcaggatggccatgacttatgtgaagatggagtcctaacatttaatattttttaaaactattaggaattgtgctcattgagagaaatccaatacttacaatgctaaatcttcaagctattgaggaaatagctggaaaaattggaaaagagatttgtttctttctgttccttttcaagggcagaatgaaaactgaggtgtgaagtttacagctgtgtttcggttccataatgaaaggtcttggaatcacaggttgatgtaattttaatagtgcatatcattcccatcactttgggtactttgggaggtgtttcctaccgtctgggtctgttcgcatgttcacgcagcctgccatctgagaaggaattttccctggcggccatgacctaatttcaaggttctggcagctgaatgcaggcgactgacagccaaggttttcctacttagcatattaatcacctccatttttagcatgcagccatgataagaggaagccagtgatggattcaccagcttttctgaaaatcaggctgatagaacaccctatgcacctctgtagacctcagactttccacacatacgttttttgcgggcatatctgagtttccagtttctggctcttgttcagacttgaacatatgctatatacagtgaaaagtggttggattctagaaggtgtcgaagtttactagctcagataaagatcggcctgttgcttttttgttgattaccttttcttcccctttaattcccttttatacttgttcctgtaatctaaggaagaacatttcatttttctatagaaggagatgcttatgcagagccaaatgaaccattgccctgttctattttctgatgatatgcatttttagtgacataagaagagaaaatcttattgatttagcattcaataagagtaaaatgataaaatattcaaataaatatttcagtgtttgaaaatggtatagaatctattgtttggaaaaatctttgggcttatctgaaataactttctattttatttctttaaaaacttgacaaacgtttacttcttttgcattacaggtcataggaaatgaaacagactgctgttttcatgaggtaatattgttcctcatctcattagctttctttgtttggatggcatgaattttgaccaaaacacgtttttttttcccaagtagttgtaagctgctaacactatcaaaaaggaaatttaataataaatatattggtatttttatttatcacattgaagttttcatttttctttgagattttagctaaacgtcagtgataaatatgatgaaaaaacaaatgatggttcagaaaaatcatgtcattttattttcctgtgtatgtcttagtttcttttttgactgtgtgattgtttttcttagaagcatttacagagggaaataaggacactcaccaaatagggctaatttgaagaaggacacagctgacttagtaggaagaaggcagaagaattatctcctggtaatcaagactctgaaaataagacttaagataaaagactggatacatgcaagaacagagttcttaaagatcaccagctgaagattgtgatttttcattcttctatgccctaagacagccatattttaccatttgaaacataaataaaaatgacttccaggcttatttgattacagactgaattgctctatcataggatgacaagcaatgacagataggttccccataaagaaaagtctgtgagactccatatttcctgtaaaagatgatatgaggaaaccgggcagatttttctttcattcatactcttttatatgggggcaatagtactgtcaatctctattatatcattaggttacctggaaggtcttatgtttggcagtggaatgtaagttttagggtaatttttctgagtggcaacccaaggccaatgtagtaaattttgaaagatcaattaaattacagaaaaggcttgcataacataaatgtgttctgcccacttgtcaacatgggtaaagatattaatattgtaacaagtgcaatgacagaatttcattttcagactccagacttcttaacagtagcagtggcaaggcatcaaaccagtgagttttgcttctttaatagtttctataaaacttgacagcctttctgtacattgcaaatactctaaaaccacattgactttatacattagctaaactgcctaggaactttttctagatacaactaattcctgaaggtgaagaagacagtgtgagtattgcaagatcatggatgcagttcttcgaggtaaaggctgttttactcacatttgtgatgtcctgtttgtcacataaaagaaagt

SEQ ID NO: 1882839 - DNA, 4001 bp, Homo sapiens
aagggacatggcttaggaggaatcctgggctgtgggcattccttggccccgtggccagatttctggcacttatagcaagctcctgggggaggaggttctggaggaatgcctggctgctgcgcttcaggtgtttggaagctcttgtgtgctggagatgtggctggggtttgtctcacagtggaggcaaggaattgcaacttttttctattattgtacaccttgaaggcgaggttaattaaatcctgttgtggggtttgagggccggaatttaatttttggagttttatttaatgtcgggagcagattgggtaataaaatgtattttgagaataagacggccttttgactttttagggtctagggctgtaaagtgtctcagggttgctgccaaacaagtcatgaactgggctggatttttatatttgatgaaaaagagcctaaacgctatctgatttgggataaagaaaaaggagcattaagcttgactgtgcctttggctccagccaactttttaagagtaaattgctgggcaggttggggagggctagtcatggaatgaaactgtaagctggaccaggtgtgaggaggggaggtgataaaaagattatagggtggaggagcagaggatgaggaagaattgggatctagctcggcctggagaggagcagcctggggaggaagggagaggtcagatgggtctgtagaaaaggaagattagaaagactcagtgacgcttggggttgggactgaggggacaggcgggagggaaagaaggaagatttgggacgagttgcactgggcacagagactaggaacggactgatgtgtaaaagaatgcctggacttcaggcacctcagaccatttgcctattttacgacaagaattatttagattttgcaggatggaaaaattcaaagtgccattttctggctatttggaactactgtcgagtttgtactggggtcaagcggcattgcagaagaaaataaggcatttaggttttaggtcaggtgtgagttaaagaggttttaagtttttgagaacacaggccaagggagtagaaggaggaatggagggtggaaggttgcccatagtgaaggaagcaagcccagagaaaagagtagagacacagagaaggggtggggggttcttgccctccagaaaagcagagaaagggttggggcacggaaataagggattggggcacagagataagaggttggggtgcggaaataagggattggggtacagagataagaggttggggcgtggaaataagcgattggggggttcttgccccctaggaaagcgggacttgccgctaagggtgaaggagaaggggttgaggggtacttgcccctctcccagaaaagcagagaaggggtagagacaaggagagaaggggttgaggtacttgtcccttccccagaaaagagggacttgccgctaagggtgaaggaccaaggcaggcgtccctgcgtggtctgacacccttgaaacgtgtaagtataatcagagaggtgtccctgcagtgattaaacaccaagggaaggctgccttcccagtccgtgactggcgccggagttttgggtccatggataaaacgtgtctcctttgtctctcccagaaaatgaaaggaattgaaatgaagagaagggagagattgaagtgtagcaccaaaattgaaaggagaaagaggttgagggatagtgagggaggttggagaagagagtaaaaagaggccgcttaccggatttgaaattgctgagatgtttcttgggctggtcggtctgaggacgtgaggtcgtaggtggatctttcttatggagcaaagagcaggaggacgggggattgatctcccaagggaggtccccctatccaagtcacggcaccaaatttcatgcgcgtccatgtgaagagaccaccaaacaggctttgtgtgagcaacatggctgtttatttcacctgggtgcaggccggctgagtccgaagagtcagcgaagggagataaggatggggccgttttataggatttgggtaggtaaaggaaaattacagtcaaagggggtttgttctctggcgggcaggagtgggggtcacaaggttctcagtgggggtgatttttgagccaggatgagccaggaaaaggactttcacaaggtaatgtcatcacttaaggcaaggaccggccatttacacttcttttgtggtggaatgtcatcagttaagttggggcagggcatattcacttcttttgtgattcttcagttacttcaggccatctgggcgtatacctgcaagtcacaggggatgcgatggcttggcttaggctcagaggcctgacagtaggtactggtggaatcacctgacttttcttatctccttgcctaaacatccttctcaggaataagagcaccacaggcctgagctgaagcccagaatccagagctaatctgagtggggtagatgaacctgtatcagtaagacatgaaattagaaactaatggcagacaggaaactatgggctcttggaccaagacggactttcgaaaatggcaaaactaaatcaaagatgaagacaaaggataaaaattaaaagctgacttgggtacagctacagaggacttgcaatgacgttcagtgagattgatcagaaagcatcagggatgcataagaagctcattcattcagagattccctgacaaaggaatcctctgataagacacttgggcttttacccatgaacatggaagaagagataaggtctggctttgaaaacgattttattaaacactgacccttctaatatacccaacaagacctaattgtgcatgaattctaacttgcggaatgttttgttcttcagaagccacaacataaagaagtgaacataagtaaaatttcaggacaagcagtatcaaaagtgtacaggtgtatatataactttttcatagttttccttagttaaatattaagaaaaaaagcaagagttatatttccttaagcagacagtttctttgacaatatattttaattagtacaagaatggtagaatatgataaatatagaagataatttaggcatagaaacatgttaagtgtatctaaaactaatatttatgaattattaatttagtaaaatttgtcactgtgtttaggaatattaagccatattaagtagtatatcttaaagttattcacatattccaataagtatgaagagttagaagaatattgtttaaaaatatagatggcaaaaatactaaagttgcaccgttattgtagttttggaatacggaataggaaaacagcaatgtgaaatattagagtttatttcaatgttttaaagtcctgcaatcttcattatgtagctattaaaaagcaattttttgttcatattactttgaccatatcaccttaggccttccaacgatgttttcctgccaagaaacaaattaagcatttattagaggtcactaaggcatcattacaggagtaattgctcactataggttcttgccattcgttcatttattactctctctgtctcttacaagccctttatagaatcatggatttttaataagtcttgcactctgtggtgatctcaggtttggcgtcgctcatataatttgtttcctttttgattctgacagcttgttgtttacaaaatgataagttcttcctacaagaaagtccataaaatggcctgaaagatgctataaaattgctaacactgtagaatatgaattattaacaatacgaattctttgtcttttctgtgacaattaccttccttcttttctttatcatcttataatttccaaattataggtagattatgtagctttatagtaaaccacaaggccattcataggctcattctggaaagtttctatactttccatggtataccaatgtggaaactgtccaacatggtgctctctctacccctcaccaaaggccatgccactgtggctcagacaagtgcttgggaattc

SEQ ID NO: 1882840 - DNA, 4001 bp, Homo sapiens
tcaagactgtctttcctcccttcttcagtgcctcttttcttgctataatattaaaactcagtactgtgattacttacctgatttttgcctcatatgatggtgctttcctttgtggatagttgttcaatttggtcttcctgcagggcaagttagggataatcactggaaggttttttctggtcatcttcctccacttcctccctataatccattttgagttaatatttttatatggcgtgaggtaggagtccaggtacattttttgcatgtgaatatctattgtctcacaatttgttgaaaagactattcattccttgctgaatggtcttgacactctttaaaatttccaaaatctggtttctctttcattcatatatgtttgtccttagggaagtaccatactgtcttgattactcttgctctgtggtaagttttgaaattgaagttaagtcttcaattgttttgattattctgggtctgtgaggttgttttgagaactcctctttacatcctattacccagtgacctgtacaaatgtacaataaatttttgttcaataagtggaataactgaaaaatgaacaaggtctgttaacctaagaatatcacttgtaaaaccattaaagagcctgatccttttgttaaatgcctcagttaatattttaaaatgtaacttaataaaataatgttgctctggacttaaaatgtgcagtaaatatcttgccatctttaatatctataaactaaatattcttaattcaattgtatcagaattagcaagagccctatattctaagaataatagatatactgcatctgtgattagccttcttgacttctgttgtttgtagtaatggtatgcttataacttttattctagtccatctgtttataaataaaattattagcaagcttatataatttacctttaatataatataaataaaatacatgttttataaatatatttattatatttataaatataaacataattattagcaagcttacataatataatttgcctttacctttaatataatataaataaaatacatattttataaacatacttatatttataaatataatataaataaaattagcaagcttatataatttacttttaatataattcacttttatgatgtcatctagaataattcttcttagtactcaaactttctacattcagatacaaatgactactttgcctttaacagagtgaaatcagcaaagtttagaaattccccaaaggttagggaggataatagccactgagtttcagatacatgaatttacagtgctttaatcacaccacagacattaacagaccaaatatggtatactttataataatctctaaatgctctgaagcataattagtagggtagcattgagaaacatcattaataattttggggtgaaatagaatgtgcattgtgaagatccaaactttgccagaattttttttccacaagatgactgtatgggtctacaaagaagaaaaaaaacaattttgaaagattaatttcattatgctaacacaggctctgagggttcatgagtcattgcaggttaatcatgaatatttgttattcattcttaaactaaaatgtcctgagctttttactagcatgaagacggtctttttttgacagtgtgtcaaagtggcaaaatcacatgctttatggctagactgacctgttatttaaactaactttgacaagtcacccaatttctctgacaatcacaatttttgtgaggattcaaattaaatgagataatttgtgaaaagtaccagtagaatttgtcaccctgatgccctgactttgttatcagctcatattacaattgaaattcacctctgttgtactactcacaccagtataggtataaagtgactataaattaaaactaatctgaatgggtttgatttttggagctaaaagttcaccttatttgcacagcaattccaaagagaaagtcctccagtataacactgtaaaaaaaacattacattatttatgaaaaatttaaaatgaaaacagtctatcctgtgataaaaatgatatgtctaatcaaggtgtctatgcatttttttaaccacaagagacatacttctagcataagcgagatgaaggatgatcactagcattgtgtaggatacactctgcacaactgtacataatggccttgcttacttctagaatatcctgaggccctgacataattcacgttggctctttaccttgacttatccacaaaaataattcagtggtatttccaacttccaactttaaagtagtatagatgtatggatttatcctagtaattttcccaggttatataattatatacatacacacatacatatttgtaaattaatggaaaatctactcaaaatatttagaaagccattcttgtaaaatacagtgattgtcaaaatgtttctcaagcacagacataaccccctcagattagcctaaatgcaatcttttcaccacctttgttttgggccctactcaagctcttcattttagttttggaatttacagagaacttggaattcatgcttcagactgtgggaagatgagacatccagttccaaaattaggataaaatagtgctatttataagagaatttaatgcctttcaaactttagtaatataccggccccagtaagataaaataaaatataaaggattcaccaatagttgaagaaaattattttattattgtattttaaatatatgaatgcatataagtccaatataaaattgcttacagcactcaaacaaaaatgaatttaaactggcttataaattaagcacaaaaaatagtgtaataccatcaaaatgaacatacatgtgatggctggtcacagctaactattcatctcatgttctcttgagtttcttttgcttacgttgttgtgatcaactaccctccaccatgccctgagaatttttctttacttgaactattactaaactttcactgataggtcagtgtgataccatttggctttcactagtcctcaattcatcatttacctcatttttacattaaacctagttcagtgcttttctcctcagccagagacaattaatgtgcctggcatgaatgggattgacttgtagggaaactagaatgaacctctctgtttatagcatcattttaacttgctgcataatattctttgaatgaagtataacattatgagataatcctgtatagttatacattaggttgatactaaattccaagagtgttaaatataactgtcatatacatgtttgtacatatatttttgcttactgatccaattttttaaatataatattaaaagtgaatttacttgatcaaaggataagcacatttttaggttttgagattcatttttaaatgctaacccagagtttacattaattaaactcacacaggccatgaagtagagtatccatttccttttttattagatatcactatttcttttaatctaatgggtatgataaacaaaaatatagtgcttcagtgttgctctactttgcaatttttttaattcagtaaactaagtacatcttttatatctttattgcccatttctatttcttctttctttgaaattcctgtacatattatctacctgttttcattggtattgctgattttaaattatgtgttagtactctctgggagttaatattaacactgttttccaacttgtgatttaccttttgttttctgataaaatttttaaatactatagtcatatctattatatttttacttatttgaatatatctataattttctttatgtaaacttatatacacttaatatctttaattctctattaattctttatcaattgaataaaaatatattcatgttttattgtaaagataatgcttgtttattgtaaaacttcttagattacagaaaagtataaagaagcaagggaaaaaaacaacctgcagcttcactacccagaaatt

SEQ ID NO: 1882841 - DNA, 4001 bp, Homo sapiens
tccatttatgtattcatccatatgtataccacagagcacccattacatatgccaggtacatttagagaatatagagaaaagtaaagaataaatgagaaaatatacaaataacttgataatttaagatactgatatggactgtgaagaaaatttaaaaagggtgatgtgacagataaatgatatggtgggagagatcctttttacagggtctttagggaagggccctctcaaagtgtgtctcatttaagctgagactcatgatgagaagtgggacccatgtaaagaactaagaatattctaggtgggaggaagaatatgtgcaaaagagctaaagtgagaatgaactaggcacctttgaagagcagaaggaagctagtatggatagaatggagtgaacaagaggaagactgggagacaggcagggccacatctgggaggacctccttgtaggccacagagtttggattacaacctgggagtaatgggaagctattagaggtgcttcaacagggaaatggcatagtggggtttgtattttaacagatgactcactagtttagacttgtcctcagcttcttctttttttttttttgtttttttttttttttttgagacggagtctcgctctgtcgcccaggctggagtgcagtggcgcgatcttggctcactgcaacctccgcctgctgggttcaagaaattctcctgcctcagcttcccaagtagctgggattacaggtgcatgccaccatgcccggctaattttttgtatttttcgtagagacagggtttcactgtgctggctggaatggtctgaatctcctgacctcgtgatcctcccgcctcggcctcccaaagtgctgagattacaggcgtgagccaccatgcctggcctcagattcttaatacaatgctccaggcaatctctacttattgatcaatttgcacttaaggcaagaaaatttttaggcattctagctaaactctttgagggccaagttcctgttttaatcacttttgtttgcctagcactttgtaccttgcaaagagcagattcttggtgaatatttattgtatgaatgaatggtttctgcattatttgatcctttggcataacaaagtggcaaagctctctctgctaggtgactttttagcaagtccactgaatagtaggtggtagcatattgtgaaaatggattgattgacacctcacctcacctctgctcatgttaaacattttttttagttctagaaaattcagttgtaattaagctgggaggtaacagagtaggacctctccaaagccctgaaatgactgcctcgctagcttttaagcatcagatagagaaggcctgttgaacttctgcttctagtattatgaagaatagatatttggagaaactctcccaattacagacactgagaaatgctgaatgtaatataaaaaacaaccttttaaatatgtagctaagctcacaaaaattgaatgtaagtctctacagaggcaaaaatggagagagagctgacaccagggtggtgagtgaggatctaagatatgggctgccttgggagtgtgtgcagataacagaaactgaaagcttcagttttaattgccatacaacagggatgagtagggaggggtgcattgtggaatgggagatgaggacttgggcgctgttacaaggtcaacggaactgattaagagtctgcaaaagccaggaatcttgaagatctacaccctcagtgaaaagatggactagaaaaatccatttggcaaagaaaaactgctatgagaaattgttctggccttggctgggggtggggaaatgtctctgctgagaattctgaactcatgaaggtttagggcttaaactcacattatccacatatgccgtccaggaaacctcaagcaaaagaattgttaagataattccagtttgagagagactcaggattccagcagaatcggaagagaatcagctttgtaggaatgttcccacagctggggctctttagaattctcacagattaaaatcaaccacatatgacttcacaatgaaaagtttccagttacacagagtaaacaagccatcagtggaaacaacaaacagtagaattagacttcccaagaacttgaatttaagaattatcagtcagaatataaatgaaatgtcctaaaatgtttctagaaataaaagatggatttgaaaacatgagcaaaatgctattaaaaatgtctaggcagaatttgaaaaggaaacaaaatgaaatttttgaaataattatattcaaaactgacaactcaaaaaggaaaaaaaaggttttaacatctgatatggtttgactctgtgtccctgcccaaatctcatctcgaattgtaattccccacctgtcaggggagggacctggtaggaggtaattggatcatgggggcagattttccccatgctgttctgtgatagtgagatctcatgagatctgatgtttaaaagtgcggcacttccttcaacacgctccttctcctgccgccatgtaagacgtgacttgcttctctttcgccttctgccatgattgtaagtttcctcaggcctccccagccacttggaactgtgagtcaattaaacctcttttctttataaattaccctctctcaggtcgttctttatagcagtgtgaaaacagactaatacaacatccaaatatttttctgaaaatcactgattagagtttgagtttgttatactgttaaattatatacaaagtttaaaaatcataaggatataccatgatgaatttccataaattaatgtactatgtaaccagtattcagatcaaggaacagaacattaccagcatctcataaaccccctttctgttcccttcatgtaatcttttactccaaggtcaactagtattactccaaggtcaaccagtatccaaaaataggggtgtgactattatgcaagtatcctgaattcttataccattttaattttgcctattaaaaagattttattcatggatttatatactatataatcttttgtatatgacctttgtctctcaacatatgaaaaaggataaaagaacttcatatttttccatatagttatacttttcttatttaatttagtattctattgtgtgaatatgccacattctacagctgttgggcatttgggtaattttcagttttgggctatcgttttttcctgttgggtttattcctaggagtagaattgctggtgacagagtatgcatgtattcagcattagtagaaattgcctaatggtttccaatatttttctaaaccagatgaaatcttgtctggaagttcagtaaacaaaaccatattcaaaacatcaaaacaaagtaaacataaaacctaatgtaatggatggatggattaacaacagattagacctagtgaagaaagaatcagtgatttggaagataaatatgagatattacccagaatgcagcacaggaaaaacaaaaggatagaaaaggagattaagagataaaggataaaattagaagacccaatttatgtgtaattgaagagagctcagtagaatggagtcagggaaagagagcctaaaattagccaactcaatattatccaataatgtgagctacacacataatttaaaattttctagtgtataatatgtatgtttttatttaacctgatatatgcaaaatatttcagcaggctggtatgaaaattattgaggtattttacatatgtcatactaagtcttcaaaatctagtatataattttgtacttacagcacatctcagtagtttaggctagccacatgtcaagtgctcagaagccacatatggctagtggctaccataatagtgcacatttaaggtgcactatctaaggtgacatctaaggtgtataagggaaggtaaattgagtgaagttccaggcattcggagaagtgagccagttgaagtaagaggactgtgtcatgacagtgggaggaatgtg

SEQ ID NO: 1882842 - DNA, 4001 bp, Homo sapiens
catgagagtaaaggaaaatattctcataatgaattaactgatgtggaacctcagcagagaaatgaaaattataagaagaaccaaatagaaaaataatgaaatggaaaacacgcacacacacacacgcacacacacccttgagcttatccacagagtagaaacagaagacagcaatagaaatcatccaacatgaaacatgtttgaagaaaatgaacagagcctttagagacttgtggagtgactgagtctgagaagaagaggaagacacagaaaaattaaatatggtacaaaagtaaagaaactactaatagcagaaaacttacaagatgtggtcaaaaaccccaatttttatatccaaaaggtgaacacaccccaaaaagaaaatacacctaaaaccatacccaggacatgttgtgatttaggaaactgccagggcagcattttcaggtaacttgctatgatttctcatttgtaatatttataataatggaaaatatgttctccttagagttttcttctgaagaaagtctgatagttcaggcgtagatgactttccagtctagttttcgaggtttaatttctcaccttgaaaatcaattaaatgtgtttcttcaaaatcttgcagtaaaattgatgctccagaaagatgtccacggagattctgctcttgtgcatccgccctgcacagatctgaggctgggcctataacagcttcaggagcatgtagccgtggagtacttaagagttaatctgaaaaactaaaaggaaaaatgaattaagggaattaccacggttaagttccaccagcaaattattaaaagtggtccaaagggatacttaaaaaggattaataaaagagttttctcatttgtagaatcctagcccatgacttaatgttgaggtttgctttgtcttttacattaacatgtacgcagaacatttttcatgacctcaccacacaaacttccctcatgtgttgggagggaccaaggggccctctggtcctgcacctgcattaattacggccgggaggtccacactaggacccgaaggcctgggaaccagcctgggtgggggcagagaagtggtggatgttgctcccaaagcgacttaggggctcccttcctggtggctgtttcctgactggatgcagcagggtcaggccttttccctgtgacattttcttctttttattacagcggcaggagcgtccctgtgagggtcgtgacccaggtgtgggccatgcagccaacccgaggtccaaggggcgtcctggggagcataggttgatttgtgacagcttggagagatagagctaaatttaggtgaccttgaaatagaagtgtcaggttaccagggactaggtgttttcacgtcaggcagtgaactgatcgtttcagacactcaggagagagaatcccacacgggatcgaaagacgccagagaactgccaggcccgtgggccttaagtcccagccatagggaagggctgcactgagcacgtccgaaggggcatagaaacggatgggcgagaagaaagcgcagggccgaggggagaggcaggaagggaaagtaggggtgcgccaagttccgggaggacaagcgttactatggcaaccctactgaatagactgaatagaggcgaccacttgctggtctgcgggaaatcgagctttcaaaacaagtcctgaagcaggaatgctggggaacgagatgtcacaattaccaggtgagaccagcggccctgctcaagctgtctcctgacaggcaggaaaggtttggaaacagccaagctcccccacccaccgccaaacgacacgggacgcctggagggacgcggaggaggagggacctctgctcgatgtatctgtatctgagagctgtagtctcttattcgctcgcagctgtagtctcttacttgctcacagggctgcctgactacaatcccagcataaaccaggattggaggcggtgcgtgtcccaggagagagggccagcgcggtgcgcgcctcgccaggcatgctgggaggagtagtctcctagccacttccggccgttggtcacaggttgccggactacaatcccaagcatgcattgggattggggattgcggatggagttggtaccttcagggaggggcagtgcggtgcgctcctcaccaggcatactgggagtagcagtgtttttgctttttgttttttttttttcttttctttttttctttttttttgagatggagttttgctcttgtcgcccaggctgtagtgtaatggcgcgatctcggctcactgcaacctctgcctaccggcttcaagcgattctctcacctcagcctcctgagtagctgggattacaactgcccgccaccacgcccggctaagttttttatttttagtacagacggggtttcaccatgttggccaggctagtctcgaactcttgacctaaggacctctcaaagtggtaggattacaggcgtgagccaccgcgctcggcggggtgtaatagtttcttaaccacttctggctgttggtctcggggctaccggactagaatcctagcatgtgcctggtggtgcgcagccccggagggaggggcagggccgtgtgcaccgctccgcttccaaagccatgctggacactgattctgcgccaaccctggctgaggggagcgagtccgcagagggacttgaggggcaggtctgggctgggcagtgagaagggtggctgcgaagtgcacctcgcctttgcccaaatcgggcaggtctcatcctcaccccacctcctgctcctcagctcggtttcctctcccacctgcacccggggtctttccagagcatcgcgcctccttcagcccagggagccgcctgctttcttaagctgctgtgggaactggcctgaggtccagacgctgtccattgtgctgctgccctctgccctctccaaccggagcgcagttcagccgctcttgggagtatctgctgcctggcccgccggcgcacgacttcggagctttgcaggggtgggcatgggctgtggcttcctggaaaggtcaccctcaccagcaccttttccgtggatgtgaaagttgaggcatgagcggggtggcgggggtgggccgggggccattattggtttacccaggagatgcaagagcagaggagtaaccctgattcccaggcatgtgtcctgagccagggacagactggccagaccctgagaccctggggccaccagagagcagcctactcccctgggttctgtgcctaggttctgccctgggttctgggtgagggggggatgacccaccggctggtggtcctgagagggccagcccatcccccttggagagggtctttgtgctgatggatgcccgcagagtcctgggcaccagggacacttgctccaggcaaggggccttcctggggaacgccacagatttggctgaaaggcaagcagacttggtcagcttttccacccagcccatctggttcttgcaaggctgaaccccagtgtgagcgctaccctcaggacagtcgggatctgtcccgcatgttccccacagctccctcaggcacacggggcaagattctgtgcaccttgaataccatgtatgtcctggctgtgagtatatgctcatcctccagaagacagatgtcccagagcctcaggataagcccgaagggggtctgtggggacagcagacacgaaaggacctggcccttcaaggctggaagccagtgtcctactgggagctcagtctgtagtgccagggacccctctgcatagagtgagactccccccacacacatgaggctggattagacaagatccttcagctcctcatagggttggactcatctcagcagaatatggcctctggaagaaggggtcccctaagaatttggggctttcctgggctcttgcaagataagtcttggcccagtctgcccacaatcctggccctgagcctcagcctctgccatgggacaccacctctca

SEQ ID NO: 1882843 - DNA, 4001 bp, Homo sapiens
agcacacttttttaacataaagctgttcaggactctattacagaagaggctatacttccttaattacattctattctacagccacctcaaaataactagtgaacacgttcaaccaggatcattggcaacagccaatgggcacagtgatctagaaatggtctagccaagctgtttgggctgtagaccatggcattcctaagagctaaataggcaaggagtccattaatatttcacttgacttatgtcaccatggaaacccctggagtagtgaatggctttggggagtggtcagattcaaccaaaaataacagaaatctctgtcccccaggtaaaggattcctactttgtgtgtgtctgtgtgtgcacacaggcacactcgagagacttttggcattctttgaagtcactggaggggcacagagataaacccactcagccttggcctccaagactaacagaacaaaacgtttccctgaaagaataaaaaaaaaatacaggcataagaaaacacacaaacatgggcttagagatttaaatacacacacacacacacacacacacacacacacacacaggccctagaaggaacatacaccctgagatacgcactcattctaaaataaactcgggaatacagaaggacacgggcatgtcctttcagagaggcacacttctaggccctaagtaggagaaggaagaggggagaggaagaggcagggagagggacagggaggggggaggagggagggagagagagagagaaacgaagaagggggcggaggaggagatggaggagacactctttattctataggaggagacatcacggaagagaaatcaacactgaggccttggccgggcgcggtggctcacgcctgtaatcccagcactttgggaggccgaggcgggtgcatcacctgaggtcaggagtttccagaccagcctggccaacatggcgaaacccggcctctactaaaaaatacaaaaattagccgggcatggtggcgcggacctgtaatcccagctactcgggaggctgaggcaggagaatctcttgaacccggagacggaggttgcagtgagccgagatcgcgccattgcactccagcctgggcaacagggcgagactccgtctcagaaaaaacaacaacaacaacaacaacgaacaaaccaaaaaccaatgaggcctgaagataaagacacatgtacaaccacggatgtcagacttccagaggcacggccaaggcaaaagacaaacacatacagactgcagcaggcagacaggccggttccagagtcaggctccggtgaagctccgaagaaacaaacacgcagggagatttcggaggcgtccgaggacaccgtggggcccggctggctccctctgtctctgtgcgcgccccttccccgggtcaccccgcctgcgcccgacctgcgcccgcgcaccgcgccctcggggctccctgggacagcccgcggcctggcccgtgcgcccgggctcccctctccgccggcccggcacttcccagctctgacgcgggagcttctttcacaccaatggggctcgcgcgcggaggggccctgcccctcctccgggaaggtgtgtccctgtttcctcacctgaaacttcctaggagaacccgatccctccctcccgtcgggcggccaggggcgggccgcgggtggggcggccgggcctgcgctggggacggctctggggactgcggccggcgccgggacctggaggggacgctggggccgaagcagcatgtgacaccgaccaggtgggtgccctcctcccgtctcggccctgggctcccggcggctgtggagcccggcggaggtggggcagggacaggaaggaagaggaagccaggcctttcccagggatcagcccccgctgggtccggggcgcaggctccggaaatgggggggctgggcccgcaggcagggctcggggtgtgtggctgaggaccctggtggggaagaggagaggaactagaggaaatgttgttgcctacaagtttgcttccggtcgggtcccgcctaggaaatgggcaccctgcccccagacgttccccgggccaataatcagggctctttcttcaaagtaggcgccctggggaaagctaagccatatcagaaggaataactgagattccctttctaggctgttccttacctggagaggttttatcggctccttttccttaaccaggccggggcctttccttatgtatctccataggtatttgcatactgtgtgagtctatgtgtagcttctctccgtgttaaccaaagctccgtaacctggaacagtgaatcctgccctgcccctcaccccagttccctacatatggggagcctcctaaagcttgatgtgaatcacaacgttgcattcttagcaaggtggaaagaagttatttagagttgggggctgaggtaggcgttggggtgctagaatgcggacgcagagctctagaacccctgagcatcttttgcagttgccttccggcaagactaccggaggagagccagttgtgatactacgtcatttccagatctcagtccctttcttcccttcctggatcttgggttccaaagacagatttgccctcctgtctacctagaagtgaactctggccaggactcttgtctggttgagagagaagggtgtgtcaaacagatgagagagggtggttttcctttcgagcttcctccctagcttgctcccctactgcactccactgtctggccttgcatcttgggcctaatccagaggtcccagctccagctaaaaagctcttgatgtggcctctgtctcagacgtcttgttttatccacatttggagcatgaagaagttcctggcataggccttagcaaaatgggtgtcatttgttaaccaatctgtgggcctaaaagtgaagccatggctagtgaaggagtcctggggagctgggaagatgggatgagggcgtgtcagttctgggtgagactgatatgcaggaggaatgtatgtcatggtcctagtggggaggagagagaaatcaggaggagtgcaaaggaatccctctcatcaacagaatatagtgattctcaatagagagaagagtgttcatatattagaggtcctgagagtgtatcagtgcccttaacgcggtctgtctgaggttccgtggccacgttacacgtggtgtctgtgggatagacaggaatacgtcatttgtggtgtctggagaggtcagtcgctatgtggtatggacaggaatggagtcactcgtagggtcttgggttcaacgggagcagcattactcaagtgtcagtggtgtagacaaacaggtgaccaacagctctagtgtagacaggggctgggtcactcacagtgtctgtggagtaagcaggagccgatcacttatagtgcctgcaaggtagactggaacaaagtcaccctcaaggtctatgttaatacacaaacacgtcactcacactaatgttatctgtgtggatgccaccaggaccacagatgagattgtagagtgtaagtcagcattgacactaataatgttcttatataaactatctggtctataaggcagttggtgtgacattttcagacattagagaatagataaatgtgtattacagctttcactggcatggtgggactttcctgcaatggatagaacacacattgtagtagtcagtggtccagaaagctacccctgttttgatatctttgtagtattgagggcagtgatgtcaaacagtgaataaagttatatatctatgtggtgatcttattttaacctcaatattattttagtgatttgtaagtcagaatatttgaaatcaaccttgctagaaaatccaggaagcatggtcctcaaaaatatatatatggcactgagtctcagttcaaagatttggcagtttgattggggaggggttgtatccttgaaatacagtgttgtttctagtgactagaaatagacaagagcta

SEQ ID NO: 1882844 - DNA, 4001 bp, Homo sapiens
agactccatttttagtgataattggatgcttattatcacctagagatctggcttgacagttattttgcactttaccaagaaaaaacaagtagctatgccttggtggcagtcagatggccaacacattaaaatgagtttgcataacccactactttacctatggtcaagtgtttaaaatgtcatctcatctatttaatcaattccattaagatgtttttctctcaatttctgtggaagatgcagggaaaaaaggtaatatgtatttgtctctagcattttcacttgatgtgtgaggtcacagttaaaagcagctaccacatatttggtcaagagttcagggacaatctgggcagcagggagcagtaatgtctccatttaagatgcaggagccaatgactaggtcagtaattttccactggcttcaatgagagccctgacagggaaaggggtaagaggaaaggaagaggagattgtgggaggaaaccgagctgggcaactgcattgcggagacacaaggactgccagccaattgtcttcgacttgcctatgccaaatgttctggaaatggactaaagtgggagaaatatcacagcaaggtgggactgggtggcgtgtaggggaagcagggaatcagcaggggctgtgacatcagaggaatcctgttcttaacagctgttcgctactggccagttgtttaacctctttgactgagccttgatttctttaccaagtgggcaaaaaaatactcatctcgtatgattgtggggaaagcagatgagataatgtgtgtggcacagccatggggactggggcccagggcatgctcaatagtgctactttcccctttccaacccggatgtcagaggggaccacctgccctccaagatctagagaagaggatctcaaatccccaccccatcagtgcccaattttagattttggtgaagccccaggaataatatttcttgcttccactccactatgctttcctcaattaggtttttgatctagcccagatgttgacctcagcttcagacacacacacagactcaacactcacactcttacacgctcacacacacacatgctcacacacacccactaataaacatatacacaccactcacacacactcatacatgcacaatctcacacacatacacacaacacacacactcccacacacgtacatactctcacatacacaactatatacatgacctacgttcactgaaataatattgttcagcacattgtgtatacagcattctaggaaacatcttttaaaaattgtattaaactcacgtttctgtcattatcctgttataaacccttcgattcacagatgataaactcttaacaacacagggcatcggtaatgatctgagcatcctcttttgaacatttgtctacgaacacttcactacacacataggccctcacacacacaatccctccctcacacagcccttgcattcaagacccctgtgtgtgttccagctgtgctgaaactctggggctatggagatttatgctataaaggacaggggtacaaactgagtacagtctggttttttgaagtcttggacatgtccacttgggctgtccttcctgccacatttcccctgcccgctgttatccctttccccgcttccttctctcttccctcactctgcctttctggcccccattagggcacttttttctaacgtaaggtggtctagcatttctttgttgtcttcttccagctcaagcccacaggctcttgttttctgcttccaaaggcttatggaggtgttctcctaaacacacatggttcctgtcccaaggacttccggagcagctggagaaatgcaatatgcttgttttgctctgttgccttctccctgtgcagtgttccatggccagggtggcggtggcagtggtgttaatacctggagagcattccacgcttttctccattgctgctaacttcccagggtccccatctgcacaaaatacgccctggatcaatacagactaactgatggcataaacacagctgatggcatcaatcactttatgatgcaaattagatacacattctttctagaacagaggcacccatcaccaccgccatcagaggtcattgggtgttactactaacttgggtgacactaaacagatctgggatacaatcctagctaattcgttgcgcactgtctgacattgggtgaatcgcttcaccaatctgtgcctcaatttcttgacctttaaaatgggggtgatgatacttgtccccagagcgaaatgtactgcaaagtgaatgaagctaaagcttaggtagccctcacttctaaagacctgcttttgtatctaatttcatgttggtaagttggtgttccttttcctttctaaagaaattattttatttttttcctcttatttcagtctatttgtattagctcatatgtgttccttttcaaaaaaggctccccaaattgtatacaattctggacccaaaacacctggcttctgtgtgggttgggaggaggaaatgagacgatgtctgtaaatgctcagccaagactgttctgagtgctccaggcatggaagccattgcagcgagagcaccaggacgtctgaacccatcctgctggcaccttcttctccatgtcccccctaaatgggcctgccaactggggcgaacttctgcaggacacagtcactcaggccttggagcctccgtccagcttcttgcaggcacagatgcatgcctcctcttgacgcatgcagcttggaagctctccctagacacagccagcttgacagaggccacatcgttcaaacctcgtgccagttcccctccagctgacatggtggtgccaaatgggaggaaccccatattagtctgttctcacattactataaagaaatacctcgcctgtaatcccagcactttgggaggctgaggcaggcggatcatgaggtcaggagatcgagaccatcctggttaacatggtgaaaccccatctctactaaaaatgcaaaaaattaaccaggtgtggtggcgggtgcctgtagtcccagctactagggaggctgaggcaggagaatggtgtgagtctgggaggcggagcttgcagtgagccgagatggcaccactgcactccaccctgggcgacaaagcgagacactgtcttaaaaaacaaaataaaaagaaagaaagaaagaaagaaataccggagacagggtaatttataaagaaaagtttactaggctcatgattctgcaggctgtacaggaagcatggcagcctctgcttctggagaggcctcaggaaacttacaaccgtggcagaaggtgaaggagccagatgtctcacatggctagagcaggaggaagagagagagaggggaagtgctacatatttttaaacaaccagatcttgtgagaactctatcacaagaacagcatcaaatggatggtactaaaccagcagtccccgacgtttttggcaccagggactagttttgtggaagacaattttttcacggactggtgggtgggcggggaatgatttccggatgaaacaattccacttcagatcatcaggcattagattctcaacctagatccctcacatgcacagttcacaataggcttcaagctcctgtgagaatctaacaccaccactgatctaacagaaggtggaactcaggcagtaatgctctctcatttgctactcatctcctgctgtgtggccaggttcctaacacagtaagtacccatccatggcctaggggttgggaacccctgtactaaaccattcatgaaggatccacccccatgatacaatcccctcccaccaggccccatctacaacactgggattacaattacacatgagatttgggtggtgatacagatccaaaccatatcaaagcccctctctctacccctcagcaaagactttgttatggccacttgggacctggactactgcagtgtgttcccatgct

SEQ ID NO: 1882845 - DNA, 4001 bp, Homo sapiens
tgtttttcttgcttctttctttttttcttttgaatctgacatcactacaatattgatttttgtttctaccttcattttataatcatataccttaccaagctacagaaacgaggcagaaaaacaatttccattttatttcagtacatcttcctaaaactggatcctggtttgcttagttgttattaacaacacttgatgagctattattaattaaataattatcttttatctcaaatgtggaggttcttgttcctatgaagcccacccttccctttagcagcagcaacaacaaaacgacaggcagcttctcccttcatatgggtcctgacagatgagccttttggacccctcgtaaaagtagtaaatgcacctttttcttttatttacattaacatttgttttttcttaaccatgctctctctattgatttagcattaatcatgttgtttcctacagaatttaccttttgaaaaataaaaacacaggcagatacatactggttattcacaggaaaattagggtgtaattattagcagactaattgtttcagatttactatgatccatgaagtcttgtatttgacagcttaaagaactatgtggccaagaagacataaatgtgggccagtagctagcagcctctgcataatacaactccaaatcaactggtgaacatttaaattggagtaatttaattaaaaatttgaatttctgggcttccttgaaaatgtattgtttgaataacaccagcattcctgcatatcataagttacctccatgtgaatagggacagccccttttatccacaacatatcccaaacactgcatgaatcctctgccatcatggctgagcttttaatctcttcattagaatctctttttggttgattttctaatcagggaaatatgtctctcttggtcatattgctatcaaaagtaagaaagtaaaagatcaatagaacgacatgatatttataaccagccagcatcacacatttgtataaactgcttgtcttctctgagcattgaagttgtgacttctaattttagaagctacaaatcattttatctctgtcaggactggttctcgccacaagttgtgtaagtactgctcatttatgaaaataaattaattcaacctcttcttcatggccccagtgagtgtgcaggtgtcatgaagtaatggacagcacccaagttcacagtgaatcagattccctccaatgcccaaatcactgaggtgtgttcacgagcagaccacagagtactgtttttagtgttttaccagacaggacctaactgctctagcaaagaggaaagagaacattatctcacaacatgtgtaccttttgagctttactaagcctattttatggttgaggtaaaattttcacccaaaggtatgtgaaatcaaaccaaaattacagaattgttgtaatatattgcaccatatgcataacctcaaaagatactgcacacatatgtcccaatctctcacaaataagagaaaatcatttgtaccaactaatttagctttcaggaaagcacagaaagtaaaataaataaaaatgacattttttcctaatcacctattacatattgctactcgtcctgacaaatttgtaggggttgttgatggatgtatagcgttcagaacattaatgattttacaagtttaaagtaatggtgtttgttcatgtacatatgtgtggatgaatagttgtatggatggatggatgatgtattagttggttttcatgctgctgataaagatgtacccaacactgggcactttacaaaagaaagaggtttaatggacttacaattcctcatggctagggaggcctcaccatcatggcggaaggtggaggggaccttgaacatggcggcagcaagagaaagaatgagagccaagagaaacgggtttccctttatcaaaccatcagacgttgtgagacttattcactcccactagaacagtatgagggaaacggtccctatgattcagttatctcccaccagatccctcccacaacacgtgggaattatgggagtacaattcaagatgagatttgggtggagaaacagagacaaagcatatcagatgaatttgaaaaggatagcgcatagaaattttggatagctaaagaagtaacaaactaagattctgtgtaaaaattaagatggtgggaaaatgaattcgaatatgtagcgtgtttcaaagaggaatttttgacattttgtttttgttttcagggtactgtcaatttcattttaaattctgaggctttgtaatattggatttatcatacacctggagtcagccacaactgtaaattttgatctgaaattcttcagttagtataaaatccctaactgctttgaaattctgtgtagtgataatgcatcatctgaatgctttgcatcctttaatgacataggtatcttctgaattctggctttgcgtaactgttgccaacactgtaagaacatcagctcgtttgaggctgggtctttgttctctctgtttctgggccctttccacgccctttctcctctccctcactagcacaggagttatctttccaatgcaaacctggacatgcattttccacttagaataccatcattacacacatgggccctcagcttcctcagggagcattaagtctttaatcttccaattctcaccctgcacatgaattgtaagccttatgtagtaaagtcacaaacaactgagcgtttttagaacagtcgaatgtgctattcccctatctgtctgaatttatcttactcagtcttaattctcttttcactggaaagttcctgtattgttttttgtttgttttttaactcaccccattacttccacaaccccagtcttgacacaatgttatggatgtagaagatacttcagagtccagaagttgatcttagacatttaataatggtttctaaaatttgctttaaaggagctttttgcaggtctatggactaacttttgccaacaattcctaggcttttgtttgatcaaaactgatttttcacttcttttctaagatatggtaaaataattttctgtactgagtgttttctaatatagtttattagtagaaaatttgagacacagtaaggccaacatatcagaaaacacctaccgtgaaaagatactaatattttattactttattaatactttatattattgatacgatatttataaccagccagcatcacacatttgtataaactgcttgtcttctctgagcattgaagttattttattttatataaatacaattattactttattaaaatacatgacatttatttactttattacttttattactgtggcaggccatcccacagggtgtagaccagaggtagggagctcagggaagcaccaggatctgtcaggaggtagaggggatgagggaactgtgggcaaggtcctttattgtagtttccatgggaagggataggtgcagcagggtaagcaggcttaggtctggctaactggaataattattccagtgagttctggggcacagaggctgatcctagttgtcttgtacctgattctgggatgaatagggaagacggatcatggtccagaagagagaaagctggataaaggaagcagttggggtgtggactctggattgattgctttatatttggaaagtgtgcttaccatctctagaaattggctaactctgggaagaccagtccctctagggtcagcaaggccccagatgtcaaagcattggagcacagagattaaaatacatggtcaggatagaggggaagttgaagccatggcagctccaagaaatgacacaggtggctgccattacccctgctcccaccctccacagctaccagcctccgtttactcatagggataattgattttttcctcaatattatataaattactatgaaaagagtgcctaaaaacaagttgcttatcactatttgtaactaaactgctatctt

SEQ ID NO: 1882846 - DNA, 4001 bp, Homo sapiens
tgcagagggtcttctgggttgagggggcccccatatgacctcaatgctgggccattatcttcctgggctcacctcttactttatttcttcaaaaggacatatatgtgtcatctcatgtgccagattcttctttcccatttgccatcatatataaatgcatgttccaaatccctggtaactccaatcgtgacaactgcagtcttccctcccctccccaaatgcaacaggcatcactccttccccattccatctcttcctacctttacaactacctgctggatgctatgatagtcactgcacaacatctctgggcctggcatcaggagaagaggaacagagtagggtccaacaagagctgataagattgctgtaaaatagcaatccctatatcaatgtgtccatggtccagcaatcaagcccagagaactcattccattccctgtggaaatttagtgaaaaaacccttaggatttcacttagggtgaaattggtaggatacagacattcatctctgactctgaccactctatccctggataaccttccttccgtggaccttgtttctctcctatctaaaatggggtgcaccattgctgggccctccatgactcagcgttgctgataggaccaataagatcataatggtgaggacagagtatgctggatgcaagaaggcagcaacagtactgagataattagcttttctgtactgatgagctgcaaatgcacacacaggaactttcttttcaggctttcaggctgttaaaagatactgtgatttcccagttcacccctagaatttctttgtgttgtcctgaagaaaaagagagggaaacagagggaaggtttactccacagttgctattttagtatccagaagagtcagccttgttgcttgcagagagattgttatctctttcagggctcagtgaaggtcaccttcaaatcttttttgctaagccagaggctcctttttcccttgtgctcaattgatgcaaaacctgggacagtggagtgaagagcgggtggaaggtgcactgtgcagcagaagccctgagagctaagagaagaactcggttctcttggtaggaaagagggaggaaaaggaacaggtaagagggatgtttaatgccactccccgccactcccagcagtacactataatagatgtctgggaggaatctgagaagtcacttttaataatgcagataaggacataattaatgcccttatctgcaccagatctcccccaggaagacaacaggataactgggagggaagggttgtagatttggagtcacagctcttctatggatgcctgtgattaggatgcagctgctgcctggggggccggggctaaggaggggaagggagccaccagaaggattctcagagatgtgacaccaatggcaggagctacagctattaaaagagttgatagatgtaattcacttagcatacagtctagcacattctcaacactgcaggagcagaagcgaagggggtattcaaacactgactcagcccttcataggtgtagcaagaggggcagggagtgtatcacacaagagatacacagagatgcctgtgtccagaattggtgggttcttggtctcactgacttcaagaatgaagccacggaccctcaccgtgagtgttacagttcctaaagatggtgtgtctggagtttgttccttctgacgttcggacgtattcgaagtttcttctggtgggttcgtggtctcactggcttcaagagtgaagctgcagatcttcccggtgagtgttacagcttttaaggtgtggggagttgttcgttcctcccgtggggagttgttcattcctccccgtgggttcgtggtcttgctggcctcaggagtgaagctgcagaccttcgcagtgagtgttacagctcataaagacactgtggacccaaacaacgagcagcagcaagatttactacaaagagctaaaaaacaaagcttccaccgtgtgcaagaggccccaagcaggttgccattgtgcgtttattcccttatctggccccacccacatcctgctgattggtccattttacagagagctgattggtccgttttacagagagctgattggtctgttttgacaggatgctgattggtgcatttacaatccctgagctcgacacagagtgctgattggtgcatttacaaccctctagctagaagtaaaagttctccaagtccccactagattaactagacacagcactgattggtgtgtttacaaaccttgagctagacacagagtgctgattggtgtatttacaatcctttagctagacataaaggttctccaagtccccaccagattagctagatacacagtgctgattagtgcatatacaatcctccagctagacataaaagttctccaagtccccacccaactcaggagcccagctggcttcgcctggtggatcccgcaccagggccagggcggagctgcctgccagtcccgagctgtgcacctgcactcctcagcccttgggcggtcgatgggaccgggcgccgcggagcacggggcagcgctcgtcgggaaggctctggccgcgcaggagcccaaggcgcggggggagactcggacatggcgggctgcagatcccgagccctgccccgcgggaggcagctgaggcccggcgagaattcgagcgaggcgccggccggccggcactgctgggggacccggcgcaccctccgcagctgctggcctgggtgctaagtccctcactgcccggggccggcagcgccggccggcccctccgagtgcggggcccgccgagcccgcacctacccggaactcaagctggcccgcgagcgccgcgcgcagccccggttgccgcccgcgcctctccctccacacctccccgcaagcagagggagccggctccggcccagcgagaggcttccacggtgcagtggtgagctgaagggctcctcaagcgccgccagagtggacgccgaggccgaggaggcgccgagagcgagggctgctagcacgcttgtcacctctcacccccacagaggaaaagcttcctgagacaagaatcatcatcagccaccctagaatccagaccctcatttgaacacctgtgtgaaacaagagaccagagtggtgctatctccaaggacaatctaagccagcctgctccttgtaatctggtctcatccctgccctttgccccctctccacatatctctgttcttcctttcccaggttccctgggtgtcgcccacacccacgcctgcaccaagacaaatcgcacggggctaggctctcccgagaaggcctttgcagaccgctgctggcctcccagcaagtgctgcatctctgcgagccactaagcatgcagggagtccctgaagagacagctttgaaatgggatcattttcttcctggaagcaaaagggtgtttcctcaagacactatttctccattaaagtatgagaaattccatctctgaagctcccagtggggccagacatcgggttggggtggggacgggacgttgataagagtcaaatctagaacactgtgctcttaccccctcatttcacctggtgtctctgggcctggcttctgggagctatttgtgatgtgtggtatgagtgcatgtgctggaaagtattcttgtatgagttcaaatttatgtgctcaccttgccccttggggtattactggccttcaagtttgatgcttttggaagctgagttctctcccgtcctttcaatcaaactcaacccttgctgcagtaatctgtctttaacaactcccactgcaagtcaataaaatgtcaatttaattctccttttgttaaatcttaaatctgtgtaacgcctctcctttcctttgcttgttaagtgcagctcatgttgacctcccccagcatctcccagcctcctcagcaggggcacctgcccttgagcacaggcgcagacatcctcactcagatgggagtcagt

SEQ ID NO: 1882847 - DNA, 4001 bp, Homo sapiens
tttttaaaaagtattcagctttgtttcatgcaggcccaggaattgtaaaaacaatatttgctgcagcagcagaagctgcttcctagtctagcacattgattttgcaaagttgtttccaagtacaggatgagcctacattttctggctcatgcagggcaatgtgagacagaggcagcttttctaatgctcaggcttaaactcccacatcactggaggaacaaacataagctgtgcaagtacaaattctgggcaatcttgaaatgtttagagcatattttcattttcctctctgccccagtatttgtcagagtaacttttgagaagtgaaatggctagaatccgcctgcaaacaccacactgtcatctcttcctctgccagctgcactttccacttatatctgcagacttagagcagtgattctcaccaacgctacccattagaatcacccaggaacttcctaaaaataccacttcccaggtcccattggttgctcaggggtggggcgtgcttgggcatcagtgtttggtatgatgcccagatgatcccaacatgcagccagaatttgtacctctgtccttgatctttctactccatcgtatcagttattgctggcagagagagtacatcaaaaattattgttgaaggctgggcatggtggctcacacctgtaatcccatcactttgggaggccgaggcggatggatcacttgaggtcagcagttcaagagcagcctggccaacatggtgaaaccctgtctataactaaaaatacaaaaattagccaggtgtggtggtaagtacctgtagtctcagctacttgagagactgaggcaggagaatggcttgaacccgggagctggaggttgtagtgagccaagatagcgccactgcactctagcctgggcagtaaagcaagactgtctcaaaaatacatacatatatatatatatatattatatatatatatatatatatatatatattatatatatatatatatatattttatatatatatatataaatatatatataaattatatatatattatatatatagttgaggctttatttaatgcagccaggtttgtaaaagactgctgtgttggatactttgaaccaagccttgtacataagccttggaatcagacacaaatggatttaaatctcagccatttcatttgatagctttgtggctgtcaccaaattgcttaacttctctgtacctatttcttcccctataaaatgggaatcatagaatctgtgtcacagcaacactccagtgattaaatggagtaatgggtgtaaaacatgccctctccttcctaccccgggtcacctgtgagcaggtctctgcgttgactgctttgatgtgttacctgcctggcccttaacgcctgccttccttcctgaactctactgactgcgccccaacccctgccctctctgcccacattttcaacctgcgtcttcttctcatcaccagcttgctgtttacgcaccttctgttctttctactctagcacccagctggtaacttccctttcctgccttctactaccctggtgtgacagcaagagatgatattgtttcacctgctttctccttttcctggagtttgtcagctggccatttattagcagcagaagcagcgtgcagtatttttgtccattaaagctaggggattagtttcctagggctgccatgataaattaccgtaaacttagtgccttaaaacaacacaaatgtactcttgcatagttttggaggccaggagccacattccctccaaagctctggaggacgatccttccttgactctttcagcttctggtggctcccgtggatttttggctctggcagcgtaactgcaatctctgtctctatcgtaacgtggcgttctcccgtgtgtctcctatgttttcttttctggctcttgtaaggatactttcattggatttagggtttgtcttaatccaggacgatctcatctcaatccttaccttaattacatctaaaaagatttccaagttaagtcacattctgaagttccgtgtagaattttggagggagacactattcagtccactacaactcataactagaatgcaatcgattcagtttgctatgttttccttgacgactctctggcaggaagcagtgtggaagtattgccattggctagtctgggtggtacacacctgtaatctcaatactttgggaggccaaggtgggggtattgcttgaggccaggaattcgagaccagcctaggcaacatagcaagcaactgtctctaaaaaaaaaaaaagaaagaaagaaaaaaagccaggtttcatgatgtatgcctgtagtcccagctactcgggaggctgaggcaggagggttggatcacttaagctcaggagtttcaggttgcagtgagcaatgatcatgccactgcactgcagcctgaatgatagagtgagactctgtctctaaaaataaataaataaataaataggtattctgttaaggcagtaggcccaggatggtctaaattctagatgtcaacaaggttcaaagtgaaagtttttggtaggctgagtgattgctggagctcttactgaaagttggtggacacagctacttacagtataataatttgctagagataattatactgctgcccaaacctattatctccccagccaagctaaggcactgccagtaacttcttctggtttcccgaggaagtgtggccagcagcagtagcgtattgttttcatcatatcacattatgttcatatgaagaatgttgcatttgagtggcatttgcatcacagccagttgttgcccttccactctggtagagaatagattcagcttttattagtgtaaatagattagtcccatttaaggtctgctggaagtcattatgaaaatcattaggttgaaaagagaactgatcaattgattttttttccccctgtaagctctgagagatggtgctaatggtctcactgtgctaaaataagtcttagaaccaagatgccttggggtctaatctgattcttcagtatttatcgatacctaaagaaacattaacttatcactcatagttttgattttctttgcattttactcttgttattttatttattcactaacagtattattttgcctcttcatgtcaagaataatgacttgtggctacctaagactttattgaggaagatggagtggaagatgcctgtgttcttgtctttgtttagattgtccagcactcacctgttcacttccaagataccagagcaaattaaattttttattgctaatagagacttttgggatctgataacattcgtccatgttttcagatcatttttatcaagttgtgttacttatgtattgttaattctattacttatttagtacattttaattttgtagttttgttgtgattcttcatagccatctttgaaagtgcttactgctacatttcatcatggtgaggtgggaaatgcatataaaacatagatttggtctccataatcatcagctcagtgaccttagacaagtccaagctacttgtcttgtctgagcttcccctctctcatgtataaaatgagaatgacacttgcccagacttcctccaaagactaggatgagaagtactatggtatcatggattcagtagggctttatgaagtcttctacatattgatctgtttcataattattattagtggtccacatacccacatgattgctccattcagaaaaaaaatccaacagtgttaacaggagtggtgctaagaaaacacctacatgaataaaaatattttctaccaagtagaaagcctcactgatatttactggtttgtttcatatatgattagacaaccagtataagaacctggcaatattttttccccagtttatcacaaagatgttttaaatatacaaaaaatcaagaaaaaaatgtccagtgaacacccacatactcaccacccggattcta

SEQ ID NO: 1882848 - DNA, 4001 bp, Homo sapiens
tgcacctgaaaagaattttacacccatcactaggacccttccttatcaccctgggaagaacaaatctccttttctgagtgttctagagagcctcaggtgacaaagttgctacctatcacagttggctgcagacgaggtacaactttcacttttcctttaatatttagtagttttcattgctcagtgttaaatctacctaccatattcaggagattcatgagtttatgaagctaatcccccaagtcaagaatgtttcctctataattgaggcacaataatcaggaaattttaaaagacagtcatgaagggaaagaatgtttcttaccaataaaatgtgtgtgctctcccaagcatgctgtgttataatttttttagatttggacaaacatctaaaatattcccagaaatattaaagaacagtaaacatcagtttaggaaacaacttttgaactacatggaaccaatgtaaaaactaaagttacattcattctgaaaatggcaaccaaatgaaaggtactgtcagatctttccaagagcaatattatgagaggaagagaataaaaacaatcatttatgggaaagcatgggcacatgtgcacacagccatctacacagatgtactaacccatggtcatccactcgtgttcctctacatacttgtatatttggatacctctgaatgttctcattgctaagtttagctatgtatttttacatgggcctattcatgtcgctatttttctatatcaaccacttatacaaaactccccactctgtccaaaacatacagaccaaagtgacagaacatggacattcacaacaaataggctaatggacagcctcaagctcttttgtttccaccagttgagttgtgtcctgagattcaatttatttgtcccaaacctgagaataaaaatattacaaatgaaatgcaacaagaaatttactgctcctatgaaaatttggttaaaagtattaaaatattttgacaatggaagtaattaaaaatgtttttgaattcgatgtgggcaagaaaattgttaaagattcgggaggaatatattaacattctaggaagattctacactctttaaaagtgtctcagttctcattctattttaaaaagtggttatagtagttgatgaatttcaggtgtgggagatacaagaaacacagtgacaagttctagcagtagatccttttctaaagacaaggacttgtaacaacctgtataccaaaagatcaattaaaagatgcacatttgtatgttttaagttaaaaaaatttaaggtgtgtatacatgttttaaggactccctgctttaaccacatttttcaattaaccagttgcctattagtctggacctcatcatagaaaaactctcctaatacagataacttaccttggtcccatcctaccaagtgcttgagtcaccttctaaaaagatgtacatgttgcatgaaagtataaaatcaaagctgaggttttaaggaggaacggaaaaaacaaggagagaccaatatagccagttttattcagttatgagatttgggtcagtttagttttctaatgccaaagcaaagagacaaattgaccgcaagattcattgcatccaaattaagaaaaaataaaaaatgaaaaagtggttgctcaggcaaagcacagcttttcctgatatcaagaaaaatctgataaaaagtggatcaatctagcaaagttgtttggatactaactatagctgaaataaggtacattcatgaaatgtttgaaaaactaaaaagaacttcattatatggcagtacttcatcataaatttccaacataaccttgtactaatagcagctcatttactgagcacttaccttaccaggaacagggttcacggcttatgtggatgatctcattttgtcctcacagcatcctcctcacagagggtgggtgctattattagcaccattttaaagaggaggaatctgagtcccagaggccaagtagttgggccaaagttgtagggctaccaagcagaaaaccagctccagcatgctaaaccactttccagcacaaggctgaacttttcccttctcaagtatttgcagttcgtgctactgagcctactccttggacagcgtccctcagctgcttttgcttgcaatcgttctcatacccgactacacacatattagaattacctgggaagctttaaaaaacaagccttttggctccaccctaagtagctctgattcaatccatctggggagggacttggtatcagtatttttttttaagtcaccttaggttgttgaccattgaaggtgaggtaaacacctgtttatacttaacgataaatgaagatttgcaaaataagtgtcctgtcaaatacattgggggctggtgtgattgcacaatggtccattgtgctgctgctcttggctggccctattttgggcagctctaatgagagttgatacacttataacacctcactttgtcagctttgtggcttcagtcacaattccgtgttaacacaaaaagtttcgttgacattacattacattaatttgtggtcagccttgaaagactcttctgattatttttgctatgtaacaaatcatctcaaaacctagcggcaggtaacaccaccatttcatcatgctcacagattctatgggtcagaaacttggacatcgcaaggcaggtgtggtttatctgtgctccacagtgtagcagctccagctgacttgattgtactgggcaggaattatctggaggcttcttcatttatagatcttgcctgggctggaatgacttgaaggctggctgcagctgagactgtcaactttaacaccttacacctgggctctccacacggcatggcctcttcctcataccttctgagcctcaggatagttaggcttttcacctggcagcttggggctctgggagtgaatgtttattccacctgacatccatggtcttttcagcttcttggttttttctgtccctactttggacaattattttgcataatttctgctgaactgtagtggttaaaaacagtcacaaatttcctcaagaggaggagaccaaaagccccacaagtgctttttagcctcaaggataaaatccattattacgtttccttcaaagtatataattaccatcttaataactgtttaaatatttattgaataaactggtagagccaattcattatatagtttataatggtttttatacctgttggaagataaatacaactgtatttaaagtgcactttgcggttgggcgcggcggctcacacctgtaatcccagcactttgggaggccaaggcgggcggatcccatgagaccaggagttcaagaccagcctgggaacatggcaaaaccccgtctctactgaaaatacaaaaatgagccaggcgtgttgccacgcacccgtaatcctcgctacctgggagactgaggcatcagaatcgcttgaacccgggaggtggaggttgcagtgagccgagatggtgccactgcactccagcctgggtgacagagtgagaccctgtcaaataaataaataaataagtagtgcattttgcagtgcatgtactgttacaatctaactgaagtattttattgttacccctgcttaaagcagtatagatgcataactatgtctgtttaacttcattccatagtgagacagagacacttggtttcaaacatttttccttgaatattactgtgcaagttgtgctaaaacataataaaataaataaataaataaataaataaataaaaaataaacaaagtgccctttgcttagcaaagaatgcatctaatcaggctcattcagggtggtcagagcaggttgcttatggagaagagatccacgccacactctgctttcaaacagcttttcatcaatagatagcattgcttataaatggggtctgggaaaaaataatggcctcagtcaagctaatcaatttttctagataataatccaa

SEQ ID NO: 1882849 - DNA, 4001 bp, Homo sapiens
ccaggactaaggtctgagagggcactgatgaggatcaggcctagccgtggggatgggagtgacatgcttcgctaggcgtggagagagtgcagctctgtgggtctgtgggtgtccaggctccagcccaggcaggacgtacatgggtttgggagccacaggaagctgaaatctctcagaaaagctcaaagccaccctgcctgcccaaaaattgcacaggacaaaccaagactttgggatactgagccccgcagagcaggtgagaacatgctccttactgacagatgagaaccaagatttctcaggcttcccactcgggtgtaagagctggcaagagctgcaacatgatccaaccactgcctctgcatttgtgctgagagtcaaagagaagcagaggagaagggtggtaaggaccaccggtctctgggagccccctaccaccatggcaggtctctctggtgctttggagagagctgtgatcgggcctgtgatgatgaatattgagtgtcaacttgattgcattgaaggatgccaagtattgttcctgggtgtgtctatgagggtcttgccaaaggggagtaacatttgagtcagtggactgcgagaggcagaccaccctcaatgtgcatgggcaccatctaaacaactgtcagtgcagctagaataaagcagactcgctgagtcttccggacttcatctttcttccatgctggatgcttcctgcccttgaacgtcagactccatgttcttcagctttggaactcttggacttacagcagtgatttgcccggggctcttgggcctttcagccacagactgaaggctgcgctgctgtcggcttccctacttttgaggttttggaacttggactgatccaccactgtctttgctcctcaacttgcagacagcctgtcgtgggactttaccttgtaattgtgtgagtcaattcttcttaataaattccctctcatgtatacatatatcctattagttctgtccctttagagaactctgactaatacaaggccactgcactccaccctggatgacagagcaagatcctgtctctaaaaaaaaaaatgctttgccatggtcagttcctctaacctgctcatggtgcatttggtcccaggccttgccctcttctggttgaactccaatttttttagctgctgagggtttaagatgggccctattccaggcatgtgccactgtgcttggctatatatattttttatattattctgtagagatgggatcttgctaggctgcccaggctggtctcaaactcgtggcctcaaataatcctcccaccttggcctcccaaagcactgggataataagtgtgagccactgtgcccaggctccagggaataggccctgttccagcacttcttgtttgtttgtttgtttgtttgtttgcttgcttgttttttgagatagaatcttgctctgttgcccaggccagagtgcaatgatgcaatctcagctcactgcaacctccacctcccagattcaagcaattcttgtgcctcagcctcctgaggaactgggattacaggcacacgtcaccacgtccagctaatttttgtatttttagtagagacggggtttcaccgtcttggccaggctggtcttgaactgctgacctcaatcaagtgatccgcccgcctcagcctctcaaagtgctgtgattataggcgtgaaccaccatgtccggcctattccagcacttctttaagaggagacccttgaatactgagaagtccttaaaggccaaggaaatggagctttagcagtgaaatttcaggcagagagtaaggcacctttgtgagaaaatgtcctgagggtacaggcctgctttcctgggtggggcatgctttgagtgttctaagaaagataaggtgtgcacttacagttttgctgacatatggtagaatattggatcaccacagagggagaaggttactgtggcagtgcagcatcgtaactgcacagagcagctgtcacttttcaccacctagaagggaatcagtaacaacaatccactgttcagtcagcactctagagcactcagtcagcaaaaactctagagcctctggactgtccgtccctacgtgtgtgtatgtgttatttctttctttctctctctctctttctttctttctctctctctttctctctttctttctttttcctttctttctctcttttttcattctttctttctttttttgttttgtgtgtgtgacggagtcttgctctgttgaccaggctggagtgcggtggtgtgatcttggctcactgcaatcttcgcctcctgggttcaagcgattctcctgcctcagcctcccaagtagctgggactataggcacccaccatcatgctcggctaatttttctatttatttatttattttttttagtagagacagagtttcgccatgttggcaaggttggtctcgaactcctgacctcaggtgctcagcccacctcagcctcccaaagtggctgggattacagacataagccagtgtgcctgaattttttttttttttcttatgacagggtcttgctctgtcatccagggtgtagtgcagtggcgtaatcatagctcattgcagccttgaactctggggttcaagcagtcctcccatctcagcattctgaatagttgggactacaggtgcatgttaccgtgcccagctagatttttaaaaatgttttgtagagatggggtcttgctatgtcacccgagttggtctcaaactcctgggctcaagtgatcttcctaccttggcctctcagagtgctgggactacaggtgtgtgccaccacacctggctaattaaaaagaaaaaaaaaatgtgtagagatggagtcttgctatgtcacccagtttggtctcaaactcctggactcaagccatctgcctgcctccacctcccaaagtgctgggattacaggcgtgagccaccacactcagcccatgctacttatgtcttctctgattcttgtagtgactgactgcaaaaccgttcaatcaagaagagcctttggctcattttcaggaccagcagagaagggggtggaggagctgaatttccctctgtgtccatgcttggcagcatcaggagctaaacacagaggtacccaggatctccacttcatgcttggaaactccctaccactcagggtcacccaatgtaggcaaagaccagtccagcttgcactcagcactcagtcaggtatcattctttattttattatttatttatttatttattttttatttattttgagatggaggcttgcattgtcgcccaggctggggtgcaatggcacgatctcggctcactgtaactaccgcctcctgggttcaagcaattctcctgcctctgcctcccgagtagctgggattacaggtccctgccaccacgtcctgctaattttttgtatttgcagtagagacggggcttcactatgttggccaggctggtcttgaactcttaacctcgtgatctgactgccttggcctcccaaagtgctgggattacaggtgttagccaccacgcctggccgcaggaattattcttatgactctgatgccctttggaaacctgggaatagacaatgcaccatcttcagcccaaatcagaggaggaaacattcacagatttctacagatcatgcttgtggtggttttaaaatatgtctgcaaagtgtttaataggcatctcggccaggcgcggtggctcatgcctgcaatcccagcactttgagaggccaaggcaggtggatcacctgaggccaggagttcgagatcagcctggccaacatggtgaaaccctgtctctactaaaaatagaaaaattagctgggtgtggtggcgggtgcctgtaatcccagctacttgggaggctgaggcagaagaatcgcttcaacccgggaggctgaggttgcagtgatctgagatcatgccattgagctccagcctgggcaac

SEQ ID NO: 1882850 - DNA, 4001 bp, Homo sapiens
atgtgagttcagttcgaaagcaaacttgtggttgaattaaagggtccaggatggtttcaagcgaaaaaattcaagatctggtaaatataaacgcttgtttgtacaacttaaagacatatattagtaattacatagctcgattctaatgggcactttctttgggttgaacttgattgctaatcattcacccccttaggaaatatggtaaaaacccaccagcttctaaataaggaagttactgttcccttcttagtatcagaaagttaatcttgtgaacagtgtagtttctctttgatgcagatgctgttactaggtcagcccctccatgtccttattaggtgttctggcctgttgacccagagaagcaattaaggtcagctccccaagacctttcacttgtctgcattctgagttgtatgacaggtgctatcttacattgacaggtgctatcttacattgagagaggacacttccctagttcatgaggtcactgtgtgcagtaaatatactgttggtataacccagacacgtccagaggagatgtttgttcttatgaattcaacctagttttgttttgaccaaaagctagaaatagcaaaatcttaatgtgaaaactgtagaatattatgggataaaaaacctaagaccacttttaaggtagtactctaagaaatacagcttaagaaattgaatggaaaatatagtctaaaactggaagaccttccccttaagtatctacttaaactgttaatgatctgtatctttgaaaccacaaggcatggcaaacctcaagactagcattcttagattgccagtgcctccagcatgtaagtgactccacctgcttagctttcagcagccctggcctgtattcagcatacccattgtctttcaaattgctgatcttgctcctcatttataacttataatacccagtgacttgaagatttaggtattttattttaaagtccctaaaaatcacatatatctagttctttcccagttcagccagtgaatgggcactgggaacctaatgtgaatcttccagatgtatttgtgctctgaaaaaaatgattcactatatcataagaaaaagtgaccaaggaggcctttttctgtttgaaccaagccttctatttattgatgtctgctttgtaccttgctctctccacccccatcaaaaaaaaatattttaaaatgtttagctgtagcagtttgctagctcagattgagagaagagtagttgccaagacagactctttctttcatcattaaattacttttggaagtgggttaaggaaaagaatgcccacttttggaaggcattccttttaataaaaaaaaggcattccttttaaataaaaaaaagatactgattttctttgttgttattgcttcattgaatgctgaaggtaaacaacttgaaagtacaaatcactattatgattcctctaattttttttcaaaaggatgggcagatagatgctgatgaattgcagagatgtctgacacagtctggcattgctggaggatacaaacgtaagttgacagtcccaaagtttgtctaaatatactcttgtgtttcctatcttagctgttacttgtgattacagccttcaagaaaactgagcttgtcggatctagcaaagtttagaattccgaaagctaaaatacagtactatttcaaaatgttgatttgaaaacagtttttaaatcactccaggctgggcacagtggctcacacctgtaatcccagtacttcagaggcccaggcaggaggatcgcttgaagccaagagtttttggctgcagtaatctatgattgtaccactgcactccagcctgagcaacagagcaagaccttgtctttaaaataataataataataaattattccatcctacctgccaatctagtggatttctcagatttgggttttgtgtacctagaaccagtgagacagtttgggtggcctccttcacagaggacaaggtagggtgctgaaatggaatctgccaggtcaggggtcattaactgacattaggaactgatatttactgttatttgccaagagcctactctgccctgacctggtggcacttagggctttgagttgctgccctgcacccctggtccctgagtggcctatcctgcactcctggtctctgagctttgggcatgctcctgctaacataagtggttgccatgacatccctcaggtctttcctcttccacttcatagaatgtattcaggctaagtgggaagtggcctttctacttactggacctgctgctccataattcagcccttaccctacccctgccttttgaacactctgccatgagctgagagtaatgaaatactgcaaagatgctccatccctggcagggcacagtggctcacacctgtaatcccagcactttaggagactgaggtgggaggattgcttgagcccgggagttcaagactagcctgggcaacatagtgaaaccttgtctctgcaaaaaatttaaaaattagccaggcatggtggcatgcacctgtggtcccagctactcaggaggctgaggtgggaggattatacaagcccaggaggcggaggttgcagtgagccaagattgtgccactgcactccagcctgggtgacagcctgtctcagaaaatccaaaaaattgctgcatcccaactgggggcttctcatcatccaacacatatgaagtggttcctcttgaaattagatcttgaacatgatagatttccagggtagagaataatgtcttagttcaaatacattaccaacttctttgccagttgttaattgagacaaaacatcaaattgaagacccaatttcatggttagctgtggattaaaatgttcaaactagaattcacagctgtgaatttatagtggcctttttttaaaaactatttgacatggcatgtattagatggctgtctttgaactctttgcatttgttttcattatcctttgttttatgtgactttagtatcctattactctttcctaattagaggaattaatacaaacgaagaacctttcaagttcctgttatttaatctagtcctaaacaaaataagcactttttggattaggggatgttattctttactgtgtaggcagtacatttaaattgttaattgttacgcaattgagctggtaaacaaggtaggcctgcctattagcagggtttatcaaagtgcagtgagatcacagcatggcctgttattctacatcctttcagtagatgaggtgtggcagattttagaatctgactaacaaaatgggttgtatattgttagagagcagtccttttaaaatttcattgagaaagccacatttagtgatggccttagatcaatgcattaaagagaaagcatttcctgaatcatggggcctatgtgattgaatccatttgcctactctctggtggccgtactgaaccacagaaccatcctgcctatgaggtgtcagtgttttgtaatgcagatattatatggccattagtcttttaaacccaacttccaaaccaaaaagcacaggtccgaattggatgagcaggtgggatactccagctcagagcctatgggcccttcttaaccagtttaaaaggaagcagtcatacctagaggtggagttggtgagagaagttgtgttccagtcagtaagattgtaattcagcttctcttttttccctgaatttagttgttcgtctgtgataaggttgagagaaacagctggaggtagggctttccttctaggtccattatattgtatgtttctgtgagaagaaaagatgtttgaggcattctagtagaatgaacagaagagaagaaaaagagtaaaggtaaattacagcagagattctttggaaattattaaaattaacattatttaatttaaataatttcaaaatgttgaattaataattttaattataatttatagttataattatatgtagttacatttacgtaactaa

SEQ ID NO: 1882851 - DNA, 4001 bp, Homo sapiens
ctgcagggaacagtatgatgtgcctcaagagtggcgaaaggaaggcacccctggcatcttccagaagacggccatctgggaaggtacctctagttaagggcaaggagatgagcagagctggagggtgaagaaaggcagggcggtgcctgtgcctgtgggggtgacgtggggtccagcccccctttggggtggctgtgactgacagcccgttccctacctgccgctgcagccccggacccagacaccacccctgctgtgtgcaagagtgcaggagtggttgagaaccagatcttgcccccagagaccaactcagtgagggcatccagtgcacactcagctaagcggggtgatagggccattcccagggcagagggagcagaggggtggacctgacccagcctgggtggggatagggggtcagattagcccccaggtgagactgactcttgaataggtgagtaagcaggtgtgcttcctccttcaacacagtgggagcccagtaagcagggaggccttatcccagtgaggacaagggaaagggcaccccaggcagggggcactgcatgagaaacgcctgcagttgggaaggagcttgcttttggcggggaagggaaggcaggtcaatctcacaaagaaagagtgagggacgtgaggttggcagggctttgggaatggggtggggggttgaggggctttggccgcccacctttttttgtgagacagagtctcactctgtcacccaggctggagtacagtggcacaatcttggctcactgcaacttctgtctcccaggttcaagcgattctcctgccctcagcctccctagtagctgtgattacaggcatgccaccacgcgtggctaatttttgtatttttagtagagactgtagagacagggtttcatcatgttggccaggctggtctcgaactccagaccttaggtgatccgcccgccttggcctcccaaagtgctgggattacaggcgtgaaccaccatgcccggtcacattttgaattttttttactcaaaaggccattcagggagcactaaagcagggagaccaggtggaggaagtgaggctgagggggtggggggagggagaggagacgcagcctggtggagatgaggctgagtgggtgggagagggagagggagtgagggaggatttccgggattgtccgagctgacccttgggccccgaaggatgggggagaagcagccggtggagcacactgagttggggggctggtgggtgctgaggaggaggctgcaaggctcgtgcctgtctgaatctccgggaggggtctgcagcctgaaccacgtactggaatagaggtttgtccattcatcggggagaatgcagagtgagaagtgaggagggtgaaaggagaacccccccccaggagcccccgtagaaggacaggtagggcatgaggaccccgatctaggaggacgcaggaaaagaggggtcagaggtgcagggagagccccggagtccagagagtgagtggttctgcgggaccaggaagtaagtgatcgctgtgctccgggaggatgctggaagaagattccagacgcagcttttttgcctgctatggttaccgttgctatgaaggagggcggccctgctgacccagagccagccctgtctcccgctccactctgacctcacccctgagtccagggctgaacgcacgctcctccgtggcccccgcttccaccccgtgcatgtggggggcttctgctccgctccctcctgttccggggtccagcgggcggctccccaggcaggctctgcacttacccgcagcccagtgatgcagggtcggaggggtggtcggcagtgggaaagggcgtagggcagatgccgggctgactcttccttttgccagaggaaatcccctctgccccctagtcctccccctaccaaggctcccatcactcatcacggcctctccctacagaccagaatctgagggagagcagattcggccttgagaacgcctacaacaacttccggcccaccctggagactgttgactctggcacagaggtgactcagctgcgagctgcccccaccccctgaggctgctccacttcctctggggttccctcttcccccgggactcccttctccccctgggactcccttctccccctgggactccctcccttccccctgggaccccttccctttcccttccccctgggactcccttcctccccctgggaccccttcctttccccctgggactccctccctccccctgggaccccttcccttccccctgggactccctccctccccctgggaccccttcccttccccctgggattccctccctccccctgggaccccttcccttccccctgggactccctccctccccctgggaccccttcccttccccctgggactccctccctccccctgggaccccttcccttccccctgggactccctccctccccctgggacccctcccttcccccctggattccctccctccccctgggaccccttccccttccccctgggactccctcccctccccctgggaccccttcccttccccctgggactccctccctccccctgggaccccttcccttcccccgggactccctcccttcccccgggactccctcctcccccaggactccctcctctccttaggactccctccctctccctgggacactctccctacccctgggactcccttctccccctaggactccctcccttctcctgggactccctcctcccccaggactccctcctcaccctggggccaccccttcccctgggactcccccctcccccgccactccctcctctccctaggactccctccctccccctgggactccctccctccccctggggttccctcctccccgccagggctccctcttcctcctggggctccccctttcccgggtctgccccttggcctcacctcttctctcccgtcccccagctccacatccagaggccggagatggtagcatccactgtgtgagccaacgggggcctcccaccctcatctagctctgttcaggagagctgcaaacacagagcccaccacaagcctccggggcgggtcaagaggagaccgaagtcaggccctgaagccggtcctgctctgagctgacagacttggccagtcccctgcctgtgctcctgctggggaaggctgggggctgtaagcctctccatccgggagcttccagactcccagaagcctcggcacccctgtctcctcctgggtggctccccactctggaatttccctaccaataaaagcaaatctgaaagctcagaatgagaagtgagaggtttccttctcctccttctgcagttggggtcaggttaggggtcagagccctcctgggatgggatttctcccaggactggctgctgaatggggcatggaacgaatgctctgggccccttcctgtgtctttgcagggagccccctccccggctccagtcaggacaggtctaggcctgcctctgctgaggtccctgtggcagaaaagcctaatgtcaggttctggggacaggagaggacctcagattcaaccccagttggccagggagtgagcacttggctctgctgagcttgcacaaggcagggtcactccagatggccatgggagctgtgcttacctcggaacccacagaccaaacccaagaactccctgcccaggcatggccatgtcttcagggcatactcataggacaataagaagggttattttatttatttatttttgccgagacagagtcttgctctgttgcccaggctggagtacggaggcacgatcttggctctctgcaacctccgcctcccaggttcaagcgattctcctgcctcagcctcctgagtagctgggattacaggcgcccgccaccaagtctggctgatttttgtatttttagtagagatggtgtttcatcatgttggccaggttggtctcaaactcctcatc

SEQ ID NO: 1882852 - DNA, 4001 bp, Homo sapiens
aataggtatgagttctttttgtggtaacgaaattgttctaaatttgattgtggtaatacttaatagttacacatatctgtgaataaactaaaagtcattgaattgtttgcttttaaacaggtaaattgtagggtgtgcgatttatagctcaataaagccattactttaagaaagcatagaaattgatattgtaagaaagagaaggtgaatcagtcataacgtgagcaaacagaaaatacaaacccataggttaaggccttcctggacaggatgcttgcaatcagatgggaggcatttcaatccctactcactgataacttgctcaatacatgggggtgccccttctcttccccttttcatttccacattcatctttttctgcagccagcccctgaccttctcagatagttccatagagacttgctctctagggctggttagttcagcctccactagataaatgcctcccttccccagtatccccaaaaggccatggcaccctccttctcactgaagaatgagggagagcagtaggtcccctctgctaatgctggacaaagcaattagtgcatttcttatgactagttaattagctttttatccagctttttaaactctggccacaactctatggcctcgaagtagagtgtgagtcatccaggaagcaagtttctctactgtgtgcctgatgctcctgagtattattcgcacagtgatgtgtctgtggctgcctccatatgcccccacttagatggatgcttgtacagacgtttccaaggatatcatctgctggctcttttgttgtttctaatcaaagaaccgacaccctttgatcacaacagatcacggtattgtactacaaagactttgttagaaagacttaaattttacacgcttgtagctgtcacagaggttctgacagtatttacttttaccccacacaagtaaagaaaaaatgcatttgatcagatcacatggaaaatatgagtgattataaatagtaaattttctagaaccatgtattgttcactgtaaggaacctagtcaatgaacattttttaatacttgctggttttgagtgccaggttgttgcaaaagtcctcttcttcctcccaagtatagagactcctctaggtagataaactttctgttaattggaggaagattggccctgtcatggaattaatgaagctaaagacagacgtctttggggaactgagtccctgggtagccactttttgggcaggcttcagtatccaatggcctgcgtgaatgtataggatggctggctccccttcaagttgttcatggcctttcctcctttttcccataggacacctgagacaggcacccccacaaaatacaaataaatgccccttcacgggagtgtgaagacaaagcaagtactagaacttcttccttaaggtctcattcagagtgttttcctggcaacccctagaggaagtgggcacgggctacagtgactctgttgttctgtgtcttccctcaggtgaaatctggccaccctgggcaccctatgacagcagcacacgtggggatgatattgtgccttgcgctggcctctgcggttcccctgacatatcagattttagactttgctcctcctgctttctaatgtcacgggctaagccatctctaacaaaagactcactgttcctgggacctgctgttcactcaaacttttctcatgctaacaccaacacatataacacattcacacctcctcacatcctgaccagaccattccaggatgcaattattgtaaggattaggacgtttcaccgcaaatacagaaaactctaaaacaaagtgctgaggtaccgtggttgtagacactgcagtatctggctctgtctccttctcttagcgctgccctcttggtcggggggccttgtcctcagcctcactgtctttacagggtcaagatgacaatagcagtcccctgggatcatatctgaaacagagaaggggaaatctcttcctcctcaccctgtggaagataaaaaagactttctcagacacacctgccccacccccaccccccagcaaagttccccttgcctcattggctacagctttgtcatatgcttaggtgtgaaccaatcactggcaagggaataggattccctggatgtacttagtccagttgtgacccccttcctggagtgcagatggtccagcctctcctgaaggggtgaggaggcctgaacggaacagggttctgttaagggggaagagggaaccaagaacatccgccacaattatgtcatgaatgtcctcagcccttagagtctctaaggccaccaacaaaacactgagaattccaagacgcatggcctctcatagtcaaaaagcttattatagtcttagttgagagccaagcaattagtgcaactattcacttagtaataatatcactccctgaaaaaaatgttctgctaacctactacattaagatgactgacaactcatatgttgttttcacttgttagtgctttatggtttgaagcactttgttttatggttatgaaaaaaatataaatccattaatttaaaactggatagagtctttagctctaatgagaagtaggacagtgagggttgaaggttttgattcttgacaggctttaacatccctgcgcctgatgtaagttggaactatattattagaaaggcagggaataatagtagatgattcagcccactgccgcttgctatgggagggaatttttaaggctttcatttatgagaaatagtgatcattagcagttctttgtttttaaaacagagattcctacaaacggtcaagtccagtggaataaatgtattggtgcctaattggagaaataatttcaggttattcccaaggaaaagggaacaggcagagggttttggagagcagattcctgtttttcagttttgtgatgggccagggtgcgtaaagatcactggatgaggggtcacgtgacctaagtctatggtagttctttctcagcatttactttttgtgtgtccaggggcaaattatgttatcattttgtgactttgatgcttatgtgtagaattattagtttggcccagatcatctctgagggtcttaaaattttatgatttttctgatctgcctgtttcctcttgccaatttatggtgccttggtggtcccccaagggaacaaccctcttgtgtgtaaatcagttacactcacatatacacatatttcaaatagcaattaccagtggcatcatttgttccaggcacccagcctgtaagacatgaggactgttgggtgtctgtaccgtaattgcttttcagtcttcactcttagtaagcccagaggtagtccaagtatgctccaaggcggtatcatacaagccttttggaatgtgacctacactatgaaacccagcacgtacacacacaggcacacacacacaccccacacacacaccgtgcacacaccaatacttcattccatatgtacttattatttaccatgttccagattttagagatactgcaatgaacaaaacagacaaaaattctggaccttgtggaatttctaaatacagacagacaataaaccaaaggaactatatataatttgtatatataaatgtgtatcttatatatataattatatctaattattaatttatatggtatattagagggtgataagttctatggagaaaaataaagcaggaagggagacaggaaatgctgggggtaagggggtctgagtgttaagtttagtggtcagagaaggctttactgagaaggtgacacttgatggtgagggagccagccatgcagatatttggagaaagtacattccagacagaaggaaccgcagctgcagagtcccaatgcgagagtgtacctggtgtgttccaggaacagaaacaaggccagtagagtgagaaaggggtaaataggactggcagggaggaggaggcggatcatggagggcctcgtaggc

SEQ ID NO: 1882853 - DNA, 4001 bp, Homo sapiens
gagctgctttccttgccttggctttagatcctttctgcgttctgcctcctggttaccccagaatgttccatgtggcctcatatcttcttctacgtttcccagtacaggcccagactttgagtctctctttaaatagaaggcagcataggcttcttctctaggccataaactctacgagtgagatccaaatctgtctcttcttcctgttgtccacagtgcataacacagagcctttagtggagctagccgtattaactgaataggaaatgagtgagtgaatgaatgaatgagtgaatgtaactgtgtacatctccatttgtaggggcagcactcatcctaatctgtattttaataagattttacttaaaaggaaaaaaaagttacatttttagaagtgtatacatctaaatggggacaatctcttaataatccaaaaggggaaaaccttgtaacagtataatttcagccattagagatgagcagagagggagagggacaactgatttggtgaacctccttaattgtactacattaacggtcacttacttcactcactgggaacagttggcctatgtagattctaaacaatctaattgataatcacccattaaaaatgtaagaaagagggccgggcgtggtagctcacacctgtaatccaagcactttaggaggccaaggcgggcagatcacgaggtcaggagtttgagaccagcctgaccaacacggtgaaaccctgtctctactaaaaatacaaaaattagccagacttggtggtatgcgcctgtaattccagctactcaggaggctgaggcaggagaattgcttgaacccaggaggtggaggttgcagtgagctgagattgtgccatcgcactccagcctgagcgacagagcgagactctgtctcaaaaaaaaaaaaagaaaagaaaagaagaaagaaagaatggaaggaaggaaggaaggaagaaagaaagaaaagaaagaaagaaagaaagaaagaaagaaagaaagaaagaaagaaagaaagaaagaaagaaagagaaaggaaagaaaatacatatataagaaagagaagttcattcaatacttgctgctatcttttgcggcaaggggaaaaaaccctgtttctataggggaaacctgatgaacatgatttacatatgaggttcctgggtcctaggagtgatataataataatagccagttactgagctcctgttatgtactaggtactacactgagaattttacatacattatttaatttgtacaacccaacaacaagtgttatttccattttgttggtgaagaaattaaaatttggaaagagggcacacagcatcctatcctagtgatacgtgttattttctgtgaaactcttacccctcctccaggtcttaaagaaaaggtagtgtcatcttgtaaacttatatttcacaaatataaacttgggtatgagaaacagaagggatatgagaaatacattattttccttgtagaaaaaaagttactagctagtatctatttcaatattaaatttagtaattagtttaataccacctaaggtatttgtgttaatatacttactgttgtttttaacaatcattttcaagctgtgaaaaagggctcctatgacatggtgtcgactctgatcaaacataacactagcctagaccagccctgtgtcaagcgatggtcagcaatgcatgaagcagccaagcaaggccgaaaagatatcgtagctctgctgctgaaacatggaggcaatgtccacctgagagatggatttggagtcacaccactaggcgtcgctgccgagtatggtcactgtgacgtgttagaacatctaatccacaaaggtatgtgaaaaggagttacacttcctgacttttgtcctgcctctcgaactctccttttctccattcatcactcttcctcacctgaatgtaactaggggagctcctcttcctctgctgaatggaacttggcatcaggttttcccacctggtccctcagtagacccttattctacaactcagctaagccctatacattgtgacctacgaatttacaagcccagtcctgattgctctctcgagagacagttcaatctgcacatagatggcccatcagggcctcatgctcatcttctccttaactgaattcctcctgtttttctactcttctaatgtaataatttctctcaacaggattgaaagatcgtatttatctctaattcctccatcacctgctttcctaaatccaatcagttgcaaattcttgtagcgtttctcttgtcctctcattgcaatccatctgccatcctgatcaggtccctcaattctccctggaccagtgcaaatagtttctaaccattttctgggtttctagtctcccatcagagaatcacagtacatactgcaacttggctcctctccctatagggcagctacaatagtgtcaactatccaaaaaacaatccctattgcatcatctcaaattgttttaccacgtttatccctcactgctcccatcttgtatcctacactccagtcaaaatatactagcagtattcccaaacgtaccttgcagggtttgggtcaggtccttgcctttatctcttcagcacaattcaaagtcaatctcttgagacacctcctccctaaatcctttcctaattctttccaacagattgtgacactgccctttcttaaaccctccaggtgttttatacaactacagaaccatgagttaaggagacctgactcctaaactggttgagccactactcactgtgagaccctagccttattccttaaatatctggtcctcagcgtcctcatctgcaaatgacctctagaaccgcatgatccccagtgattccctgtaggaaaaagactaacatttttgaggtgtcccaatacaaccacgtttaattttcaaataagccctgtgaagtaagctgtattaatcattcacagatgtggagatggaggtgcacggaagtaaacggcttgcccccagctctcaccataagcagcagagccacagtcccctacatcatgtctccttgtcttaatgtcagtgtcactggaatatcatacagtttgtgctgtctgatattttgtttcatttcccctctaagctccttagagtagtcacacttattcttcttagggtcacacacactgattgcacatagagggcaataaagtatttgttaatactttattaactgtaagtatttgttaagttaaaatagagggggccgggcaccatggctcatgcctgtaatcccagcattttggaaggccaaggtgggtagattacttaaggcctagagttcaagaccagcctggccaacatggcgaaaccctgtggtggcacatgcctgcaatcccagctactcaggagactgaggcagaagaactgcttaaacccaggaggcggaggctgcagtgagctgagatcacaccaccgcactccagcctggtcgacagagtgagattctgtcaacataaataaataaataaataaataaaataagaaactactgtctttaaattaaaaagtctaatgagcctttttcagaagaatttgcctgtcatgaaaattgacttagtttctctcatgatttttggcccaaagattttaataaaacaaaccatgctgcatgcatgactgtttattgaaagtatagaaaacatggaggcccttaattctatactttttaagtactaaccagaaaggaacacaacaggttttgtgggggttttttgtttgtttgtttctttgtttttgagatggagtctcactctgttgcccattctggagtgcagtggagtgatctcggctcatcacaacctccacctcccaggttcaaatgattctcctgcttcagactcctgggtagctgggactacaggtgcacgccaccgtgcccagctaatttttgtatttttagttgagacagggtttcaccatgttagccaggctgatctcg

SEQ ID NO: 1882854 - DNA, 4001 bp, Homo sapiens
tttgaagattaaaggaatatggataggccaggcgcagtggcttatgtctgtaatcccagcactttaggaggccgaggccggtggatcacctgagctcaggagtttgagaccagcctggccaacatggcgaaacctgtctctactaaatctacaaaaaatagctgggcatggtggcgtgcacctgtaatcccagccacttggggaggctgagtcatgagaatttcttgaaccctgacggtggggggcggaggttgcagtgagccgatatcgcaccagtggactctagcctgtgcgagagaacaagactctgcctcaaaaaataaaataaaataaaataaaataaaataaaataaaataaaataaagtaaagtaaaataaaataaagcaaagaatatgtctaaaaatgccttgtctggggttggtacacatacagtgagcacggaataaacgagagtgtctgtccctttgctgtccttttaagtttcccgggttgccgagggcagcgttgcagattgcagtagtgcagtagtcccctggctgcctgtgccgcctccctttgcgcgtctctgacgagcccactgtaagggactttcctctgtgctctgatggcttctcacctctgcaggtgcacaaggcagccctgaagtagcggtgagttgacactagggtgagcttcgcccagtagagcggggattcacagaagagtgccccgtggctttcccgaggtgcccatcagaggtcctcggaaggcacccggaggaaaggagcgccatgtggaagaccctcagccacatgctcctcctggctttcccttttttccttgtctcattctctccacttcctcatttgggctttttggtctcacttacccccaaaaaattacctgcaggtaagcccttgcataaggctttgctttagggcagaatctaaactaaaacacacaccaagcccttgagccacaagtgcctccttcctctctccctcctgcttctatatgcagtcaaccacctcatttggttaatctctcaccatctctctcaaacatcagtccctttagttggcaatcattccagactaaaccaatatggttttagtccccaggatgtattctcatccacaatcgtcctctacaagaactctaacaagaaccgttacatttcgtccactctctctaaggtgaaacttgcagagcgcctcagcctggcttctccagggtctggcatgccagtgattactggacgtttttcctgctactttcttccactaaatctctccaagctcggaaaggttggcattctgagcatgccctgcatttcctgtagaattccatctcttcccctcttcccttcctatccgccacctttttcttaatactgctcgcgggaaagaaattcacaaaagagagccaatactcggcagagcattgagaatgcgggtacctgatctcagcctcagaagttaccagtggaaaaaagcagccgagagagatccggaagcctgagctcaagatcgtgctagctacctcccagaagacaagcgacgtctttcacttctggggcagtaccagtttgacaggataaacaaaaacagacaaaaaacctcagatgagtaatatgtcccggaaagctgacccagcattccgcaacgaaatgtgccctcgtgcacgcacacaccatgcacatctttgtcaaattcgtaatttacaagttcaaataggagggagaaacgtgttttgagacaaactgcaaatagcaccagactaacaaaacgaaatgaaaccaaagacctagacctaagaagggagggacaccccctgacgccgggtatggtctggggcctccagcactttgcggcgacccccagtgccctaggtgctcagctaccgcccccaccccaggacccgctgggattggaaaactcacccctgagcagtgcggatacctagggactgacggacaggctctgcagtggcgcccgggggacgtgtcggaggcgaggcggggcggggcggtcccggaggcggggcggtctcggaggtaggggccgtcctggaggcggggccgtctcggaggcgggactgtcctggggactgagctgtctcggaggtggagtcctgcggtcccggaggcgggttgtaccgtaggcggggctctctcgtaggctggccggtcctggaggagaggctgttctggcggcggggctgtcttggaggctaggaggtctcggaaactgggctgtcccggaggcggggcacaggctggggtgaggcggagccgaccctgaggcgggcccggggcgcggctaccgctccctgagccacgcccgtggtctcccgttccatcggtggaccccacctcgggccgtgctgcgggctctcggggcgcctaccaggtgagcgaccccgccttcccggagggatgctttggcctgcatggggccccaaaccggctccctcagggtctctgcgggttcttggatgcgagaggggacccagccagtttgctgtcgcacttgataagaaaagcaaaccctaagtctccaataaaccatatttggggcgaatagttccctaacaacaacgtatgccacgggggaggccccgcgtggaatcaggctcccttccctccgatcttggggtgggctcagcagagccggtagccgccgcgtcgcctccgtcgctcgagcctctgcgtggagggctgccccctagtggtcagcggcgggccatgcacttcgagcccggtggatgcttatggccatggtgcggggtgctcaactagggcatttttctctcaaagtatccacagaaatgctgcccagcaagttatattcttgctgggagggaaacgtgcctgtggcatcactaacacagattcgtccgtgcatggctggagaaattaagctaaagctatagagtggctggtgctcgaatttctacgcaagagaggtcagaaggtgaaaatcaaggtggaagggtgtggtcaggaggaggatttggtgtagtctggagtttaggaacgtcttacctaggaaagtgatgactgtgctagaatgaggggaaaaaagtagtctgtctgcattttgcccaccattgagtcctcattgcctattttcatttctgacatagaataggctttagtttcttaataaataactaaatatatgctaaataaataaggatatagtgaacgtccaaaaatatctgtcgaattagtgagttaataactgactcttcggaggactagtggaaatctgattggcagaggaccaaatacattcaggtttcagaaataaagagcaaggagaaacttacacagaaaagaaattgtggataagacttgccagaatttggaataattccggctagaaatccaacgtgcggtgaagtacgttgagttcttaggcttcatatcagggaacaactgacctttgggagctgaagtgggagatggacatcaaagaaagtgggtcagtaaagttccacgttaaaagctgattcaggcccgggtgcgggggctcactcctgtaatcccagcactttgggaggccgaggtgggtggatcacctgaggtcaggagttcaagaccagcctggccaacatggagaaaccccgtctctcctaaaaatacaaaaattagccgggcgtggtggcacaggcctgtaatcccagctactcgggaggctgaggcaggagaattgcttgaacccgggaggcggatgttgcagtgagcagagatcatgccactgccctccagcctgggcgacagagcgagactccgtctcaacaacaacaacaaaaagctggctcggtatcttttgtgtgtttgtactcttaggttttaaccagtctccacctacatcaacctcactcctcatggtaaagtactactattgttctaaattaactcctgagagtattttggtgttgctctaatagaagaaaggggctttaaacaaaggtgatttttccagggtcagagagcagaaagtacctgccattt

SEQ ID NO: 1882855 - DNA, 4001 bp, Homo sapiens
gctctaccactcactggctctatttactcagccaattactcaaccaactagggaacacggccagcagcaggagccaagaaatggtgagaagcccaagtccagaacacctgccaggggacctggggtccagtgcacacacacccaggcagcaatctgactcctcaccttcttctagaacaagcccacaccccttagtgggctcaaggggagaaaggcctgttgttctgccttggtgatttctaaggcccatccaccctgacatctactggtgtgacttcctgccccgcctgataccacatccccatgatccaggtgccttgtcaaccagccccagggtggtctccaccctcctagctgccaggcaacaggggccagagaaagttgaaagcagaaaaggaaagaacaaagaaacattacaaggaataccctgttcacaggaggtggaaaatatattgtgtattgctagaaataaaatttaaaatccaggaatgcctcagcagggaacagttgaggtataaagggagtgctcctggaaatggaactcacctagaacttgactcagtgcctctcctgccatctgaatcctgcacaacctgaggtcaagccacattacttatccaaggttctgttttctcacttatggggacatcctaacttccttcactcctaaggtggctgtgtggatgaaatgcactgaagatatgaaaaagcactcatggtgtatgacattagcacctgttatattcttaaaaacaaatataaaggctatggaccagtgatctgaatgtgttatgaaccaaagactgtgattaatccaattctgtgcaactgagtttctcagagacctccccaataaacgtactcagcaaagcgtcccacacataccaggtaccagacaccagatacctggccctttccttccccacacagcatggctattcatcctcaagtctggcctctgtctgatacaatgaagtggagctcagaggaggcagcaccgtcttcacagattaggggcaaacatcctcacctccctgcaatgccctgccacaaatgtgccacccgggaatggatccaaaaccactgcaaagctatttatactaggagatggcccctctacctttaaaaacctatgaaaatctcaacagttcttatgcaggccagcaatggcctaggtcaagcctgagcctgaagcccctaaccaaaagtcctcacaatgcagatcccctcagcagcagccagaaggacttgtcagggaattttagaaagagtgggcaggcatcagaatcctcctgactggaatcagagctcaagtctagagcccacctcacagccaggagccagactctggctccagcagactgcagcggacatccctccccaggccatggcactggtctcagcttggagggaggggtggatctttgagatggtcgacttgggggcggtgccaaaaggcgggtccagaaagaggaatcttggagagtctggaatgaagacgtccacagtccactgtccccccagagccgggtccagtggatatcagggctggagggaacctccaaatcttgtgtttgccaatcaccttattccacaggcaaggaaacggagagcgagaagggcgtttatcgtgtggccttaggagtccttgtcctcctcctgccacccgggctgagccctccccagttccaggaggtcgccggagatggtggggggtggaacatcctcctggcgaattcaggactcggctccacgtccccaagcctccatgagggtcgcccttaccggaggcgcagccgcctcggccatggccctgtgctggccggcctgggcagggagtagccgctgccgttacgcgcggccccacacaagcccggctgcgcagtcctctccgcagacggcgtcagccctgctttccccgcacggaccgagctcgcggggccgccggggctcgggacacgcggaaaacgcgtcagcgcggcagctgtgcagagactcaacgggttgcgaccgggtggaccccgcccacatcccgaagccagatccccattggccggtggtggaagctccgccccccacttggctggcgcctccgacccagtgccagcttttcattggccaacccgggaggccccgcccccacagcgtgcgccgggcctttgtgcacgcccgacaggtgcgagcgcccgccccgggctggtgcccaacagcccgcaggtgtcgccagctgccaccgccccgcacggccactcacctcccagagagcagaaaccagatcaagcgcacgcactcgtttatgccaacaactttattgagcaccaattagggcaagggactaccaccttcacagttctcttgggcttattaacgtcgtggcccactcatttatttcacaaatgaggaaaccgaggaccctgctgggagagtttggggcccaaccagggctcccactgagtctggggcaccctcagctcctgcaccacaaagcttcggttgacttgtttcaatgtaaagaacgttacttaaacaggtctgagtgctaggcaaactcacaagacctagctcaaagtttgagcacattggtatgaaaaaaagaaaaaaggagaatcagcaccttgtgatatttaagcaggggcatttggcattagccaaccaagcccagaaagtcggcaaaattcttagcctgaggcatccccagaacacctgagactagctcctgcagctgagggttaaactcgtgcacctgcacttgcaccacatcctgtctgagctcttgctgacagcccgtctctggtttgtgaagctcctggcaagggtggggggactccagagcagacaagcaggatccacagcacagaagggcagtgcctcttcccaaacccaagggagcctggctgaactgtcactgacttgtatactcactctcctcccagagatgacagcaatgctaccattggcccccaactctgctcaagactttggaagaagtgtgagggtcagaagggcaaggaaatggcacatccagggaccaagacccccagaagcagccctgaagcgtggtcacagtgccagacaaggcggtaaaaaacaaggatagctggggtcccatcactccagcttcagagtcacccacaccaaggctgctctacagacagcgtccgcagtggtgtgatgagagacaccagaagccagctgacctccagactgccccatgaggcagtctgaactgaggcagtctgaacttctacagtccgaatctcatgctttggtaagaatttgttcaccaaaatacaaaggactcctggggaacagagccccatgggcgactctttcactgaacccagtggaactgccactcactccagaagataaaggtccttcctgagggattctgacaggaaaaaaaggctggaatggagtagaaaggaggccctgaatttgaaaggaagcacaaagctaggcttcatatttgtcccagtgcctgttactttgaccctgacaactctgaggtaggacacactggggccatgacccctttgacagaagaggaacatgagactagctgtgactaaaggattcacccagatctcctagcccaactctgccccagagcccaaagtgctcaagggagaactcctttgagaggagactgccccgcctttaatgtgaaaagcaggcctggaggcccagggtggacgtggtcctcagccagaccaagggcctcctctagtggaggggcttcctgggctctctctgcactgcccctcagggtgctttctggggtccagtcaatggatcttacacacccatgaacactgagcccttggggagacgtgtccaggcttcagtttcccctcccagctgacaacaaaagtaaataatggatgtgactatcctgtggggaaggactaggaatactgggagtcactctgggccaagaaacacacacatggggagacactgtgcctccaagacagcagccaagacatccccatcaaaac

SEQ ID NO: 1882856 - DNA, 4001 bp, Homo sapiens
gtggagcttgcagtgagctgagatcacgccactgtactccagcctgggcgacagagcgagactccatctcaacaaaaaaatatgtatatatgtatatttatatatgtgtatatatatataaaattaaaaggaaaaagcaagggaggatcctctagagcctttgaagggagcatgatccactatcatctttatttacgatttctggcctctggaactgtgagagaagacatttctgctgtttacgctaccccgtttgtgaaactttgttaggccagccctagaaaatgaatacacttgcttagggtcacccagaattagttccagtattcaaacccagttcttttttctttctttcttcttctttttttttttcatgattttaagattttatttttttgaaatggagtctcgctctgttgcccaggttggaggtaccatcttggctcactgcaacctccatctcctgggttcaagcaattctgctgcctgagcctcccaagtagctgggattacaggtgcacaccaccacgcctggctaatttttgtatttatttttttagtagagacggggtcaggctagtctcgaactcctgacctcaggtgattcacctgcctcggcctcccaaagtgctgggattacaggcatgagccactgcgcctggccttttttttttttctttcttcgtcttatttttttgtagaaagaagtcttgctgtgttgcccaggctggtctcaaactcctgggctcaagcgatcctcctgcctcagcctcccaaagtgctgggattacaggcgtgagccactgtgcttggcctcaaacccagttcttttgattccagagaatgaactttccccagggatttttattagtaaaatatttttatgtatttatttgttgaggagacaagagtcttgctctgtcatccaggctggagtggagtggcgcaatctcagctcactgcagcctggaactcctgggctcaagcgatcctccccctcagtctccaggaaatgtttattttttgtagagggcctgggggttcttgctgtgttgcccaggctggtctggaacgactggcctcaagggatcctcccgcttgggcctcctgaaatgctggaattacaggcgtgagccatcctgtcggctctaagtatgtatgtatgtatgtatgtatgtatgtatgtatgtatgtatttattttgagacggagtctcactctgttgctccatctggagtgcagtggccagatctcagctactgcaacctccgtctcccgggttcaagcacttctcctgcctcagcctcccgaatagctgggactacaggcgtgcgccaccacgcccagcaatttttgtatttttagtagagacggggttttaccatgttggccgggctagtctcaaactcctgacctcaggcgatccgcccgcctcggcctcccaaagtgctggggttactggcatgagccaccaagcccggccgggtctaattattttaaaacgcaaacgcttaagtatgagggtgcatacattcatgtttacttagcaaatatgtattcagtcagtgtctatcacattccagggatagtttcaggtattgggaaatcctgtccctgcttacagtttattagaggaggataaaaaaaaaaagataccgtcggtcagatggtgcaaaaatctatagagacacaggatgagaggcaagtttcggggcgtgtgtgaaggtagagaggaggcgacgctattccatgaggggtgcggtgcgcaggacctgtggcgtttgcacacgaaagacagtgggaagggcagatgcaaaagcctggcgcgaggaacgtgctaggccggcatcgggaggccgggtggctggaaaggagcgtgcagacggcagaggggcctaagaacgagctcagagaagaggcagaggtccttggagcccttcttggctccctcgtactccagcagctccccgggcggagccacattcaacatggcggccgcctagggcccgcctgcggacgaacggaagtgcgtgtaggcgggcgccggaagtgacgagagcccgctccttgccggggtctcggttgagcggtggacgcgccggcttcgagcatccctagccgggcaggtgggaggcacggggttgcggatcccgcggccgcggttcggacccgccggcgacatggccagctccggagaggtactgtccgcgactgtctccgctctgcttctgcctcggcggcctcggtctccctgggttcttccatcccgacccgggttcccttgcatcctttctatcccgacccctaccccgccccgtccttcccatcctgaccctggccttgcccctgctcccgtccttcccgcatcctgtccccaagactcctaccctgtctcggaaggcacaagctgtctcccccttcgctcgtgcattcctgatcgccagagttgtccccgtctctccgtcccctgagggtccaggctcctccgagacccctttctcagtgccccggttccttggctgggcccctgcagccctgggacattccccctccgtgcccacgtcccactccatcttctatctctggatgctcagtttcagccccagcccacttctccctggagcctgcttgctgaatgacgtggggggtgggtgatggaggaaaagccatttcacctgagggacttacgacgtaccctggaattctttcccaacactccccaaatctgggtccgatggagaagcccgccgcgtccctgtaatgtggtgcaaagtattgtctctgcagaaaggggtgcagcggggactctagactctgactagtggcttcccgttgatgcttcctgcctatctgtatgggcacctgggttggtatctgtcacctttcaggtctcagatcgttgggtgcacttcgcagatttaggagcttgcctgggttctagggagcaagagtgagaggctcaagtgtcttcctcagagtgatggggcagggtctctggagatggctgggggtcgctgtgctcaccgcccttctacatttgaagtgaatgcggcctagaaatgaccccagtggcttcttgattgacaaggaacggtgtgtggctcaactgcagattgataagattgaaatgaagattccagttagctgtgtgtgcttggggtcagggaagaaggggggtcctggtaccttggtcttacagaattacagcttaaagccccctctgttccttgtttgtttgttctttgtttttgagacagagtctcgctctgtcgcccaggctgtagtgcagcggtgtgatctgcaacctccgcctcccctgctcaagcgattccccttctcagccttccaagtagctggggttacacgtgtgcatcaccacacctggctaatttttgtattttcagtagagacagggtttcgccatgttggccaggctgttctcgaactcctgacctcaggtgatccacccgccttggcttcccaaagtgttgggattacaggcgtgagccacagcacccagctggactctgcttttttttttttttttttttttttttaaataacacttcacatggttcagtgcctctttttctttttcttttttttttttgagacggagtctcgctctgttgcccagggtggagtgcagtggcgtgatctcggctcattgcaagctccgcctcccgggttcatgccattcttctgcctcagcctcccgagtagctgggactacgggcgcccgccaccacgcccagctaattttttggttttttttttttttttactagagacggggtttcaccgtgttagccaggatggtctcaatctcctgacctcgtgatccaccctcttcggcctcccaaagtgctgagattacaggcgtgagccactgtgcccggcccattctttatttttatttctctttttaaaatttttttagagatgaggtgtgactgtgttgctcaggctggcctcccaaattgctgggattacaggtgtga

SEQ ID NO: 1882857 - DNA, 4001 bp, Homo sapiens
tcccactgtactttatttttatctcttccatgaaacttgccacgttttgacttgcaccctaattgtaattatgtcccagctcattcatgatgctgcaagtccttttaaagccagatcctatcgctgactcctctgtatccctcttccgcacccaaactgcctcccccttggacctgcacatgggcaccactcctggcctgcgctcagggctgccactgagccacctcgtttaccagctcttgcatggttcgtgtctcttggagtctttactcgtctgcaggatttgcaacatattcccaatcagaacttgtatttccaatctcgcttcatgttctaaaactccatcagaatttcttcccaaatatcccacactatcccagtcttactgcaagatcttgatatattgattagaagaaatggtaccttacagcagggggcggggagggaagttatcatagcaatcacagttaaataaatcctatccttcataaaataatgaaatgagtaatctaaaaaaaatacaatgaataatgaatcaagatcaattgacttccagctgctacgaagaaaaacaggctctggttggttttctacaggagcgtgaaatgagtggagctgcttcatccacaaaatgtgattcatttggataacggcactcacctggctctacatgtgttgagtgttccaggacctgggggtgtcttcacactaataaatattcatttatggttgtagttgtgcaaactgaaaagatatatgtctatttattcacatcgatgatgatagttggactaattccaaagcaatacaaaaccaaacaacgcaagcagtgctgtgctgtatgtggtgggagagagtcctcgcgtcggaacacctgggttcaagtccctcctcagctaaagagcccgtgtgttccggccactggcttccctcaggccctcaagctcctcaggccataaactgaaggggccgtagtcaggacttttcagatctacactgtgcctgcccaaagagagtttttatcctttacagaaaccccagaacttccaacaggtcaaataaaaaccacagtaatttgaaggtagaagctgcttgtatctctactgtggagccgtttgctcctatttcttctgtatctctcaatgagcctaccaaaatggcggcctttgggaagcctccaagcagcaccgctgacggacaatgtaccagagactctaggatctaaccaaaggtggggaacggttatttgagttacagcctctcggacacaccaaaagtcaaagcaatcaaaaattgtgaaggaggaaagcgtctgcatttccgctctttctagagtggcagtgtgaaaacatcccggcccgccatgctcagccaccgaggtgcagactttggacgaaattgcttttggcaggaaggtgcgcccttcccagctccattccagtctagaattaaattgcctgtggttgatatcagcacccagagcaaatgacgatgggccagaaggcacagaccacgtctcctcacacccagggtcaccgggtgccccaaacactgcgctgaatgctcagagtgagcctgagtgagacctggaggagcacagagccccagcctcttgcccccctgtcctggcatggagccaccctgtgttcatctcctggggctgctctcacaaatgaccacaaacttggtaacttcaaacagaaatgcattttctcccagttctgcaggacggaaatccagtatcagatttggttccttctgaaggctctggagagcgtcagctccatcccatctcctcctgggagctgctggcaatccttggtgttccttgggcacagatacatcactccagtccctgcctccactgtcacatggaactctccctgtgtctctgtctgtgtcatggggtctcgggcctacctgattagtccaggaggatttcatcttgaggtccttaattacatctgcaaagacccttttgtccgaatgaggtcccattcatgggctccaagtggactaattttggggggttggggaggcatcatccaaccccttgcacagcattcttcctcaggatgcttaaaattgcgaaaccttttactcctgtttttctatatctctcaatgagcctaacaaaatggcagcccttgggaagtctccaggcagtgccattgaccaacaaggttatcgccaacccagttttcctgtagagcatgctgaccttgcctttccaaactcctggaaagcaagaacaaaagtttttttaaaaaatttacatagaattggcatatattagacacttcatgtttaattgaacggatcatttttgagtaaacttttcttgtgatagcctgtggtcgttgcattatttccccaagaatgcattttgtgaatctggatcacggataagagaaaagaaagaagaatagagaatgttgtcttttcaaacattcattcaacaaactgattgccagccatgcacgcaacctgtgtaaagggctggaaagaagcagctgaaccgagagcccggtcccctcagaactcacagcccatttgggaattcactactgatccatgtggtcaggcaatcatgcacttgcacacaggtaagggcacaggggaggaagcagctcgctccggagtcggggagatgtctcaggaacgggcctgcactgggtggggagagaaggaagttcagagccaaaggaggagatttgggaattctacaggtttggggtgggaaatggaggaaggcaaggcttaaagtgtgaatggaagctggtttgggaattatctcaaaggctaccttgaacccctccctgtaggcatggggtgtgatgaagccactgggcacaacagctccccgcttctgcagttggcaacaccctcgcccccaccagggtctctgacatggaggtgaaggccgcacagaacacccttgcccctgctggggcctctgatgtggaggtgcaggctgcacagagtaccctcacccctgccatggtctctgacatggaggtgcaggctgtacagagcactcttgcccctgccggggtccctgacgtggatgtgcaggctgcacagtacaccctcacccctgccggtgtctctgacgtagaggtgcactacagaactgcaggggtggccgttcacatcggagtctgtgagaatgatgctcccaggcttatgcagtgttcaacagttcagccagatggggctgccctgctcttcactctttcttcccacctgtcttggtccattttctgtcgcttataacagaatatctgaaactgagtcacttgtaaagaaaaggagtttatttcttacagttatggaggctgagaagtcccaggtcaaggggccacatctgatgagggccttcttgctggtgggaggtctctgcagaatccagaggtggcccagggcatcacacaacttggaggctgagtgtgctggctcaggtctctcttcctcttcttacaaagccaccaatacccactcccaggttaacccattcacccatgaacctatgaatagattaatccattcccaagggcagaaccctcatgatgcaatcacctcttcaaggccccacctgtcaatactgccacatgggggattcaatttcaacaaaagttttggaggggactttcaaactgtggcaccacccctaacagttcttcatataaaaagcagggttttgcagttacatattttgggacttgaaactatcaccagccatgcattagaacttatcagaataaagctgacagactgtcctaaaagcttgcttggtaacttatcctagcatttataacatataaataagtcatgtctattatagctgtgcagaaatcccgcaacaagagggcaaataagagatgataaaaggttgccaaactggaaatgtgtctacccgggtattacaggaattattttaaggtttcatttacgaagggagcataagaacagatttatgaaatgggaagaagctcaagtta

SEQ ID NO: 1882858 - DNA, 4001 bp, Homo sapiens
taggtgcatcctgaaacacacgcacacacaactacaaagcagtctacttctatgaaattaaataaaaatacttttatgaaacaagtaagaaaaccaaaaagagagcaaaggctagttcaaggatataacaaggtacaatggatgagagacgggtgggataagaaataatttcacagaaattgaaaacacagctgaaaagacaaatatcaatcttctttggcagcaataagaagcagaattggcgttgtagaatattgagttggtgacatactggtcaaacttgacaagtttcccataagccagagggaaagagaaaacaatgaagaacacaatagataatgagaagaaataagaaagatgcaaactaaggataacagttgttcctcaatatgcaaaaaagaatggaatctaaaacaataacaaaaaaacacaattgctatttccttagctaaaaatcaaacaaacaattagaaaaatataaatgtggctgggtgtggtggctcacgcctgtaatcctagcactttgggaggcagaggtgggtagatcacctgaggtcaggagtttgagaccagcctggccaacatggtgaaaccccatctctactaaaaatacaaaaattagcagggtgtggcagcgggcagctactctggaggctgaggcaggagaatcgcttgaaccccagggggcagaggttgcagtgcgccaagatcacaccactgcactccagcctgggtgaaagagtgaaactccgtttcaaaaaaaaaagaaaagaaaagaaaaacataaatgttctgtgtggagaacactatagaggttcctcaaaacaactaaaaatagaactatcatgtgatccaggattctcacttctaggtatatatcccccaaaaataaaatcaatatattgaagagataactgcactctcatgttcattgcagcactcttcactatagccaagatttggaatcaacttaagtgtccatccacagatgaatggataaacaaaatgtagtatttatccacaatggactattgttcagcaataaaaagaataaaatcctgttatttgcaacaacatggatgaggctagaggatattgtgtgaagtgaaaaaaaagccaggcacagaaacacagacttcacatgttctcacttatttgtgggagctaaaaattaaaacaattgaactcctggagatagagagtagaatgatagttaccaaaggctgggaagggtagtagagggaaaggactcggggagtggggatgattactgggtgcaaaaatatagttagatagtatttggtagcacaattgagtgactacagtcaacagtaatttactacatatttataaatacctaaaagagtagaactctaatgttcctatcacaaagaaatgataaatacttgaggcgatggttgccccaattgccctgaagtgatttttacacactgtatgcctatatcaaaacatcacatgtaccacgtaaatatatatacctactatgtacacataataattaaaaataaaacattaaaaaaatgtaaaaatgaggtgggatcatcacatgccagattaactcagtgaaaagaaagccacactttaatctatgtaacttttttcttttagttacagggcaaaagagaaactcctatccgtgctcaagggaaaaaataataacacacaaaacagaaggcgccatcatgggagttgacatccaccacaacaaggactgataggttcagcgcaaggagcccaaaagccaggatattggtctacctgaggctgttggtcaaactgtacaggtttctggtcagacggaacaactccacattcaaccaggttgtgctgaagaggttgtttatgagtcgcaccaaccgaccacctctgtccctctcctggatgatccagaacataaagcttcctgaccgggaaaacagaaaggctgtggctgtggggaccataacggatgacgtacgggttcaggaggtgcccaaactgaaggtgtgtgcactgcgcatgaccagccaggcccgcagcggcatcctcggggccgggggcaagatcctcacttttgaccagctggcccctgatgccccgaaaggctgtggcaccgtcctgctctctggtcctcgcaagggctgagaggtgtaccggcattttggcaaggcaccgggaaccccgtacagccacaccaaaccatacatccgctccaagggccggaagttcgagcgcaccagaggccgactggccagccgaggctacaaaaactatagatcctatcctcttattaaagactttggatgatggaaaaagaaagaaaagaaaagaaaaagaaaatgttaaaaatataaaatctagctatgttcaaaacaacaaaatctgattttacttgcactactgctatagtgtcaggaaacaacaaagcaaactcaataccatttgaatgcagtaaaactgtgtattcgcaaacccgagatgaattaacagaaaatttactagagaaacaaagagaattgagaaactaaaagggctgtaggatgtcttccccaggtttatgctgttttagttacattattctgtaaactggttagtgcacctacagaatcattcaatttggctatggtttttgtgttagccacggcttaaaattatccagttcctcttcacactacccatctcctttagtcatattaagtaatgaaaattaaggaacatttatttacgagtccttggtatgttggcaaagactgatcatacaaaaaaaatcacacctcttttgctcaaaaaataaaaaaagctttgataaattgcaaaatgcagacattatcatgcaataagctttgataacttagaaaataaacctagaaattaaaccaagattgaaaaaaaaataaccaaaacatctggaaggtaaattactgctcaggaactcttgtaatacttcaaggattcaaatgtaaactgataatatgaactgtacaaagagaaaaatgtccctgtttcatgctcaagggaatgtttccttctggccagccaccaacttccatacatccttctctcctcagggatcagatggctctgccgggatgccttccttgtctttctgccagcttagtgattgattatctatctttattaccaagtcaatctgtacactgaatgtggaatggattcagcagtcaaaggaagaagtggaaaaacaagatatgatacggcttaggtaaaaatccgttttaagcagcagcatcctaagtctgtagcaatcccacttggctgtacaaagaggtgagcttctcttgttttgcatgcaaatgcagagtgctctcaaatgctagaaatatgttttttacagagagagatatcagcagccaagtcaccctcttcacaaatatccccccaaaacaataaattaaatggttacgttaagagaaacagataatttccctctgtcccttccaaaatggaatgttatggtgtggcccctatgactgaacacctagaggagtagcagtccgagagacaggataggactggatacccatacaacctgggaataaagctagaaaactggttgtgttttttccaaagaagcaaagcagctgtagaacattcaagtccagtcaaaatgtaagctcagaaatcagcggggaaaataaaactatattaacgtcacataactagaaaaagctgttggcaaaagagattttagatctccattataggcccaaaatggctgtttcctactcctaagcaaacaatgacatttggtctattaagaaaaaatgaaggccttgagagaaaacaggatgtaggttagtttttgcatttttgtttttccttctacttctttatgaatatgaggtggggagacttaaagaggaagagcccaggaagggtttgtgggagaaagaaatgtacggaatgccagaataagatttgggagaagagaatgtgttgcaggacaataaatactttgaaggttttctgttgttttcatt

SEQ ID NO: 1882859 - DNA, 4001 bp, Homo sapiens
tgattcccccacccacccctcctattccggtcttcttgccctccacggggggaaatcactatttctgtgcagtgtaaaaccttcagctttcaccattacatgtagacttacaatctttaaacacaaatttagttcatttagttggaaccacacaaagtagaacctacttggagatttcagatttttttttctatttccctgacgatcttctaaagatatagaaagttacatgtcagaagtataccaatcgtgatcagtttcccctgtcacttagaagcgacaaagcatttacttatctcctccacagtggcccattttctatatcgcaatcttgcctccaagtcaaattgttcaaagcaccatgtctggaatgaagaagggcactgggaaaaaagaaaaatagcaagatggaggaaataccaatcatatgcagtatttcttcaggccatctcaacatacttcacatttccttcacaggaacaagataagatttctcaactgggtatttcttttaaacgtccaaacttggcagtactttaatggatatctaagataattaaatgattagggtgacgtattaatataggtcatcggacgggcacggtggatcacgtctgtaatcccagcattttgggaggccgaggcgggtggatcacttaaggtcaggggttcgagaccagcatggccagcacggtgaaactccatctctactaaaaatacaaaaaaaaaattagccgggcgtggtggggcacgcctgcagtgccagctacctgggaggccgaggcaggagaatggcgtgaacctgagaggcagagcttgcagtgtgccgagatcgtgccattgcactctagcctgggtgacagagcaagactccgtttcaaaaaaaaaaaaaaaaaaaaaaaaaggatattttccagtttccagtacaccctgttccagatatgctcactcaagtcaaaattaccgagtgtagtggacattttagccctactctcaagcaaaaggcagattttcataggtccatttctaccattatttcactaggtctcccaagcttccaaaaggtagatcatgtgctcgcttcagcatcccgtatactaaaattgcaacaaaacagagaacactagcaattttaaaaaataaaaataaagcagatcattagacgaccaaaactgtcatggagggatctttcacatggacaagtggtacccccggtgtagttcggagcatcccacaggaactctacaccacctcaatgtagtgattgaaagccaggcactggaaggacaaagttgagcaaaaccaccccgaaacataagaagttcctggccctaggctgactccctagcaggtcattttacaccagtcacggaaagacagaggggcaggagttgagggggaagtgggggcccagggaaggagttatctgatcaagtcttaaaggataaacaggaaactggacagcaaaaggggaaaaaagtagccaatccgggcaaagacagcaccatcaacaaagaatcaggacgaacaagagaatgccctgtgcaaacatcagcaaacgtctgccccgtgtgtgtttgtgtgcggccgccaggtgtggcgtcatggctgccattttgttcttctctggttggctccttgggcgcctacagcctgtgaagcactgcctgacgcctaccgctcgcccacctccccgcctcctccgggcgctgcagcctccagggatccctccgccccccacccccgggaaacctggaagtggccaccaggcccggtggtccgaggtgagctaaggaaggagctttacccacctcgtggcccgcagtgatgaggcggcccgagcagcgggtcgtcttccagaagagtcagagaaacagtcctggcttgcttcacctcagccccctgggttccctccaaaccagaggacgcagaaatgcctgggtctgagggggctgggtgtgctcggcctgggtagtctcgaaagtcgccaaggctacctcagaatcccccgccctccggccaagctcctctcccccaggcgctgccccacgctcctcgccgcccttccctctgcctgggggccggcgagcttgtggccgcccagatacgcctggatcctcgccgggacctcggtggagcgcttcccgccctcggcacccctacccccggtggcccagacgcgcccaggtcctcgcctgaggaaactccgaggacacccgacctcccgctctctctcaaaccgccccccttcgcccccctgcccgcgtcgtttctttctcctgctctccaaatggcttttccacaccagaaactgaacagcaagtgtggcccggcgcgtctggggacagggtggagggggactgacagttttacactcttcagtagttgtgagtgttgtactgttgtgtgtggattgcttattcccgaagtgtaacttgtttggaaaattaattgcgaaagaaaagtcatttttttgagccccagagttttcagaatattttgcgcaatgccatactgatgctcgccttccctttgtactcaaaaggcttcattgaaacgaatcacactggttaaaagtcagtttggtttggtgtcgtggtggtggtggtgaatgagtcacataggttaaaaactcagtttgtggtggtagatctcagatactaaacccactgtgagatcttaatcaagtgtctttacctctctgtgcctcagtttccacatgtgtaaaatgggaataattatagtacccatgtcacagatttatggtgagatgaaatgaactcacgtatatgaagcacttggtgtctgccacagagtggatgctggagaatggctcactgccattatccttatagattgccgctcacctctgtcaccttttgctccagtctgtggtgagaagtttcagggaagtaaagcatgcctctgagaaggatgatacgtggattgagtagaaaaatggaattccatgttggtcaaagggtaaaaattttcagtaataaaatgagtaagttctgggagtctaacatatagcatagtgactataaataataatattgtattgtttacttgaaatttcctgagagtagatcttaagtgttcacatacacacaatggtagttatgtgatatgatggatgtgttaacttgactgtggtaatcattactctgtgtatgtgtatatatgtgtgtatatatgtgtgtgtgtgtatatataaagtcatcactttgatataccaaatttttatttgtcaatttacctcgataaaactggaaagaatgaaatttgagagttttcaaaaccttaatctccatcctgcaggagaaacatttcctttcccctgtggcacacaggacaaagtataggagctgagtcagggacaagggcccaagctcatgctcctccactagcctgtgggttgattcttgggcaaactgccaatgtctctaagcctcaatttgttcacatggagccaagtgagccccatgtgtatgaaagggctttgtacccactaaaagcctgaaaatttgaggtgcagttattttgaaaatacacaattgatggcctataaatagaacaggtgagttaagtggaacattgacaaccatatggaagtttatacagtgccacgagaaaagcttgatttttttgttaaagctcagcagcggttaaatcaactgctaaaggaacagccccttcccagaatgttttctctttttttgagacagagtctcgctctgtcatccaggctggagtgcagtggcacgttctcagctcacggcaacttccgcctcccaggttcaagtgattcttctgcttcagcctcccgagtagccgggattacagccacatgccaccacatctggctaattttggtatttttagtagagacgggtttcaccatgttggccatgctggtctcgccctcccaacgtgctgggattagaggcgtgagccaccgcaccaacccctcagaatgttttcttgatggggttgctggc

SEQ ID NO: 1882860 - DNA, 4001 bp, Homo sapiens
agccttctttgttctcatagagcaagcttcaacccagccagtaaaagtatctattactactaccaaaaacttgtatactttgcacactggcatatgggtgaagtctaattgccagtcttcccctttaactttagccaatatgttcacacacagaatctcttttacaattaatttttcataagccttccacaacttgttcaaaccttttagattattcctatctcacttaaaaccatcctttcaccctctaaacttaggcaagaaatccacattcccatgctttttaccaaaggtacattatccttttcttacatgaattcttttcataacttacccagaccatctacaaaatgcttggactttctgagttttcctaaacatctttctttttaaacaaccagtcattttacgttaggacaagaatttatcgtacaagatcttttctcctacaaagccaccatctctacaatcttccctcacaaaaacatatcttcatatatataactttcttcacatctctcccctacttactggttccttactaccttgtttcataaataactcttttttttaaagtccataatttgaattaactttcagataacctccaaactacacaaaataattctttctcaccaataacacattttttggcatattttgtatacagaattatatattaactataattcatatccttatgtattagtctgttttcatgctgctgataaagacatacttaagactgggcaatttacaaaagaaagaggtttattggacttacatttccacatgctgggaaggcctcacaatcatggtggaaggcaaggaagagcaaatcacatcttatgtggatggcagcaggcaaaaggagagcttgtgcagggcaactcccattttcaaaaccatcagatctcatgagacccattcgctatcatgagaacagcataattcaatcatctctcacccactggatccctccccacaacacacggtaattatgggagttataagaagagatttgggtggggatgcaaagccaaaccatatcatcttagtaaccttaaattttagtgaaaccttaggaagcaaaaaatcctaaactatcagatattagcattttatagatgagaataattccacaatttttggaaacatattcctccctatcataaccctttcttaattggaaatgactgagatatccaatgggcatcaaaaatacttttaagattttaaattacacaaaatttacctaatcattcatcccatttacatgtacttaagtctttcatttttaacagtttatctagattacttctgaaaactgagatattagacaccatcatttaaagttagttatttatttgttaaccatttttaatagccaatgaacattatgtgttcacctaaataagaacctcacagttaaatacataggtgtttttgccaataacccagaagatttagctaacaatattaaattagtctcatttgtcaaagaagccacataaactaaggccattttgttttggctgggttaatagctttataatcttctatgccaaatgctgacacttcaacatttctagcaaagacaaatataaaacccagacaaaaatgtatgctgacaattctgaagatatttctattttcattttaccaataattttaaagccagctatttaatgaagatttacttaagtcacatgaacttgaaaattgcttggacttatttatttaatttatgagtgcttttttatttataagctgatttggttgacacaacatataacaataagtgtacatacaaataaacacatctagacatgtatacacacacacaaacgaagatccaatagcttttaccttggaactctagccatgagatatcaatacaagctcacaggttttacatggttacactttgtttgctccaataggtaatccagtgaaggctgtgaaccaaacatttttaaagcagttccggtggcagtttgatttttaaaggccaaacctcctcagactccaaagacactggagccaaatagcaccaaaggagagcaccatatgctgactaggcctgacccttcttaggacagcagcaccaaagcctggatacatgcaacgtcatcctgctttcccattcaacagcaaactccagattccaaacaatactggggccaagtattattgcaaaagaatatcaaatgtttcctccttagattatcagggtcaaattcatttcaatggttgaggatgcagccaagtgggaagtcaggtggaataaatggagtgtttcctgtagtggtctgcaagagagagacaattctaaggaggccttagtactagacctgagaacctttgcctagggcatcccctttggagaggctgaggtctggagttggatcccctaggcatccccctttgaggtccagtctaaaagtgtcagacatctctgaccttaggtgggcaccagtgttgctttgtatgttttccctccagaggcaatggcctaatatgagcttttctcttgtccctggatgaaggtctcagcttctagcttcctaccaatttagataggccatatcttcctgcattccttgcaagactaaggaggttcccgaacactgcagagttaacggtaccaaggctagtgggatattccccatgaagaaatggtgcagaggttatataaaagattgggtttatattgggtatataaaagatatatagaatttctacggggttcagggcaagcaaactgatgccaaagcaatgaccaccaagctcccttaagtggaggtccaagatgtagaatgtgttctaaagcttgtgggtcccaaaggtcctcagccagtcaatagattcagtaggagaagggaggtcaaaatatctaagagatattatcttttgtccttacaggccaactttatgggagaatttagcttaagaaagagggtttaagtcgcctgaaatgtgtgtgagttcaccctggacgagcttctgctgccaattgcatcacaggtagggatcagggactataactcaaaaagatacaaaagagtccttccgccttctgggcaggagagctatcccaggttcactccttggccttcaggtaacagtagagagtggtcccggccagtttccctcaattaccaagaagctactaggaaacggccactgaaagactgaaaaaaggaaaaggactcaggtccctcacctgaattgggcagtggtggtcaggcactttcacacagaaacctttcagtttcaccagagagtggccctgttagaaacctgtggttgcctctgtgcttaggcactgtccaccgagggttccaagctggaaagggaaaaagagacagagaaaagagttcccctgtaaggagcagagaggaaaagggaaatcaagagaagaaaaataaatcccaaactttgggcttacctcctggctggctcgccaatatatgttactggtggagggtcttgactatgagtcatccaggttcttggcattttgaacaaggaactggacaaaatgcacaaaccaagcaatgaaagaatgaagcaaagaacgcacagatttatttaaatgaaagtacactccacagactgggattgggctccagcaaggagctcaagaggccggttacagaatttcctggagtttaaataccctctagaagttttccattggttacttggttataccctatgtaagtgaaggagtggcccacgacaagtctgattggttgtgggaggggaccaatcagaggtactttccatttttatctgtgaggcagtgcaaagacagtagcctctgatacttttgttacttgggtgtggagaggtggggttttccttgtgattcagttctaggaagtcagggcaaattggccttagattccctgcctccagaccctattcttctacctcacaagcatgtcatgaatggtctggagtaaatcataagcggatttatggaaaaaaaagct

SEQ ID NO: 1882861 - DNA, 4001 bp, Homo sapiens
cccaaccacaatcacaaggactattaccatcaccaccacccacagagtcaccactgtgattccctccatcactacaacacccacagcacaatcactattatagcaaccagtactaccatcaccaccacctccatcatcattaccaccattatcaatatcaccacttataatcaccacaaccactctcactactaccctgcccaccaccatccccaccacaatcatctgtcactattatcatcaccagcgccattaccaccactaataccacttcctccatttctgaaatcatccacacctctaacatcgccaccactacccctaccaacaccatcccctaccaacacaattaccaccaccacctcgatcatcatcactaccgccatccaactatctctgctaccatcaccattatcactactaccaaggtcatctccgtcaccaccgtcatcaccatcaccaccttcctcataactatcacaagccccctttataattaccatcattgtcaccaccaccaccattaatctcaattacctccattagtacaatcaccaccacaatcacctccactatttcacctcacattcctcataattatcaccactctcaccattactaccaccactaccaccaccttgaacattcacatcactactgttaacaccacctttgccatcactactgccatatctaccaccacctccattatcactacctccatcatcactactatctccaccatcatcactaccaccaggcgtctctgctaccactacctatgaaatgtaggctggaaaacaagatttctactatgggtaaactaatcttgaagagagaggaggtggaagtcagatgggtgcctgtgaattttctaagtacatcaatgtcaataattctttatagttatctagtcctgaaaacttagcatcatcttgtcctccatatccaatcagtcactgagtaccatacatagtcatttctgatttgcctacatcgcttcctacttttctatttctgctgccaccatccctcatttcacaaatggatgatcacaattttttcctagctggctctctgcctccagtctacctactctcaaagcatttttcatgtcctgccaaattaatctttctaaaatcttgatttcattgcttttttgctttgctcaaaatctattggccaaattttcccatctagaacgaaaagctctagatccagattcctttgccagccctatttcctgtgactctcctcctggaactttgggctcctactaggttggtgtcctcattagtctttcaaacctagcatggtcaaacctatctccacaccacggctcaaacatgtcctctatttggtctgtcttctacaatcctctgtttctatacacattctacttatttctcaaagcttgacttaaaatggggagatatatgttaaagaatccaaagtagcagatttgtaggatgaacaattctagagatctaatatacagcatgaagattatggttaataaaattgtatgtatttgggaattttgttaaataagtagattttagctgctcttgtcacagatgtacacacatacgagtaactatgtgagatgataaatacattaatttgcttcactgtaagtgaacattttactatctaaatgtattccataccgtcacattgtaaacctcaaatataaacaataaaatgtgtttaaaaacaaccaaacaaacaaatctgggcttaaatcatatatgtatgaaatttaagggattcctcttaagcatattaggggactcagctttaagattacagacaaagtccccacgttagactctgtatctcttgagtcctaagatgattaaaaatcaataaagacataagcatgtagcagccaagagaatgggaggatactcaccaacatacaagaagttttaatgaattttcagaagacaggaagtaaatggagaagcattagtggcttgcagcagaacagaagaaagagcagccttgaaaaagctgcaggaatttgaaagcagcagaaccatgtaacccctggacacagagtcaatgcactcaagaatggaaacaaggagcagggccaaaaaccagggagagtgagaggactgtcaacgaaatagtaaacacctccactcttgcacaaagctcaggccaacaggcatttattcccagccaaaacacaagggcatttttctaaaaaaaaaaaaaaaaaaaaagaaaaaaaagaaaaaaagaaaaaaaaaagagaataaccacaggatactgctgtggtttgaatgtggccctcgaagttcatgtgttgaaagcttaatccccaatgcatcgatattaagaggtgattcggttatgaggtcttcaccctcatgaatggagttaaacggttactgcgggagtggttagttatcatggaagtggactcccaataaaaggatgagttcagccctatttcgtcttctgtctcctctggatgcctccttgccatgagattcctccagccccattaagatgcaacgagaagaacttcatcagacgtggcccctccatcttgaacttctctgcctccagattcaagagccaaataaacttctgtggcattctgttacagcagcaaaaacattctaagacaatacctaaggtgaattaaggcagctcccatagatgttagcacctagaagtaatgcagtcctcattctggctttagggaggccatcaacatggtgattagctcctcatctgctcaccttaaaaagatgcctgccagttcaacaggccaaacccagagagttcttcattagccttcccatttcccattcttaaatacctataaacactcaaaggcatcccgacagttcaggaaaaatagcagtttgaaagaggaagcccaagagaaactgaataggagcatcattcaagttcagtgatttgttttttttttgtttgtttgtttgtttttttttgagacggagtctcgctctgtcgcccaggctggagtgcagtggcgggatctcggctcactgcaagctccgcctcccgggttcacgccattctcctgcctcagcctcccaagtagctgggactacaggcgcccgccactacgcccggctaattttttgtatttttagtagagacggggtttcaccgttttagccgggatggtctcgatctcctgacctcgtgatccgcccgcctcggcctcccaaagtgctgggattacaggcgtgagccaccgtgcccggccgtgatttgtttttaagaacaaaatctaattagtaggcacactgggatttaaagagctatttaatccatagatcaagaataggaaacaatcaaagaaatgactagtgtacataagacattagttttggaaattaaaaatatgattgctgaaataaatattttaatagaagagttggggagcagagatctagaaaacctctcagagcataaaagcaaaaagttgaagggattaaaaactatgagcaataaaaataagagataacaggagcatcaaaccaggaagtccaacacccaaccaacagaagtgcaaaatgaaagatgccaaatgaattcagaggagacaattgtcaaagaaacaaccaaagacatttcccagagctaaagggagaagtgaatttcaaattgaaaatacaaaatggatggaataacaacgacttgcacctagacatgttattgctaaaaatgattcttttcatttataaagtctttataaaacacattaaaataaaactgaagtttacaggaaaagaagtggaggtttaaacataacatagttatgtataattttgatatgtatgtataaatttgatatataatatataaagaatatattatatcttatataaaatatataatatataattatatattatatatttatattatatataatgtataattatatattatatataatatataacacatatataatatattatatataatatatattttacgatata

SEQ ID NO: 1882862 - DNA, 4001 bp, Homo sapiens
tttttatctttttggtagagacaagattttgctatgttgcctggggtggtctccaactcctgggctcaagcagttggccttccttggcctcccaaagtgctgggattacaggtgtgagccaccgtgcctggcctggactcattgtcttaaatagggggttgtccaagggttgaagaaaaagatactgaccatattatttgaaaagctgactaatacactgtttaaaaataagtttacccagtgtttcccaacttttcaaacttctttttttttttttggtttttctctccctgttttgttttgtaacctaaggaagcagaggctctgagaccacacacagcagcgtcgcccgtccctagaggcacgccggcagggaccagcaggagaggagacccccgttcctgcgtgcgcagttgtcgccccgccacggtgctctccgcaggggtgaggcaggagggtgggtggaggcgccagcctgtcctcagctggaagggcggggcgtggacagggacggtgggcaggtcaccagcgggacgcggggagcctggccactgttacacggcggtgcgcgtgggtgtgccgggctggttcagccccagggttttacacaactagcaggcaaaatccgcttctttcacctcggaccgcttgatgaaggcgtggtttgtgagcatctttaggtccgcccgctccgttgggtttttgatgaggcatttattgacaaactcctggaagtcgggggtgaacacaccgttgggcagcttaggaggcggctctttcacaatatagtccagcagttcgaagatggccatggcgggcaggctgtccatcccgtaaccgctgttggggcgcccgggggaccctggccaagaggagatgctgtgaggctctccttcttccctgtcgaccacgggctggccaaagatggcctccagctccttggcgtcgggcggggggatggggtacctttcgatggccagctccaccagggacaggtccatgctccagatgaccgactgcaccgagtaatgtgtgccctgcaaccgctccggagccatgtaggagcgcgtgcccacgaaggagttggccatggagtcgatgagctggccgctcaccccgaagtcacacagcttgatctcccctctagagttcacgaggatgttggagggcttcacatttcggtgcatgatctggtgcttctctcggaggtacgccaagccccggagaaccgcaatgctgactttccccaggatgtcctcgggaatcctcttggcctctttcagcccctggtccagggagccgccatccatgtgctccatgcagatgctgatctccctgtcacagtagaaggccccgtagaagcccacgatgtacggtgagttgcactcgtgcaggacctggtgctcgcggatgatctggttccggatggccggcttgatctcaaggtggatcagcttcctggccatgatgaggcccgagggtctgtgctggactttggtgaccaccccgccgttgcccgcgtccagctctgaggtcctttcgaagtcatcgtctttgagttcgccgaccttggctttctgggtgagaaaggcttccagccgcttctgctgctcgtcaagttccagctcctccagcttcttctgcaggtccaccaggtttgcctcggaggcgccctcgctggttggggacgggccctcggcgatggtagggttgatggtgagcgccggcagcatcggcttcctccgggccagcatccgggctccgcgggccggtggcggcggcgcctctagcctgggcccgtagtgggcgggccgggagcgttcggcgcctacgcgagcccggggctgcgaccgcggcccaggccggcgtcggggcggccgagggcgggcggcgctgcgggcctggtccgagggtagccgaggggcgctggggctgaggcgagcgagccgccgccgctgccgaggcccgagggaggctgacgctgcagccggagtccaagagcttttcaaacttcttatattttaaatgtgttaattcatttaatccttaaaacgatgacatgaggtaggtactattattatccgcacttcacaaatgaggaaactgaggcaaacagaggtcacctagcttgcccaaggttaaacagacagccacatccagaaagctatagagtctggctttaaacccagatagaccagctctaggtctgtgatcataaccactgaactttactgcttcttacagcaagagtgtatctgacgaagtcgtgacttggaactggccaagtctaggaaggatccagagtttaattctgaagaagggaaaggaggctgatattaaacatgcaatatttccaggctgtgctcagatcttcatgtagctcatttatgattacagaatacattgctaaagaaaaatggtaaagaaacgatactcgtattttgagcaaatccccctcctcagactccatttctaattactgccattttctgaaagagttgtaagcaataaattctaactctgttagaagagaagaaaatgtactgctcaggaagagtcctgcaaaacagaaaaacttcaagacaagcttaagcagtggttgcagatttattgcacattacattatttggatggacaggtgaattttctttgtcccataatgtcttaaaatttttgaatttgagctgggcacggtggctcatgtctgtaatcccagcattttgggaggccaagatgggagaatcacttgagcccaggagttcaagaccagcctgaacaacatagaaagacctctgtctccacaattttttttttaaaaaaaattagctgggcatagtggtgagcacctgcagtcccagctactccggaggctgaggtgggaggatcatttgagtccaggagtttgaagctgcagcgagctgtgatcatgccactgtactccagcctgggcaagagagctagaccttgtctcaaaaaaaaaaaaaaaattgaatttgaatgcttttagcttgagcttactctctccaattagccatcatctttaccactcctagttacaaacactatattacttccctggacctagtaggcatgcatagagggagatagagatcatttgtgcaactagagtgatacagccaatgagtagtcagtaaagaacggaaattaggggcacgccattatcagggacaggtctgttagaatcccataaaaaattccagttgtattcaacctccactgacaatgacgtggttccagatcacagtggatggaggagactcaccatgcagaactgagtgacgcagcaggagtagcatcgtggcaaaggtaagaggtgaggctgtgccaaccagaacaggctgtattgaggaggagcaagaaataaggttggaggtgttcgcgaagggtttcaaagggcaggcagaagagttcagattgtgtgaggtggaaaacaaataaggtttgttatttggggccctggagtgccttggagatatcctgtctctggaatatctggaattgcaacgggagtaagaagttagaagagcggctgtagatgtgaagaggaggaaaggatccaggggaatcgaagtgaggaggttggcttttgtctgtagaatcaggtctggtcagagaggaaactgggcaacgcaatcatgatctcaggggaagcatcatgatttggtggagttgagactggggccgtggactgcaaacaaggggtttggggatatttcctatcaggagcagtctcacatccatataggggtaggccactgtgcactttttatgtgagaggttccataacgtttctcttcccttacttctcaccctcaccaacttgtctgaaattcccaccattctctaatccaattcccattatggttaggttaaggtgtggaatcactatttaaaattcaaatataggctaggtgcagtgagtggctcacgcctgtaatcccagcactttgggagactgaggcaggaggatcacttgaggc

SEQ ID NO: 1882863 - DNA, 4001 bp, Homo sapiens
agataggattcagctgcatataaagagtaattaccagaagattcctatgtcccgcttttcacttttcttcatttttactagtatcctcttctcttcttttcttttattttcttgtatttctttctttttctgttttgccaaaaggcatataaagtatttgaggtcacagtaagtgcccctggttgttaattccagcaaattataagcagccccttactaccatagtaaaggaacactcttaggtatcacacaatgctctgcagtatgcagattggaagataaaaacctttcaggcaagttcaagtcctgtggctcaaaagccaaaagatttttgagctgataaaaatattagaaatgatctagccattttacaaatgaggcacattaaagctatgggatgttcatggcttaccagtgccccactacaattcagatatacagcctgaatgggaacacccactccttccctaagtctctcccttacactcctggcaccttgtaagtaggaagcacatgcccttctgctctcctttctccctgacacacaacccctgtgccattcacatgggcattccacaaagctccacctctttcatcgtggtttcctctgtctaaaagtccttccttaatctggaaatcattccctactcatcttccaagacccggctcaaatattgaactttggggaaatttatgtactccgtgcaagtcagttgctcaatgtttactttgcctgtactctgtgacttttcagactggtttacatcccactgtctctcctacccggagctcctggaaccaagaataacatgtcagccatcttgaatccccggctttacacagagccaggcacctggtacacaggaagtggccaattaagcaaacaaacaacaccaacaataaaaacaactctcaaccaggccgcattctacaattctgtggaggccaaagctcctgctttcaaggggcttattcagtggaggagttgcttataacctcacaataaatatttgctgaatcatgaattaatgtgctctaattctgattctcccaggttgataggttattaccaaaattcatctgctctcagtgtgatttgtagctcaaccattgttttatcttggctaacaggacttactactctgtagtctggcttctgcagttcactgaacttatcactgtccccagcactggactctcaccataaagctatgcagagaaatcggcgggaaattcactgtcacacattagaagtgtcttccacgataaaacgttagcctggagtgggaaactaagcacacatactgttagtcggtgtgtaagatgatcagcttggcaatatatatcaacatttttaatgtacgtctttttagctccatttccactgctaaaaatttattttatgaacatacttgcacaaattttcaaatgtgacttataaggatattcactgcagtaatgattgaaatagcatacatctaaacattgttatatccataccctggaattccatgcagttatttaaaaggacgccacagatctaaatgtgctaagaaggagtaaagttcaatagacatgcatcacttaatgatggggatactttctgacagaggtgtcgttaggtgatttcatcattgtgcaaacatcatagagtatacttacacaaacttagatcatagagcctactacacacctaggcgagatggtgtagcctattgctcctagactacagacctgtacagcatggtactgtactgaatactgtagcaattgtaatacaatgatgagtatttgtgtatctaaacataggagatgtacagtaaaaatacagtataaaagataaaaaatgcactttgggaggccgaggctggcagatcatgaggtcaggagataaacaccatcctggctaacatggtgaaaccccgtttctactaaaaacacaaaaaattagctgggcatggttgcacgcacctgtagtcccagctactcaggaagctgaggcaggaaaatcgcttgaacctgggaggcagaagttgcagggagccaagatcgcaccactgtactccagcctgggcgacagagcgagactccacctcaaaaaaaaaaaaaagattaaaaatggtacacctgtataaagcacttaccatgaatggaactttcaggactgaaagtgtctctgagtaagtcagtgaatgagtagacagcgaatgtgaagacctaggacattactgcacattactatagactttataagctctatactctagccaggaatggtgatgcacgtctgtaatcccagctactcaagaggctgaggcaggaggatcacttgagcccaggagttctaatccagcctgggtaacatagaaagaccccatctcaaaaaaataaaaagtgaaaataataaataaactctgtatacttaggccacactaaatttattaattattttctttcttcaataataaacttagcttactataactttttactttataaaatttttaatttttttaaccttttgattcttttgtaataatacgtaccttaaaacacagattgtatagctgtacaaaattatttaattcctttttatccttatttatatcagctgttctctatttttaaaatttttattttttattgtttttaatttttaaatattttgttgaaaactaagacacaaacagatacattagcctaggcctacacaggatcaggatcattaatatcactgtcttccatccccacatcttgtcccattgtaaggtcatcagtgcatagaactgccatctcattttttttttttttttttttttgctcttatcacccaggctggagtgcaatggcatgatctccactcaccgcaacctctgcctcctgggttcaagcgattcttctgcctcagcctcccaagtagctgggattacaggtgcctgccaccacacccagctaatttttgtatttttagtagagatagagtttcaccatgttggccaggctggtctcgaactcctgacctcaggtcatccacccaccttgacatctcaaagtgctgggattacaggtgtgagccaccgtgcccacccccatctcctctattaaaattccttcttctagaatccttctgaaggacctgcctgtggctgttttatagttaacttttatacatatatgtgtgtataaatatgtgtgtatgcatgtgtagaaagtagtctaaaataataataaatagtatagtaaatgcataaactagtaacagttgtttattgttattatctaggattatgtacttgataatgtggcatactgtggtatgtggtatacttttaaataactggcaacgcagtaggtttgtttacactgacaccaccacaagcacacaactaatgtgttgcattaagatgttacaagggctaagacatcaccaggcgataggaatttttcagctccacggtaatcttacagggccactatcgtatatgcagtccattgctgatcaaaacatcattatggggcacatgactgtattattaattgaaaatataagatgttgaagattaacattcagcattaacccatttgtgtaaacaaagagtagatatacagtcatgcaccacataatgacatttcggtcaacaatggaccaaatatacaacagtggacccataagattaatatggagctgaaaaattcctatagcctagtggcaatatagccatcacaatgttgtagagcaattacctttttaaatataaatttagtgtagcctaagtgtacggtgtttataaagcctacactagtatacacaatgtcctagaccctcacatttactcgccactcactccactcacccgagcaacttctagacctgcaaactccattcatggtaagtgccctatacagttgtattttttctttttttaccatttatactgtatttttgctgtaccttttctacatttagatacataagtactcaccattgtgttacagttgcc

SEQ ID NO: 1882864 - DNA, 4001 bp, Homo sapiens
ctcgcaaagtgctgggattacagatgtgagccactgggcccggcctttttttttttttttttgagacacagtctagctctgtcacccaggctagagtgcagtggcatgatcttggctcactgcaacctctccttcccaagttcatgcaattctcatgcctcagcctccgagtagcttggatcacagatgcacaccaccatgccaggctaatttttgtatttttacagagacagtgtttcaccttgttggtcttgctaatgtttgtatttttacagagacagggtttcaccatgttggccaggatgatcttgacctcctgacctcaagtgatccgccggccttggcctccccaagtgctgggattacaagtgtgggccaccacgactggtctcctcataacatttttaacagcagttataataaatctgcatgcacaccatgtaatgcctatggaactaataactagtcttctattgtgcagtgcttctagtcacatatatagatgtttttgtgattctcaaatacacaaatcctcctaaaagcatcatataccgatattcactgcagcctgaatagcagattgggaacaacttaaacatcagtcagtaggtgactggttagttgtatcattctttttgagacaggctgcagtgcagtggcaatatcatagctgacatagctgactgcaacctccgcctcctagattctggcgatcctcccacctcagcctctcgagtagctgggaccatgggcatgcaccaccacgcccggctaatttttgtactttctgtatagatggggtctcactacattgcccaggctggtcttgaactcctaggcacaagtgatccacctgcctcggcctcccaaagtgtcgggattacagtcgtgagccaccgtgccccggctcctagttgtgtaattcttacgaagaacatcacgcagctgttaatgaggacttcccattagtcttgatatggcacactctccaagacatttaaagtataacacaccctacagtgtgtattaggaattgccatttgtgtggggaaatgattatatttacatataagtttataaattcagaaagcattccgaaaattcatcgagtatccggggtaactgtgcttgtctctagtgttgaactagtggcgggaggaagatttaatttccaccacatgccctttggtgccttttgaattcagaacaatttccgttatctattaaaaataaaatactggccgggcacggtggctcatgcctgtaatcccagcactttgggaggccgagacgggaggatcacttgagctcagcagtatcacttgagctcaggaatttgagaccaccctgggcaacatggtgaggccgtgtgtctataaaaagaaaaaatgaagtaaaatatcacgtgtaactgaatccctggaatttggcgggcaccggatactgtaaacaattgtggagctctttggaaatttaccttaaaagggagtcctctcaaaggctggacaccatcactctacaagggtgagttttcaaatctaccatagaagcctagggcctcagcagcatcctgagtcctaatgacggacaggttatgactcaactcccatcgcaccagtcctgcagctttctaaaggcatccagcactttctaccttgcattctatcttcatcttcgttagtccttacagcaccgcatgattccggcggagggtgcttatcagactagcctgtgtgtccccacggcacctacagcaccgtcaagcacagggtccagaaagctccaatgaaagtcgtgaaagcagcaagggaaggagactgaggagcaaaccgcgcgagtaggggcaggaggaggcccaccctacgccctgtccggcgcggggcataagccctgcctgcatcctgagatcccgggtccgcaaacttgggccccactgagcagcaacgccagaacccagaagcacttactgccaggaacagggtactccagtgcgccatagcgtcgcggccgctgggcgaggggtgggactgcaggcaccgtgcagccgcggaccaatgagcgggggccggacagcccgtggcccaatagcggcggcgcgggcacgctaggggcgggctgggcgcgccgacttttccggaagatccggatagtgcatcccggccacggcgcgcctgctctgggctctccgcgtgccgcgtcgctttcttttcttcctctggagcagttatggcggcggcgaagaccctgaaccccaaggccaaggtggccggagcgcaggcggcgctggcgttcaacattagcggggcgcggggtctgcaggacgtgctgaggaccaacctggggcccaaagggaccataaagatgtaaggtggggctggcgggagggctgggtgggcaccgcgcgccgctgcgcacctggcgggcccaagaccgcagatgggagcccgctgcctcggggctccgcagccacccttcctcgcgtcctcccgggccggtcctgttccctgctaagccccaccgttgcgtccatttcttcctgcgtcgatgccgtctccatggagaaaaaagcggctctagtgtgcggcgttccccgccttcttgggcttccagacaccctgaggactctgcacaatctctgcggggacggggtgggcactacacttgtcctccagcctgcgggagataactagctccatattctcggctccctaagatcggggaaaagcccgttttctaatgggactttttaatttagttttcgttgataactagctccatatccctggctccctgagatctgggaaaagtccttttttgttgtttgttttggttttttgttgtttttttttttgagacagagtctcgctctgtcacccaggctagagtgcagtggcgcgatctcggctcactgcaagctccgcctcccgggttcatgtctttctcctgcctcagtctcacgagtagctgggactacaggcgcccgtcaccacgcccagcttgctttatttatttatttatttatttattttgtatttttagtagagatggggtttcaccgtgttagccaggatggtctcgatatcctgacctcgagatccacccgcctcggcctcccaaagtgctgggattacaggcgtgagccaccgcacccggctggaaaagcccattttctaatgggactttttaatttagttttcgttttaatttcgtttttgtcacaatttgattgatttctgtcccttaaacagtcttgtttctggcgctggagacatcaagcttactaaagacacaggagttgacgatcagccctggccaacatggtgaaactcagtctctactaaaaatacaaaaattagccgggcacggtcctgcacagtgcgctgcttcacgaaatggtgagaggtgctctgctaggtcagaaatgtcttgattttccgtagaacttttgctttgtagaaagatttgcaatgtccattctcaaggtaggagaacattcagaagtgacatgtaacagtgacagtaatagtactgactgtgcctggagtctgacagccctgtctttgaatccctgcttttttgccattcacagtctgggctaaaggactgtaattgtacattaattataataaaatttgaaaaattaagggtggttgacacaatcacatgggcaaaatgcatgaggatggtttttctctttatgggttttttttttttttttttttaagacagaatctcactctgtcgcccagcctggagtccagtggttcactgcaacctccgcctcctgggttcaagtgattctcctgtctcagcctcccaagtagctgggattacaggcttgctccaccatgcccagctaatttttgtattttttgtagagatggtatttcaccatgttggccaggccggtcttgaactcatgacttcaggtgatccgcctgagtcagcctcccaaagtgctgggattaccaggcgtgagccacagcatctggccggttttt

SEQ ID NO: 1882865 - DNA, 4001 bp, Homo sapiens
gaaatccctgggctcttgagccagtctgtgcattttccattacactgggcatagcactgagaaatataagcaaatgccagtcactcaacagaaccctcttctacatgcggaaagggattgggagaagggacatcatagtagagagtcccttaaattccccttataggccaggtgtggtggctcacacctgcaacgtgagcttcctttaggaacccgaggcaggattgcttgagctcaggagtctaagaccagcctggcaacatagggagaccctatctctgctaaaataaataagtatataaatatacatattatatatataaatgtatatataacaatccatcttaccctgacaatctgcctgctaaaacttactaaaccataccaaactatatgaatttatttttattattattattattttttgagacagggtctggctcgtcacccaggctgaagttcagtggtatgatctcagctcaatacagcctctgcctcccgggctcaaaccatcctcccatctcagcctcctgagtagctcggactacaggtgtgcactataatgcccaggttattttgtgcttttgatagagacagggttttgccctgttgcccaggctggtctcgaactcctgggctcaagcaatccttctgccttggcctcccaaagtgctgggattataggtgtgacccactatgcctggccttgaaaatccattttatttcattttttataatttatttatttttttgagacggagtctcactgtcacccaggctgaagtgcagtggcacagtcttggctcattgcaaactatgcctcccgggttcacgccattctcctgcctcagccttcccagtagctgggactacaggcgcgcgccatcacgcctgggtaattttttttttttttttgtattttcagtagagacggggtttcaccgtgttagccaggatggtctcgatctcctgacctcgtgaaccgcccgcctcggcctcccaaagtgctgggattacaggcgtgagccaccatgcccagccgaaaatccattttatttatttatttacttatttaggtgtgacccaccatgcctcgccttgaaaatcttatttatttatttagagacagagttttgctcttgttgcccaggctggagtgcaatggcgcggtctcggctcactgcaacctccacctcccgggttcaagcaattctctgcctcagcctcccgagtagctgggattacaggcgcccgccaccacccctagctaatttttgtatttttagtagagacggggtttcaccatgctggccaggctggtcttcaactcctgacctggtgatccacccactcggcctcctaaagtgctgggattacaggtgtgagccaccgcacccggccagtcccttatataaatttttaaaaagatgttttcttcgtttcctagccccttctacccacctacaaagttccaaaggctttaatactattgcaacggcagtcagaggtcaagctgggggggtgcggtgcagctccctaacgcggggcagcctcaaagggggccgaccctgcccagcacgaatggcaccgggcggtgggggacgctctcgaggtccccggaacatggctgggggaagtgttggggggtgcacatacccaggctcagctgaggcgagtgcgcggccagggctgcagctggcgctggctggtacttgctcaggccattgaggagcttctgggcgaccctgcgctcgtgcctaccaggcgccagccagtaggtgcgcagcgcctgctccagcagcgtcaagcctttgctgcgcggaccccgcaggccgggaagtcacgcaggtggtagtagtccaggtggtcgtaaactcctcctcatagcttatgggtggcggcggctgggctgaagactgcggacaggacatcccgcccggccgcctgtggtcaccctcccgcgcaggcgcgctcctggaagacccagcacctggagttccgattggctctgcgtgaggggcgggcctttgcgacatcttgggggcgccttcggtgacgtcacaggggcgggccttctgccacgtcacaagggctgtacagttcctggagctgggcagtcttctcagagtggagcctggtaaccgcgacctccccgccagttcctgtgtgttgctggctggaaaggggtagttgacaaactcccacccagcacagtatttatgtcggtcaaaaatggaaaactatgtgtccgggcacggcccaggaaggaggattccttcaggccaagagcagcctagcaatatggcgcaaccccacctctgtagtccaacctcagcctcccagctacttgaaccccaagattcaaggctccaatgagctgtgatctcaccacagcactcctgcctgcgagactgaggtaaaccctgtataaaaaaataaaaaagaaaactatccaagtgtacaaccgggagggactgcttaaagaacacatgaggctccctgggccgtgctatcccggcactttgggaggccgaggcaggaggatggcttgggttcaggagttcgagatgcgcctggacaacatgacgcaaccccgtctctacgaaagatacaaagattagccaggcgcggtgcacgcttggcctaatttttgtatcttccgtagagatggggggggtcttgctatgttgcccgggccggtctcgaactcctgggttcaagcgatcttctcaccttggcctttagagttgttgggattacaggcgtgagccaccgtaccctcctgggctaggctatttaataacataagaaagtgcggtggctcacgcctgtaatcccaacactttgggaggccgaggcgggtggatcacctgaggtcaggagtttgagaccatccttgccaatatggtgaaacccagtctctacaaaaaaatacaaaaattaggctgggcgcggtggctcacacctgtaatctcagcactttgggaagctgaggcgggccgatcacctgaggttgggagttcaagaccagcctgaccaacatggagaaaccccatctctactaaaaatacaaaattagccgggcgtggtggtgcatgcctgtagtcccagctactcaggaggctaagacaggagagtctcttgaacccaggaggcggaggttgcagtgagccgagaagcatcactgcaccccagtctgggcgacagagcaagactccagagcttgagaccagcctgggccatgtagtgaaaccctgtttataaaaaacaaacaaaaaaagccaggtgtacctgtgtccacctgtggccccactacttaagagtctgaggcaggaggataacttgaggccaggagctgaaggctgcagtgagctatggtcatcccactgctctccatcctgagcaatagaatgaaaccttgtctctagatagctagctagctaggtaattgatacgtagttttctatcggaaatctttttcctagacttgaacatgtttttctaaagtagcattcaacacatcagcattttacagtgttattagttgttaatatgattatgtttttctgaaatacagtattctttaccaaaacagtgttgtctttcaaagcacatacataggtcctccagtgaatttgtctgatgttggcgaccttcgctttctggtgactgagtcaacagtatctgtttcataaataatgtagccctattttttttgagacagggtcttgctctgttacctgggctggagtgcagtggcatgatctctgctcaccataactaccgcctcctgggttcaagcgattctcctgcctcagcttcctgaataactgggattacaggcgccaccatatctggctaatatctttttgtttttgtttttgagacggagttcgctcttgttgcccaggctagagtgcaatgtcgccatctcggcttactgcaacctccacctcccgggttcaagcgattctcctgcctcagcctccctagtagctggg

SEQ ID NO: 1882866 - DNA, 4001 bp, Homo sapiens
gtcccttctcggtgcctcagtgtccccacctgtgggcatcccccactcccctctggatggtttgagtcagtgccgtggacggctcatcagtctgcacagcgtgcatgcaggctcgcggggtccctgccgggggcaatgccatcccgcatctccacacttcatgcactagctctgctggccaaagccctggacccaccaggaggttcatgagggccaggagggagggaaactgaggcagcttcaagctgatgggaggcaggacaaaggggaggctcactctgagctgaaggcaggggtctcctgctgcctcaggggatccagcacccacccccagctcccctgagctgcgagcaggggagtgtgatccccccagggcacagcccgctgccccttccttctgcgtcccctgtctcagggagtcctggccatcacctgcctcctgagtgaaggctgttcatggtgcagtctctacagatgccagatccacagggacgctgcctcccagagcttgctcagaggggtgagtgacgctgctgcaggtcagagacatcccatgggccacggtcaccagcgggacctgggagatgagaaggggcaggcaggtgaatttccctccctggctctcccggggagagggctggggtcccaagtggccatgggattgtcccttgtgtctggtaattggctgtgtctggcccaggagctcaccacctgctgtttgctccagtcccctcccctccctccctctgtcctcctgccccctcccctccctccctctgtccccctgccccctcccctccctccctctgtccccctgccccctcccctccctccctctgtccccctgccccctcccctgcctccctctgtccccctgccccctcccctccctccctctgtccgagctgcacctgcacgaagacgtcactcagcaggaggctttgctggggatcagttttccagaccaggccccttgtctgccactctccgttctgagcattgagggtcctgggaatagaagccacctccatcacctccccttctgcacaagagcctgttataggccaattcgtgtctccccaaatccatgtgtggagtccgaacctctggggcctccgtgtgtggccatatttggaagccgggttgtcgcagctgtgatttgtttagatgcggtcacaggagtagggcggacccagcgaccttatacgaaggggaaatttgcgcagagcggggtgggccgtggggcatgtggaataaacccttgaggagggaggggcgaccggagcccagagtcctgctgacctgggggtggatcatccgggggggccaccagagcagctcctcgcctgcctggaagccaccccagaggcacctgccgcggcctcctctccccacacttccctctccaattcccggaagtccctgcggctctcactgtgctccgctccttcctgctgagccacactttcccaggacgacgcttacctcagcccagggtccaagaccgcaggacactggcccccgcccaggccacgccccccagagaggggctcccggcaagggccacccccaaccgctccctcccctcccgggcccaggccagtctcgggacaatgcgccttcctcttgggctgggccgggtccttggcgcgattcgcctttggagaaactggaacgaagccgggaggacgcctccaaggtgtcagacagcgcctccaacgcacgcccagcacccggctggccccagtctccggtctgctgatccagagccgcgtcctcgctttacagaccgggaaactcgagtgcaggtggcccagcccccagggacgaaacgagcccttccggggcggcccctctcctgggagccacgcgaggccctcacccctctcctcctggtctccaggcgtcctgagcaggtgccacagttacggccacttcacggatgagcggacgaggctcagagaagtggatggcggtgccagcatggggcaggagtcctgtgggtggcccctcccctccggggcagcttcagaagagtctgtgacaggaggtcccgccccggactttgagcagggaggacgtggacagccgcggggctgtggaagcaggaagctcgggcagtgcccggctgctcacagccaagtcctccgagccctgtgccctccccagacctgctgccccgcgtcctgcacctgaggagccgcacctgagcctccctggtcccgggccggcctcgtcctccaggcagtacagcttggagtgtccagaggcggccttgggacaggggccgtggtcggcgggacccgggcccacccatgctttgctatgaaggagatttccctgtcgggccacacatggagaggagttgcccccagagacccctgcgacccagggaaggagcccgaggtggcagcagcccgggacctacagaggggcggttgggagcttctcttggagaagatacaccccaggcctgggggtcctggcgcctgcggggctgttgggcgggaggaagtgtgaggatcctgctccgtggcaagcacagaagcagcctgagagcggggacaggccgtgggccagaccatgcgtccaggtgggggaggctctcacccggcgtggtccagccacagctctgccggcctggctgggtgaccagggcccttccctgctcttggccttggggttgtcatctgcaaggagggcatcctcggttctctacgctaggactggtgtgggggtctgttgagaccccaggtgtggagcagtcccacagtcgtgaaatgggcgcagacggggcagcctccacacccttggccctgggccgccacgcagtggggctgagcttgtcagctcccaggacgtgtgagtgactgcaggtggccgggttcaggagctggcaccgccggcgcagcgtcctgtgtctctaactcagttgtaccccacgggcttcttcgtgaatgaaaaataaattaatggtgaagaaaattgttgctattcattgttttctgtgttccgagcagtgaggatttcccggtttactgttcccagtgatttaggaggtggctattattgtcttcacatttcacagataagacaactgaggctcggccgggcatggtggctagaacctgtaatcccgggactttaggagaccaaggcgggaggatcgcttgagtccaagagcgcaagacaagccggggcagcacagggagatccgtctctacaaaaatagaaactttagccaggcatggtggtgcacgcctgtggtcccagctacccaggaggctgaggcaggagggtcatttgagcccgtgagttccaggctgcggtgagtggagatcacaccactgcactgtagcctgggccacagagggaaacttgtctcacaagaaagaagaagaaaactgaggccctgggaaagtgagtccctggcccaaggccgcagggctgtgagtggggttcacagccgggtgtcccaccgagaggggtgtgagctgctctaacctctgggattctgcccagtacccaatgccaggagcagggccaggtccacacctggcgggcaggaaggggcaggtctttcgtgctgtggacagtcacctttccctggcctggctgagcccacagagattctctcccgcttcctgaggctctggtcagccggcaggagggtcaggctgggatgggcggggtgcggacggaagccttacgcccgtgctctctgctgagcccaggagagggaggagccccagccgcccacccggccctactcccctcggcttcttttgtgcctggcctcagacttgctgtcctcaccgtgctgacaggggcacctggggtgtggctgggtcggaggtggccttgccaggcctgggtggggctgtgacaggggcgctaggtcaacctcacttccagcccccgactccctctccgcagaggctggttacctgctctgggggcctaagctgccctggtcagcccatctgtttcctgctcgctgg

SEQ ID NO: 1882867 - DNA, 4001 bp, Homo sapiens
cctaagctcctacatctctgtcctgcactttttcactttaataaccaccctccaggctcggtagcccatgcctgtaatttcagcactttgggacacttgaggagggaggactgcttgagtccaggaattcaagaccaacccgggcaacacagcaagaccccatctttacaaaatctttaaaaatcagctaggtgtggtggcacgcatctgcagtcttaggtactcaggaggttgaggtgggaggatcacttgagcccaggcagttgagacttcagtgactcgtgatcgtgtcactgtactccagcctgggtgacaaagtgagaccctctctctcaattaaataaataaataagcacctccttgtagttactggcctcctctcctttggttcccccctctccgtcactccaccctgttagtatgaatgttactcattcttcaagacacatgcagaaagtattccctgatcccttctaggctccacacccaacagcacggcctaaatgcccggctccttcctcggtgctccatcttagctcacactccttaccacactgttttgaaagtatcttgactgtcccttctcctcaactggctaacttctagagagcagaaacatgactgcttggaaggtcattaaaaattcaaatcctgaacacttcttaatcctgcagatatgaatcagtaactcttaaaagcaaaatgttatttatcattaaatattaacaatataatcacattttcttgcatctctggcaagtttcttggcataacaattttaaggagcagactccaacagcagttaaagccacgcgatggctcacgcctataatcccagcactctaggaggccgaggcgggagcatcgcttaaggccaggagtttcacacctgcctgggcaacactgtgagatcccatgtcgaaaaatataataaataaaaacaaagcagtttcaggtttagagggaggaaagtagctctccgagccaaaaaccaactcccaaggtgctccggtaaactcgtcctggaaaaatctcctatttaatctcaaaggcaaaacgagtccacgggcgcccacgacacatttcccaaccgcaaggattggtcacccgcgctgagacaccgccagctgcctatgacctagcctccaaagcggcagagtccccccttctctctccctcaactgccgtgatgggcacccctcggctctcctcccagacggttcggaagcagggacttctgctcctaaccccagccccgcagcctcgccctcagccacggggtggaaatcaggaccacaggcttcaaatcccctccccactccgggacgcttctgtccccccagggcaacgcgggatcaagtcccggcgcccctgccgcggccggggtctgtggtttgggtccgagagtcccatcccggagcgttccggggatgttctgtgagaggccccgcccgaccacaaatgttgcttcggaaccagcgtcctggacggggaagtgggagccgggccgagggaagccgccgcagagggaggcggccaagaaatgctccgcctcacgccttcggggcttggccggccgctgcagacgccggcaaccagcgcctgagacagagaagccgcgcactgggaggattaagggagccgagggcggcctggaacggggcaggcggggctgacgaggctggaatgtgggacgaaggacagcgggaggcaccgacgcgcaaccgcccccgccgcgcggacggcacagaccaaccgctccccccaaccccggcccgagacacctcgccgccccgctcccggagctgagagccgcgctgctcttggccctagtccttccgctccgtacctcgcctgcgtctccaccggcgtccaaagccccgctcgcccgcgtcgttcgggtaggtctcgactccgcggtccgctaccgcctcatacccaccctcctcctcgccccgctcccggcaccgccagaatgcacgttacgcacggcgtgcaaacgtcacttccgtggcctttggctcaggacgggaggaggtgtggatccaaaggtggcgcgtgcctgtaaccccacctactagaaaggctgaggcaggaggatctgttgaacctgggaggcagaggttgcggtgagccgagatcgtgccactgcactccagcgtgggtaaaagagagagattccctctaaaaaaacgaaaaaaaaaaaaaaaaagaaatccaagataagatcacagaactggcaggtttggtttctcctgaggcctctcttcttggcttatagatagtcactgtcaggcctccgagcccaagctaagccatcatatcccttgtgacctgcatgtatacatccagatggcctgaagtaactgaagaatcacaaaagaagtgaaaatggcctgttactgccttaactgatgacattaccttgtgaaattccttttcctggctcatcctggctcaaaagcttccccactgagcaccttgtgtcccccgcccctacctgccagagaacaaccccctttgactgaaattttcctttacctacccaaatcctataaaacagccccacccctatctgccttccctgactctgagtcccttccaggactcagcctgcctgcacccaggtgaaataaacagccttgttgctaacacaaagcctgtttggtggtctcttcacacggacaccagtgaaagtgacctcttcactgtgtccttacatggccttttctctgtgaacatgcatttttagtgtctctgtgtgtgtccaaatttcctctttttataaagtcaccagttgaattggattagggcccaccctaatggcatcatcttaactcacctctttagagaccttgtttctaaatacagttgcattctgatgtactgggattaggactacaacatatgaatctggtggggatcacaattaagcctataacgtaatcataattacttaaaaaataaataacatggtgatatagaataaccaggcaggagtgagggttagggaggctagggagatcgtgataagatgatggctccaagttgagagcatgagggactgtgagggtgaagccacgtgagaagaaagaggagaaggaagatgccagctgtcctggagtttaggcaggacttaagtgactttcagactgatcacttatccaaatatgaaaactctcaggactcagaaaatgatacgactgagcaacagtgcagcaccagggcagatgttttggcttcttcttgtgtagctcatctcatatctccagttagaaactttccttttttttttttttttctgagacggagtctcgctctgtcacccaggctagcgcagtggtgtgatctcggctcactgcaagctctgcctcccaggttctcgccattctcctgcctcagcctcccgagtagctggaactacaggcgcccaccacacccggctaatttttttgtatttttagtagagacggggtttcaccgtgttagccaggatggtctcgatctcctgacctcgcgatccgcccacctcggcctcccaaagtgctgggattacaggcgtgagccaccgtgcccggccaagtttccttgtatttaatgtagaatctgatgggaacaggccccccaaaatctggccataaactggccccaaaactggccataaacaaaatctctgcagcactgtgacatgttcatgatggccataacgcccttgctggaagattgtgggtttaccggaatgagggcaaggaacacctggcccacccagggcggaaaaccagaaaaacgcttataggcattcttaagccacaaacaatagcatgagcgctctgtgccttaaggacatgctcctgctgcagttaactagcccaacctattcctttaattcggcccatcccttcgtttcccataagggatacttttggttaatttaatatcttatagaaacaatgctaatgactggcttgctgttaataaatacgtgggtaaatctctgttca

SEQ ID NO: 1882868 - DNA, 4001 bp, Homo sapiens
gggaggggagcccagcgttccataggcgtagttcggtttgaacagaaacctggccagctctcctctctgcatgctcagaaggcccagctccatgccccacaatgtaatatctgtaagaagggacaaagaaggtgggtgaagcttgctcagtatcctgcttaatgctatcagtttcttccccctctaagtcagcagtactctggcctccatgtctccctcacacagttccctcttcctgcaatgtcttcctcctgagcctgtgcccagcttctagtgatagaaattttattcaaacttctgggctcagttcaaatgccccctcttccaggaagccttccctgaacttcccagctagaattaatcatgccttcattaagcacacccacaacactgctttcacctcccaggcactcatccgattctaccaagtgagctgagtgcaggtcagtctcctctactacattgtgaggtccttaagggtggagatgttctaatcttctgagtacaacctctcttttcaccatgtattgtgggaagtaagcattcgtcgatttttacttaataaatgaacaaagaaacattcccagtggtgagttaagtcagagtgcaaagattataccttgcccattaagccatctcccaaatgcctaggtctcaaggggagagaacatggctgttttaccaaaacccagcctcagcaaagtcaattcaaagaacctgcgctctgagcagtcttcccagcctgaggcatggtgcctcatctcgctcctaaacaatcccttcttctccagctcctactctgaatttaccctctccaagtttcattagccgaggagttttcctaaagtaattagaatcgaagggtctgtccaagtgttccaggtatccatactatttcactagaatagaggaaagaatgtaaggaaaatggacccaaaacacccacgcctccataatatcgagtctctcatgatcacacagaaacaatgcgatcagatgagcttaagctgcccgacaccacgaggtacaggaataaatctctctgcattttaggagcctgcccttcggctcagaggttcaagagcttcatggaagcatcacgcaaaggggacataggggtccttagctttcctcttaaaaaaactaattcatggcagaagcagcggctcacgcttgtaatcccagctactggggaggctgaggtgggaggatcacttgggaccaggagtctgagaccagcctgggcaacatagaaagtgccccatctctacaaaaatattaaaaattagccgggcatggtggattgcgcctgtaaatctcttatttgggaggctgaggctggagaatcacttgagcccaggaagcagaggctgcagtgagctatgttcgcaccactgcactccagcctggggaactgagcgagaccccgtttcaaaaacaaaaatccacttcaaacaaagcatttccaaccccattaaatgctttttgaaaatgaggcctctctcttcccaacagagtgcgatgacatggatcctgcggacaaaccgccccagggcgtacctagcaccgaagcatcaggcgccactaggtctccagctccttctcggatgacgtccttcagcacgccccggtcccccgagatgtccagcatcctctgacttaaccgctcgtacagggactgatggagaatgaaagccaggcctcagagccgcagacccacccggccacccctcagcgtctacgcccccacgtctgggccctcacctggccgggggcgtcgtccccttccaggactccctggtttaacgcgcttccccccatgtcctagctgccctccctgtggcgtgagccttcggcctggtgcgccccgctgcccttcctggctgtgactctggtggggttccgaaggcccctttatgcccggcagacccctaccgacggcggcattccattctggggccacgaggaggcactcatcgtttcgttccaaccgccgccaacggccctggccctcgcgagctctggaactacagaggtcgcacggtgagttgccaggtgtggcccgtaatcggagcgcacaaaacatgatgggacacgtaacgggaccacacagggcacattgggcacttgcaggggcgcgaggtggcggcacgtaatgggagcgcgctgagcatgatggggcatgtgcgggagcgccaggcggggcatgtaaccagagcgtgcggggcatgatggggcacggacatggggggttaggtggggcacgtaattggagctcgcggggcaggatggggcatctaactggagcgacagagagcacgatggggcacttacaggggccggaggctgggtacgtaatgagagcgagcgggaaatgatggggcacctaacgagcacgcagagcatgatggggcacgggtgcgaggtggggcgcacagtgggagcgcgtggggcatgatgggacacatggcgaggccgtcagggcacaggggaagcacttttggaacacgtgagtgacagggctgccgcccttgaaggagccctcggagtggctgcgtggtggggcacgtggggcaggttcaggaaaaaggatgcagcatgtgattgcagggcaacctggtgaggacacgagagccacctgccaccagcagggttcagggctcccagctgtgggttacttccaccttctttcactttccctcttccattgtattctagagaatttaggcccagacaagacactgattgattgattgattgatcgattgacagaggctcgctctgagcccaggctggagttcagtgatggatctcagctcactgcagccgccacctcctgggctcaagagatcctcctgcctcggcctcccaagtagctgggattacagacgtgcaccaccaggcccagctaatttattttttagtttttaatttgctggtaagatggtttgtagctttgttgcctaggctggtcttgaactcctggcttcaagcgatcctccagtcttgacctcccaaagtgctgggattataggcgtaggctacagccaactttcaatactgccccattgggggttacgtttccaacacatgaaattaggaggatacattcaaaccacagcagtatattatgaccataatattcattaactgtgtaacaggctgggcgcggtggctcacacctgtaatcccagcactttgggagaccagagtgggtagatcactcgaggtcaggagtttgagaccagcctggcccacatgatgaaaccgcctctctactaaaaatacaaaaaattagccggtgtggtggcaggcgcctgtaacctcagctacttgggaggctgaggcaggagaatcacttgaatccgggaggtggaggtggcagtgagcctgattgcaccactgcactccagcctgggcaacaagagcaaaactctgtctcaataaacaaacaaacaaacaaaacctgtataacagagtgtcattgaatttctaaacgttgaaagacttcacattaaaaaaaaactcacaatttaatattattgagtgaaagaaaccagacacaaaagggtacattctatatgatgctgtttatgtgacattcaaaaacaggccacatgacaacatggtaataaggacagtggctgtccttgttaggagttatgactggaaggaggcaggagggagctttctggaaacactgtacatcttgctcttgagagtgcacgtatatacatcaagtgtttatcaagctgtgtggttaagatttgcacacttgtatatgttatacctcgatttaaaaaatctaaataagtaaataaagataccttcaaatctttaaaaaaaaaaaaaaaaagaggccaggttcggcggctcacacctgtaatcccagcactttgggaggctgaggtaggaggattgcttgaggccaggagttcaaaaccagcccaggcaacaaagtgagacccctgtctctactaaagtaaataaaacaataaaat

SEQ ID NO: 1882869 - DNA, 4001 bp, Homo sapiens
ggggagcccagcgttccataggcgtagttcggtttgaacagaaacctggccagctctcctctctgcatgctcagaaggcccagctccatgccccacaatgtaatatctgtaagaagggacaaagaaggtgggtgaagcttgctcagtatcctgcttaatgctatcagtttcttccccctctaagtcagcagtactctggcctccatgtctccctcacacagttccctcttcctgcaatgtcttcctcctgagcctgtgcccagcttctagtgatagaaattttattcaaacttccgggctcagttcaaatgccccctcttccaggaagccttccctgaacttcccagctagaattaatcatgccttcattaagcacacccacaacactgctttcacctcccaggcactcatccgattctaccaagtgagctgagtgcaggtcagtctcctctactacattgtgaggtccttaagggtggagatgttctaatcttctgagtacaacctctcttttcaccatgtattgtgggaagtaagcattcgtcgatttttacttaataaatgaacaaagaaacattcccagtggtgagttaagtcagagtgcaaagattataccttgcccattaagccatctcccaaatgcctaggtctcaaggggagagaacatggctgttttaccaaaacccagcctcagcaaagtcaattcaaagaacctgcgctctgagcagtcttcccagcctgaggcatggtgcctcatctcgctcctaaacaatcccttcttctccagctcctactctgaatttaccctctccaagtttcattagccgaggagttttcctaaagtaattagaatcgaagggtctgtccaagtgttccaggtatccatagtatttcactagaatagaggaaagaatgtaaggaaaatggacccaaaacacccacgccaccataatatcgagtctctcatgatcacacagaaacaatgcgatcagatgagcttaagctgcccgacaccacgaggtacaggaataaatctctctgcattttaggagcctacccttcggctcagaggttcaagagcttcatggaagcatcacgcaaaggggacatagggttccttagctttcctcttaaaaaaactaattcatggcagaagcagcggctcacgcttgtaatcccagctactggggaggctgaggtgggaggatcacttgggaccaggagtctgagaccagcctgggcaacatagaaagtgccccatctctacaaaaatattaaaaattagccgggcatggtggattgcgcctgtaaatctcttatttgggaggctgaggctggagaatcacttgagcccaggaagcagaggctgcagtgagctatgttcgcaccactgcactccagcctggggaactgagcgagaccccgtttcaaaaacaaaaatccacttcaaacaaagcatttccaaccccattaaatgctttttgaaaatgaggcctctctcttcccaacagagtgcgatgacatggatcctgcggacaaaccgccccagggcgtacctagcaccgaagcatcaggcgccactaggtctccagctccttctcggatgacgtccttcagcacgccccggtcccccgagatgtccagcatcctctgacttaaccgctcgtacagggactgatggagaatgaaagccaggcctcagagccgcagacccacccggccacccctcagcgtctacgcccccgaaacgtctgggccctcacctggccgggggcgtcgtccccttccaggactccctggtttaacgcgcttccccccatgtcctagctgccctccctgtggcgtgagccttcggcctggtgcgccccgctgcccttcctggctgtgactctggtggggttccgaaggcccctttatgcccggcagacccctaccgacggcggcattacattctggggccacgaggaggcactcatcgtttcgttccaaccgccgccaacggccctggccctcgcgagctctggaactacagaggtcgcacggtgagttgccaggtgtggcccgtaatcggagcgcacaaaacatgatgggacacgtaacgggaccacacagggcacattgggcacttgcaggggcgcgaggtggcggcacgtaatgggagcgcgctgagcatgatggggcatgtgcgggagcgccaggcggggcatgtaaccagagcgtgcggggcatgatggggcacggacatggggggttaggtggggcacgtaattggagctcgcggggcaggatggggcatctaactggagcgacagagagcacgatggggcacttacaggggccggaggctgggtacgtaatgagagcgagcgggaaatgatggggcacctaacgagcacgcagagcatgatggggcacgggtgcgaggtggggcgcacagtgggagcgcgtggggcgtgatgggacacatggcgaggccgtcagggcacaggggaagcacttttggaacacgtgagtgacagggctgccgcccttgaaggagccctcggagtggctgcgtggtggggcacgtggggcaggttcaggaaaaaggatgcagcatgtgattgcagggcaacctggtgaggacacgagagccacctgccaccagcagggttcagggctcccagctgtgggttacttccaccttctttcactttccctcttccattgtattctagagaatttaggcccagacaagacactgattgattgattgattgattgattgacagaggctcgctctgagcccaggctggagttcagtgatggatctcagctcactgcagccgccacctcctgggctcaagagatcctcctgcctcggcctcccaagtagctgggattacagacgtgcaccaccaggcccagctaatttattttttagtttttaatttgctggtaagatggtttgtagctttgttgcctaggctggtcttgaactcctggcttcaagcgatcctccagtcttgacctcccaaagtgctgggattataggcgtaggctacagccaactttcaatactgccccattgggggttacgtttccaacacatgaaattaggaggatacattcaaaccacagcagtatattatgaccataatattcattaactgtgtaacaggctgggcgcggtggctcacacctgtaatcccagcactttgggagaccagagtgggtagatcactcgaggtcaggagtttgagaccagcctggcccacatgatgaaaccgcctctctactaaaaatacaaaaaattagccggtgtggtggcaggcgcctgtaacctcagctacttgggaggctgaggcaggagaatcacttgaatccgggaggtggaggtggcagtgagcctgattgcaccactgcactccagcctgggcaacaagagcaaaactctgtctcaataaacaaacaaacaaacaaaacctgtataacagagtgtcattgaatttctaaacgttgaaagacttcacattaaaaaaaaactcacaatttaatattattgagtgaaagaaaccagacacaaaagggtacattctatatgatgctgtttatgtgacattcaaaaacaggccacatgacaacatggtaataaggacagtggctgtccttgttaggagttatgactggaaggaggcaggagggagctttctggaaacactgtacatcttgctcttgagagtgcacgtatatacatcaagtgtttatcaagctgtgtggttaagatttgcacacttgtatatgttatacctcgatttaaaaaatctaaataagtaaataaagataccttcaaatctttaaaaaaaaaaaaaaaaagaggccaggttcggcggctcacacctgtaatcccagcactttgggaggctgaggtaggaggattgcttgaggccaggagttcaaaaccagcccaggcaacaaagtgagacccctgtctctactaaagtaaataaaacaataaaata

SEQ ID NO: 1882870 - DNA, 4001 bp, Homo sapiens
tggaaggacagtacaatgtatctggtctatgctacagatagtggcccaggtgccgctgtcctctcatttgtgtccatgaaggcagatgagattatgaacagatggtccagaatcccaggctggtggagaaaacgggttcgtactgcagattcagtgtcttggtataggaatatgtcaggagccttgtggacacttttgagggttttggcaagaaataccaggataaaatatgctgtggtgaaattcctggggggtggtgtctattcctgggaggggtgtgaacacctcaatgtctagcatctttttttttttttttcccagaaactcaaagtcagtgatttattttttattatgttaaaggtgacaaatcttggcttaagaaaaactagatttgtgactaaaggaaacattttcttggagcttttcattgttctggcttaaatttccttttaaaaagtaactttccggccgggcgcagtggctcacgcctgtaatcccagcactttgggaggccgaggtgggcggatcaggaggtcaggagattgagaccatcctggctaacacagtgaaaccctgtctctactaaaaatacaaaaaattagccgggtgtggtggcgggcgcctgtagtcccagctacttgggaggctgaggcaggagaatggggtgaacccgggaggcggaggttgcagtgagcggagatagtgccactgcactccagcctgggctacagagcaagactccgtctcaaaaaaaaaaaaaaaaaaaaaaaaagtaactttccataagttaaagttagcactttcacaaatactagcagagtcactaaatgaaatatcaacatcaaaacaaaaaacatgattaacaaaaaaatattttattattttgctgcaaagctgttgcttcactgtgtaaaaatagcatcagcaaatgcagtgtattgcaaaattaagatagtattgttcctcatctgacactgtacaagcaacaaaaacctcttcactcccagttatttccaatagaaagatcattaagtatttcaggccaaatccaggtatggatatatgcaagttacaatattatataaagcttaagaataacattatctttgaattatgtaatttttataaccagtttttaccatggataatctcatgaattctgaataccagagcctagactaaaaatcataggatattgtggaaaagacgtgtattatctttatctataatcattagaaagttaaagggcattttctttcattagcagtgttaacagtagtttttcctccccccccccatcggtaatgctgaaagttgctattctaagtcttccatccaccactaatttaagacagctctgctgggttatttcacactagtttatttaggggttccattttcactcctcaatagattttctctatctctcatatacttcttcactcataagttcatctagttctgaagggttacttagtgtcatcttgatcagccaaccatcttcataacaagatttgtttacaagtcctggattttctccaagagcttcattaatttaagttacttctcctgataaaggagaatagagttcactagcagctttcacactttccaaagcaccaaactcatcttgtttgttcttttgtcccaacttcaggcagactacagtaaacaatatctcccaacgtttcctgtgcaaaactgctgactcccagtgttccaatatcattttctgttgccatccattcatgtttctctgtgaatttacgcaccgagagcagaggtggtcccgcgcgcagcgtccgaacagcgcccaccccccagctgccagggcctcggcgggcagggcgcggcgggtgacagggccgcgtgaagggtgcgcccgcacacatgctccgcgccactcgcagcgccactctccagcgccacgttcgcaggggtgctgggggtcgcagccctaagcctcagccaacggcgcggggaggcggggcggggcggggcctctagtaggtatctttgttagtgggtgaaaatcctgtggtggtagctgtggggaaaaggtgatctgttatcagcgctcctttcctttaagttttcagtcctctctcaccctgggaggtgacctgaatcacaggacaatgggcagtgtgacagcctgtgtacaggagagcagagcctccctttcccagatacctagagttacattccaggccaggcctctgagatatctttcttctggcaccaaatctgtagtttgctgaatatcaagtaattctccaacaccaacgcactgtctaaaacttgaattctgattgttagtccaagctgcaccattttgtaagccccccaccaccaccatttcgcagaccatggtcagaatgaaacattccacggggattcgggccgtgccaaacatcctgcccaaccacaggattttcttatcacacacgtctgtgtaacagtccaagcaacctccttattacatcttgctggaaaaagggccaaactgcctgaccacaagaacatcttatcaacatccatccaggcagcaagccatactgcctagatccctcccaccagtctgagccaacatacaattccattttatatccttcctaagaacatgctgacttcagggtacaacacttcctaatccaaaatcttgatattttctcactccatttgccattccccttccaccttctttctaatcttgttttctcctccctatgaaagaaagcctttgtctgcctaaactttgcaatccttaaagattttatagctggtacttccttctgttgcaatactcttttaaaattcaaatgttttaatagaaacctaattttgttttattttacaaaatctagaaactgcctcaaaacaataacaactttattttcagtaagaccctcccattccttttccattttaactttaactgcatctgcctgtgggtccccagctttccaggggtctgtagcttctctcagtataaaggcttcttccacggctggtgtgagcaagctgggacatctgcaggggcggctccccagaaagaactaactgggacttttaataacctccttttgcagactcaatattagccttagcttgaagtcacagggctcaagccttaatttccatgtcagttattcatttggtttttgaaactaagtgtttgaaaaatccagcaaaattactcaaacatggtgttaatataagagaagaatttttttttttttcttttcagacagtcttgctctcttgcccaggctggagcacagtggcacaatctcggctcactgcaatctctgcctcccacgttcaagagattctcctccctcagcctcctgagtagctgggattacaggcacccgccaccacgcctagctaatttttgtatatttagtagagacggggtttcaccatgttggccaggctggtcttgaactcctgacctcaggtgatccgcctgccttggcctcccaaagtgctgggattacaggagtgagccaccgcacccggccgacagttatattttatacctcaataagaaatgcaaaagtatctattcctttcaaaaaataaacccgttattatttttttttttttaatttgagacggagtctcgctctgtcgcccaggctggagtgcagtggcgcgatctcaactcattgcaagctccgcctcccgggttcacgccattctcctgcctcagcctcctaagtagctgggactacaggcgtccgccgccacgcccagctaatttttttgtatttttagtagagacggggtttcacggtgttagccaggatggtctcgatctcctgacctcgtgatccgcccgcctcggcctcccaaagtgctgggattacaggcttgagccaccgcgcccggccccattattatttctattaaaaattatgtagtaggccaggcgtggtggctcacacctgtgatcccagcactttgggaggctgaggcgtgtggatcatgaggtc

SEQ ID NO: 1882871 - DNA, 4001 bp, Homo sapiens
ctcttagaaaatgaatttttaaaaatcagcatattaaataaatattaacttgacaaggcttttcctattgacccttctttagcaaacaaatattcatcttttgataactgctaaatgcaaattttcactttaaaaagataaagataaatattaaaaaccagtttgcccttcattttcgcactaatcaccaattctcagaaactgccttttatattcttcagtgtggactacagcaacttcaactgctgggttagttgtgatcaaatcactttaaagacaccagtggagttcttttactcaaaagcaaatgacttttaaaaatggcccaattttaagagggatgaatatttttaagaagcaaaaattactttaaaacaaggttgctaattaaaagtcaagcgtcgttccatattgaatgtacaaagcgttactaaaaagatgggaaaaactaaacatgacattcctatttttaatttatgctggcgtgtgtgctgatagcacagaacatcacaacagataaattactacgtattccactttactaagtctccactcaaagttcctacgtttacaaatatgtaagtaaaagaggcacaaaaatgtaggggatggtgttttcgttgctcatctgtgctcagttgcgaattcttctaatatcagatacataatgcgatgaaatgggaatgcttatcttctatacttctatttattttcataaagcgggaaggggaggtggtcttgattcatttaatattagcgttttgcaataaagtagagcagcataaaatataactgaagaagaattcattttccccaggaaaatgcacccttcctcctgtttctacagtaaagcacatcattttgctattaaaaatgtccatttttcacaactgacttttccttaactctagtcaacactgctcttcaaaagaacctagccaattactgtaccttgtaggcagagttgcaaaatttttgcttccctaagaaacttttccattttttaaatgctttccaaattaagcaggactcacattaactgtgatcttaagtagcagtttagtgaggtttgaaaacaaacttttcattaacgcattcatccaattaaagtgacatagtaggtgggactactgacacagatttaaggattacagctttatattaaaagtcagtccaaagatggtaactcagagttcatttgagaccctttgacttttggcttttaaaaattgtgccccactcgagtaccagatagaactacatttagcaaccgtctcctcctgacttcctggtactaaaagccacaaccacaagggctatttcgtgggtttgctgtaaaacaacatttgctccagtcaactcactggaaaatagactatctctactgagtacccgctgaggtgtgggtgctcacgatgtttaaaaacaaaaccacgtgtctacgcggcagcgacaccgcaggtgttacgtgccgggtttcttcccaggatggagaccggcgcgggctgggccgggaagcagcccccggcgccccggccgaaggagaaaaggagaagggtaaaaatagccggcggccacggcccacgtgcagccgcgggaggaccgagcgcgggcgcgtggagaggggtccgtacctccaaacatgcgcggtgagaggtgagctggtaaggagccgatcaccaggagcggcccgccggggctccagcccaccggccggtgccggccgccgccgccatcctcagggctgctgtgcaccgagtcctgcgagtcctacgggccgctgctgctgttcgggatgctgaaagaggactgcgccgcgaaggcccccgacgccacgcccccccgaggaaacagctgcggggccgccgcggcgccgccgggctggtgagcgctgggcacctgggccgggaacctccccgcggcggcggcctccggcccccggctctggtcccggtcccattggccactccgctgctactggaaggtagatccgagccgagtacgcgcgcgtgcgccgtgagcggcggccaggccgctctgcttggcgctcatgtccgccctgctccggaccgggccgcgcgctgtgccccgagagccaagaaggcaggagcgaacgcgggagctagagggcagggccgaggcgctgcggccggcccagagaggcccccgcacgtccagggccgccgcccggcgccccgaggggcagtcggcgcccggcgcgctcttctcggggcggtgggcaaggctggcggcctgacgcgggcgcgggagacgaggagacgcggagaagaaggtgtcccggctgcaggcacccctcgctgtctccagcaggaaggggcgactcaggtggcggtgcgactgccgctggtttcggttctggtgcgccatgacgggccgctgccgctttctgccgccgcgcttggcgccccgggcctccgcaccgcctagtctccggcggccgctgctaccgccgccatcctccggctcccacggcggctggcggctgagtgggaggcgcccgcccagactccgccggagccaccttccctcctcccccagccacccagccgttattaacggagaaagaggaaaaacgggtggcgcgcgaggggaggacgaagaatgggagggagggaggggtggcccgcgcttcccggcaaccgtcgcttccctccccctgcgagattaatttcacaggggattaatttctcatttacaaataaaaatgtaagtttagaacagaatgttttaacaaggtaaaagcattcactgcatactatatgccagcactatacttaggacatataggacatatacgactgtatatgtgagcgcttatctcacttctcttgtagaatggttattattaaacttatttgagaggtgaagtgattgacagccgttgaaggattacttgagaccatggaaactataacttgcagagtcagaatttgagttcaattctgacatcaaagctatgcttttcctactgtgtcaacctgcataataaaactacacttctgagacgaggcaagatgtttttgatgtttagtgatgtatattacattaacattgataatatgatctcattaggtagtattgagtaactctaatttcatgctttaaatgcctagggggaggactggaaagataatcaccaacttttttttttttttttttgagatggagttttgctcttgtcgcccaggccagagtgcagtcctgtgatcttggctcactgcagcctctgccttccgatttccagcctctgccttccgatttcaagtgattctcctgcctcaacctcctgagtagctggcatcacaggcgcctgccaccacgcccagctaacttttgtatttttagtagagatggggtttcactatgttggccaggctggtctcgaactcctgacctcatgatccgcccgccttggcctcccaaagtgctgggattacaggtgtgagccaccgcaccaattaccaaaatattaaaaatggttagctctaagaggtgcttgctttctcttttcaactctttattttttgacattttccccccagtgatttcacattagtttcccagaatgtatagtgttatttttaaaaaacctctgagacatgaacattctgttggaaatttttttctgttgttattttttctttgtctttgaacttttaaaaatagcttgcagtttggaaacaattggtcaattaaatcttctgcttggttaaaattgtaatgggtacaggtgctattattccattctgttccagtttttataatatattttatatattttatgaaggaataaattcaaggatctaaatgaagtgaattatgaaatgtttctataaatctttgtatttttctattatcaccatattttaattatatacttttatattgacttactattatttatattacagaattgggtatcacatatataatatttttctatatagaggcataatgtataattttgaagtgactgattc

SEQ ID NO: 1882872 - DNA, 4001 bp, Homo sapiens
caaatcctgaagtggcaggctgccagatgcctggaacctcttaacagtaaaagtgacatcagaaatatatagtaatgttcttaccaaaattaataaatgcttagatataagaacgactacttaaaacttctaagtcacaaaacaccgtgctaaaggtttttagcaacctcttctttacagaacataattacttctcttatgtgggggtagatttgtgaataggccaaaatttcataggaaggtgggacatggaccttccccctcctcattagaagtcatttcgtcaggacttatggtggccatatggtgttccaaatgctaacaggaaacaaatgagtcaacttatgcacatgaaaagcaaactatgaataacgaataaggaaggggggaaacagttcaataagttcagatacaacttgatactgtcacaggctgtcacagacctcagtatcttctttatggcctaaggaaactgagccaccaacaggaaaaaaggtcacctcacagagaatgctgtgagattcttaagttgctagactcctttccatcttcttctcctcaggtcgatactgccgtcaaattctacacaattcaacatccatcttcacataacaattagtgtgacccaaattcacccaagatgttaaaagaagggaagacaatctactaggattagccataactgtccacagttgcaggatggaaaagatatgacatgcaaatatgaaccaaacgagagcaggagagatcacaattatattaggcaaaataccttttaagtaaaaaattactatttgtagtaaaatataccttacgtcaaaactgtcagaagagacaaagaacattaaataataataaaaggtttctattcactgggaacctatgaaacatacagacgtacataggtaaacaaataaaaatcagggttccctcatatataaagcaaacactgacagaatttaagaaatagacagtaatataataatagcaggatacttcaatactctactttcagtaatgaataacaaagcaaaaccaaatataaacaagggaacaaaggacttgaaagcactataaaacaattacacctaatagacacatagaaagcattacactcaacaaaggtagaattcacaacctttttttttttttttttttttttttgagacagagtttcgctctggttgcccaggctggagtgcaatggtgtgatctcggctcactgcaacctccgcctcccaggttcaagcgattctcctgcctcagcctccggagcagctgggattacagacgcgcgccaccacccccggctaattttgtatttttagtagagacggggtttctccttgttggtcaggctggtctcgaactcccgacctcaggtgatccgcccgcctcggcctcccaaaatgctgagtttacaggcgtgagccaccgcgcccgtcccagtttattttttccacaggaaaaaggagggactgaggaccccacggaccacagctcctcccacccaggaacgcggcaccccgaggcgggattctccactgaagatccccaggaggtcaccgcacaacctgaggaaatgcatggttgcgggcgtggagctgccccaggagggctagagccaagccgaagtcaccgagcaggcacgggtagagatgggatgcccaggctcccggctgccgcccagccccaccctgcgccgaaggagactgagagccgagctgcgccggcggagactcaaatcctggtccctgcagcggaccgcgagaaggcccgggtccccccagagctcgttccaaccacaggtctaccccccaggacagtctttccgcacactcactggttcttgtcttctgtggtgtcccgacatcttcccaatggaccttccagtacctgcaggtcccagggccatggaggcaatggcggagtcacttggagcctcgcggagaaaaccggacagagcaatggacaccaaacacgcaacggacacacaacactgagctccgcgggtccggaaacaaacacccagccaggtggtggaaggccgccccttcctccgaggctggcacctgattggacagttccacacaagcgcctctgattggctagggatcctgaccccgccctgcagggccctgattgacagaagctgtgttcctgcctgggacaggcggcccgaaggacgtgtgtttggctggctcagccctttgcttcagggcttccttgcggtgctggcacgtggcccctccaggggaacatctgcatttaagcagaacttggttgtgcctttccagtgttccactgttggcctcctgcacttcctgagttctttctgacctttggatttttgaggcggcagcctgagctttcacaagagaggcagtgctttaaggcagccatttccaatagaaagaaaaaaaatgtgagccatgcgtgtcatttaaatttttctagtagctgcttaaaggaaaaggaaacaggctggacatggtggctcacgcctgtaatcctagcgtttgggaggccgaggcaggtggatcacctgaggtcaggagttcgagactagcctgaccaacatggcaaaacccggtctctactaaaaatacaaaaagtagcccagcgtggtggcaggcgcctgtaatcccagctactcgggaggctgaggcaggagaatcgcttgaacccgggaagtggaggttgcagtgagccaacatcccaccattgcactccagcctgggcaacaaagcgagaatccatctaaataaaaaaaaaaaaaccaaaaaggtgaaattgactgcaataactgattttactcaatagatccaaaatattattttgatttgtgatctacataaaattattattattattattcattttaaaaatagagacagagtctctctctatcgcccaggctgtagcgcagtgaggtgagcatagctcactgcaacctgggactcctgggttcaagtgaccctccctctccagcctctcgagtagctgggactacaggtgggcaccaccatgcccagctaatatttttatgtttgtagagacgtgtcaccgtcttgcccaggctggtgtccaactcctgcttcaagggaagctccggccttggcctcccaaagtgctgggattacaggcgtgagccactgaagggggcctttggtaggaaatcttagaaactcactctatattttaagcttccagcacatctcacttaagaccagccacattccaggtgccctacatggtcagcggctgccacattgaagtggagctctgggagcattggctcccctgacttcaggggaagtgaaggcctgaactctctccttttctgccacgggcaaaggaacacccccttcctaccagcatctcccctcaggctgataggtgggagaggtggtgccctgaaagagagcagggggctcacaagcagaaagtgtccacaggtaaacaactgttacccacctgctgcttgagggtggggtggggcatcctccttctagaaaccagacagtaaaaaaagaatgatgaggcctcaggaggatgaaaccccatgtcttcagatgtgtccacagccctgacctccagggtttagatgtggagggaatagattaaagacaaatttctttctttctttcttctccctcccctcccctcccctcccctccccttccctcccctccccccccttccctccccttctcttcccttccccttgttttttggaggcaggtctcaatctgtcacccaggctggagtgccctggcacaatcatggctcactgcagactcaaccttccaggttcaaacgatcctcccatctcagcctctcaagtagctgggaccacaggtgcataccaccgcataaataagtgatatagaaaatcagtacatgtaatgtgctgtttgtcagggaacttgtaatcaacctgttcttgaatcctggcatcccatctgtaatgagggtatgtattagttaactatccctac

SEQ ID NO: 1882873 - DNA, 4001 bp, Homo sapiens
cgagaaggtctggccgcacagcgggcagcggtagggctgctcctctgcagggtggtggatgaccaggcctcgctcgtcccccagaccctcctccccgtcccccgcaggggacccgcccccggaggacgccagctcggtcatgggcacttccagctgcaatcaccagtccctagggagacagaagcgggggcgggggtggggggtggagagagaggggtcggggaacacgagggttagccaacccccagcctggcagggacactcacctcccacaacctccacctttcgccccgttttgttcaagctcaagttcccctgctgggaattggtgttcctcttcctccactgccttttaagcacggcctacactccttccagtcccttcccaagggcaccttctcctagaagccttccctgacctttccaccccgggcttaaacaccgtgtgacacaaccatgtggctctcactgatcatactgcacgagggtcagtcatgccacctctgtcccccgactcccagcaccctaaggacagagctgccttctttcaaccccagcacctagcaccatgccagccagccacacaagacactagacagatggtgatgagtttcagttaggattttcagtttcagtttcagctaggattttcagttaccttcgtctagatatgtcttatccctccaaccagatctcaaggacagggggaggtagggaagtgcaccccaaacttggagaaaagggtggcattatcagtgatttaaagatatttttgtgaagcttaaaacaggaaaaaaaacacaaccctgtaaacttgaaagtgacctcggttaaacattaaaggcggcagctctttgtttatcaaaatgaggcatgtgttcaaaaggtttccaagtcactgaaccagggtgtgggctcccagggggactggtctcagcgtgattcctcttggtatcctcacagcaaagcctggcccaaggctgagcagcaccctcagtgcccagccaacacccccaaacccagctcccttcatgctgcttctccaaaggatcctcttcccaggacactgtgttcctcttaaattgtttcccattgtcctcacaacagccctgagaaaggggcggagcagggttattgagccccactttaaagatggggaaactgaggctcagtgaggtcaacatacttgccaaggtcacagagcaaggtgagcctggactaggccttaagtctcctgtctcactgttgaaagctcttttcaatgtactagctgctcaacaactaaacactcctcaaaacacacacacaccccccactgccaccatcccagccgtcacagagccatgcattccaaagggccacttctcctgtagatgcactgtctactgccaccactcccacgacccccaccaaaacttgggctcctgcagggccctaaggcctgcctcatccattctccccaaccccatcagggaagccggctgaatattccactggacctccccgaaggcctctcttcacttccagcctcagtcaacctatctgcagagtggggtctcagggccacctcctctgtcttccgtaccctcgaggccggggtggaactgaccctggggaaggagacaagtcctacttgcaagagaccccacccacaagtcttttccacaggcagctgcactgacatctgcaaagacagatcatcaaagtccccttggccaatctcagcccggccctgtgactgggcagcctcctcactctccccagctatacccctgactgaggccccgcctgcacgccgaaaggccccccgtctctcccccaagttctttcctcccatgccacactcacagcccagctgagcccctgctcctccggtctccggccgcagctctttgctctacagtctgcgctgctcaacgcaaatacggtaactctcccgcagcgacacccgcgccccttctccccgcccccataaagacggcaagcgtcccgcgacgttgctcttatcaaatagctgcattaatcgggagagctgaccccaccccacccgaccttacacacaaccttgccaacttctgcggccggagcaaccctggagaaatatggtaaactctgcgtcgcaaccccacccccacgaaaatacgtaggcctccaccctgctgccgcaacccaccccgcccgactgcaagccccagctcccagagggaatgaatgcagcccaccccccacggccgcagcgcccccccgcggagccacgcaaccctggataaatacgtaattaagtcccggcgctcccactcccggaaaggacctgcgcgggacccggcaaatacggtagcacgcccgcagtgacccgcccccgagggtccggctctggcctcggtaaatacggtaacctcccgccgcggccccagcgcggccccgcgcgcactcacatggcgccgcctcccgagccttccgtctccgctgcagcgccgcagtcgccggcgtcgtcgcagccgcacagcagccccgtgaggctgggaggtctaactctccggcagcccggctggcggaaaacggggctgccagcgctgcgcccgcccgggccggagcggcgaccatgcgggggccggttccggggcctgaacgtcccacggagcgggccctctcaagccccccgatccgccgacccagacattccccctttcgggattccctgaggcctgcattcggccgttatagcaccatccctattttcctaatcccaaggccaggcccacaaaccgcccccagcgacaggaaagagggtcggacggaggcgccggcctttccccgggtgacatgggctgagcgccggagcccggcggcggagcggccctgggcgagggtttcaggactggagacaatagtcaaaggggccgaatcgaggagctgccctcgctgacagtttcgccaaagtctgcctgactatatggcctgggttatatcactagagtgaccagagggaaaggaagaagacatcaggcccctgctgaccccacctcctcagaacggaacccgcagtcaagccagagatatcccataaaagagcaacttacgacgtctggagtagcagcgggcgtgagagggcagaaccaaattacagcttccagctgccatttaatgataatgtcccttactcggacataactttgccttttacaaagcccttttccatgttatgatctcgtgggaaccttccaataaccatgtgcaccctaccttgtgtgggttttatcccattttatagacgggaaaataaaattgaaacacagagtggcttcctccaacactcacagctctaagtagcagagcacagacgggaacacggcaccgtgacccagcaccgtggcccagcttgtgttccactgcaccgccctgggactgagaccctcagacataaatagtgtgtgacgacagggaagtaaaaacctgggccccagtgagaacgtgcctgagggtgtacatttgacagacaaaaaaacagaggcctgagaggaaaagttattttaaaagtcacaagtagtagaagaacattaaataggcttttttctctgtggcctctctgtagctgccaggtggagaaacgcgactctctctccaaggcccaggcagggatccttgcagcagacaatggatgtggtggttggggtggcgctgtgcctgatggagggcattgagagatgcgggcctcccgataccatgagggtcctctctgcagctctgcaggtgcccactgtgccttctggagcctgggaactgaagaattccaggtgggagaccccaggctgtaaaatcagccccttcctcccaacaccaggcctggaggtcaggcctgcctgctttcacagctcgcttggaggaccagtctgccccaccaggccccacccgtctggcttgtggcctctggagaatccactcctaccccaacccccaccccatcccttcactgctcctggagacacctcactgctggatgt

SEQ ID NO: 1882874 - DNA, 4001 bp, Homo sapiens
acaggtgtacatcaccatgcccagctaatttttgtaatttttgtggagacagggtttcatcatcttgcccaggctggtctcaaactcctgggctcaagcgatccacccacctcgccctcccaaagcgctgggattataggcgtgagccactgggctcgcctgttcagttttaattacaatgtttaatacaatggctcaaattcaaaatgcttgttgttgataggaactttaccgtctttcaatacatacctcttaaaacattatcataagttccctgagaatgaactgatttttattataataatcacaaatatactgattgtctatagttcttatgttattacttaagaaaaacctataccaccaccaccttttaaaaggatactgacaaagtcatcaaatcctagaagagtaccaacaatttccttatcactcttcatcacgatgtgaattcttgatcctatacatttgtccacaagctctgaggagggaaaaaatattattttaccattcattatttcaacaaatatttgagtgcctactggcactcttacttgcatatagtgaaagaaaaaccaggaaaaacattcattcaataactttaggtcttataatacaaatctcagttcaagcacagcatctggcacataatgagccttccaaaagagtctgtggcatgaaggaatgaaaacttttcaatcacggccacgaccactagttcaatcactcttcaccaactacaaaaatataagaggagataggtataattatattcaccggaaactctccggtcactgcttccctttcccaactctgtctatcctctgtgctctgacggtagcttgaacatctctttagctagcctagcattatgtggcatgatgtctacttgtccagtgttctctcctccactggcttgtgtgctatttgaaggcaatggctatggtttatcattgaaaaatgcccaggcacggtatctagtgtatagatactcagttactacttattgaatgaataaataacaaacagagctggtttccagattcctcatttaaggctcattccggaccagggtgttagtgtcactaaccaaccacatacataacatggtctatctaatctggggatcgtaaacgccaggctgagaagtaggcctactacctataacactgcagaggcgggctcacaacaaagtaggccgacgacgcgttcactaaatgtggaccttttccagtgaaggtctggtttgagaagtcaaagtccttgcctggaggagcccgaccacgttaaagagcaggtgcggcctgctgtcgcgaagacttggagctcagagtcgaaccgcatttggtcttatacatttccccacactcggccagggcctgcctcggaacagcccctcggcccccaatcctgaatgtcagctccctgttcctgctccccaaaggacggcgattacctaagggcagcagctgcgacgggttggtagtagcgttagccgccatggctacgccggaagtggcctgccttcattgatggtgggacgactttgaaaagcgcgcttccgctttttccgcagcccaaacaggctcgaccaatctgaggccgagcgcacgatctagtcagctgcgtgggtcgcgttcactggcttttttccccggcaagtgagatccggtgaaatatttcctgcccactggacattttaccatctcggcagatacccataatgcccttgaagttttggagagacgttgaagatattttgccttgtgaataaattgttcctgtaacgtttgagtcttcttcccccgtaaagttgcatttcctctcaagccagaatcttcaaaccagtataaatcaattcgtatttcctgccatcaattaactgttacaattttcgttacaactactcattaaggaatctattgtttctttttaaagtccagtggattgaaaatctgcaactagcattttttaaaatttttctttagtgaggatttaagatatgttttttaaactttttactactttaattcatcgttcttatctttttatgtctggtagtcttatttattataggcttttaaattcagtttcttcaacaattcttgtctcacaggcaaccaccagatgtcactctaaattattccagaagtgtaaaatcatgctttccacttctgtgttgaaaacagcaaagtatcggccctagtctgttttatatttgtatcctaggaacttaaacctgaacagtctaggtcaggcgcagtggtaacgactgtaatcccagcactttggaaggccgaggcgggcggatcacctgaggtcaggagttcgagaccagcctggccaacatgggtgaaaccccgtctctactaaaaatacaaaaattagctgggcgtggtggcgtgcgcctgtagtcccagctactcgggaggcagaggcaggagaactgcttgaacccgagaggcagcggttgcagtgagcctagatcatgcaactgcactccagcctgaacaacaagagcgaaactccatctcaaaaaaaaaaaaaaaaaaagctaaacaataaacatgagcggccacaaagaacgtcattcattcatacaacaaatggtcattaagcacccatcattccttcatagactgagttcctcaaggctgagaattatgggaagcagtagtttacgtgattaaatttcttcattttgaattaaatgactttggttcaaattccatggtcagttatttgacaatgggcaagttattttaactttttaagtctcaatatacccattggaaaaaatggggacaacagtatctactcataagattaatgtgaagattaattgagataatctatgaaaagtggtcagcataggacctggcacatagcccttttaaacatgagctgttattacttatccttgttttctaatacatgatgtctggctcagagtgaagctacataaagctagcattgctagctggttttgcattcatcttatttttataaccagacataagccactttaaggaagcaatttcttattttatacactgtgcacactacattttcaggcacactgtagggcgcctaatgaatattctttaaattgattctcactatttcattcacacccatcaacattctccttactcttcataagattttaaatacgaagtaatgccagatttgtttgtgacgcttctttctttctctttctctttttttctttttgtccaatcctcatttggttgaaaaccacctcttttcctggttttccttttctattcctattttattttccccataccatactgacagtatgggagaattcaaaacattgttgttatttgatagagtttttaaaaattagaaaaataggctgggcacagtggctcacgcctataatcccaacactttgggggccgaggtgggcggatcacgaggtcaagacatgaagaccatcctggccaacatggtgaaaccccatctctactaagaatacaaaaattagctaggtgtggtggcacacgcctgtagtcccaggtactcaggaggctgaggcaggagaatcgcttgaacctgggaggcagaggttgcagtgagccaatcgtgccactgcactccagcctggcgacggagtgagactccatctcaaaacaacaacaacaaaaaaaaaacagaataaacattagcaattttgaatgccactaataaagaataaagaaaatctctttagaatctgaaaaaaggaacgatatatagttcacttacatagtagagttaatggggatttcagggagtggtatttttattattttctctcctgaggcaagacacaaaaaggaagaacaggccaattccaaatggagagttgttatgaacttgaaaatatgtcatagctctatgtctcaaggatttttctccctttaagtcttaagtagaagacgtaaaatagaatttataatttatcataaaatacatgtaactaccaaaggctc

SEQ ID NO: 1882875 - DNA, 4001 bp, Homo sapiens
tcttttacccatttctagccagattacagcttacactccagggagtctcaaatcggtttagggcaatattcccccttgcatttcagacaaattcaggggactcttgggaagtctttacaccttcaaaaatcttaattagggcctaggactcagtattgtacccaaatttctctgatttgcaagagctatcgacactactctgttgttagtacaaattgccaaatgtagggctgggcgtggtggctcatgcctgtaatcccagcactttgcgagtccgaggcgggcggatcatgaggtcaggagatcaagaccatcctggccaaggtggtgaaaccctgtctctactaaaaatacaaaaaaattagctgggcgtggtggcgcgtgcctgtaattccagctacttgggaggctgaggcaggagaattgcttgaaccagggagtgggaggttgcagtgagctgaaatcacaccactgcactccagcctgggcgacagagccagactccgtctccaaaacaaaacaaagcaaagcaacaacaacaacaacaaattgccaaatgtgaggacgttatgtggtgctctgcgtaagtgcatgagtagatgtgtcgtcggacctttcctgaatctgtagtttctattttttgcatcacctgtggtatttcctgccctcaacagcatggagaagctgcttcttgactgagtgtgcctaagggctcctctacacatagcaattcacagtcctgccgcaagataggccatagatacagagcttttcttcccatgaaagtaggtggggccatattggctgcttttgactgtaaaagtatttgaatctgtagtgtagtggacaaccccaaaattacccttttataattcttgagatgtctgttttctgcgatgctttacactaatctactatgccatcccctttttacagaaatgttttaagttgctgtttatcataaaatatcttcaaatacatcatttatcagactcaatcactagcagacttagaacagtcttagaagcctttagctataaacaccattattttaaaaaatacgtgacaatttgaaccagttcgttgagcatcagggacttttaagtgaatagaaggtagtgtccacgtctcagagattttacagacagaatatacccactacagaataatctatttgtttagtgattctttgcaactgagcagcgacaaccaagattgagtctgacaaaaaaggttccattactatgtctcaactgatattccattgttgagaaactagtggcaattgtactttgagaagtttgatttcaatgtaaatcttcagaaatatagatgagcagatgcctcattcacattccatcagacatagaagataaaattattaatccggttggtgagggtaaaacttatatacaaaaatctgagatgatttttgttgctgcaccatatgctgatatggtataactttgataattgtcttttattctctaccttgcaaaattaagctttgtcgagagagatgaggaaatggctgttcatggcttcccaggaatgccagtttggacaaataacattaaattgtccttagagccttttatgtggattgaatcaaatacataatggaactccctatttaggtctttaattcttttaactttaaaattagactatatgaggatattggaggatggtgaaaattatatgccaaggctttagttcatgtgatattactgaactgtgatagaggttctactttaaaagggcagttctgcatgatatttagctcggagtctatgttcctacattttgcaagtgatagaatcacaaccaaattagttcagtgaaccccccaaaataagcaaataataaagtttatatttcaaatattccacttacaagtgcagggttcattttgttgtttccctagagaaaattcattttaaggtgctgtgtgtgtgacgtgtgtgtgtgtgtgcgtgtgtgtgtgtattctacaatttgtcttatttggtctgcctttgtctctattctccctctagcctggttgccttggttaccattacatgcatgcttgtatgtgaagtttctctttgacgtacatttatttctatggaaacaatgacatcattggtatgggtaggtgcttaggaaaagcaaaaagaagcagcactgagtattggtttttctttcgatgataaaatatatcatgaaataaatattttaaattagagaattatatttttgctttcatcttgacttgatcaagaagctagatttttgcttgtttatagacttgctcgagtaaaataatttaaaatgttaaatatactatttctctcctgatacattatttggtgtcataaaactcaccacagataggtataataataataattaactctaaaagtctctcaaatagtaaaaagcctatctcaataacatttgttaccatcaaaaaattgtgcaaggaattttatattcacatgaaagcaacagcaatgtatagatgatggatcaagggaaaaaaggccctatttgtagttattatttttaaaatctctagttttaaaaacacagggatataacaggaagctgatagttattaaaccatattttctatgacatcaaataagtccatgtgtaattggtattccgttttatcttaaatcttaagaggctttttacatcttttttttaaaaacgattttcctctcctttctacttccacactactccaatctattttttttctttatagatgatgtggaaacctgcctatgattttctgtatacctggagtgctcactatggaaataactacagagatgtgttacaagaccttcagtcagctttggacagaatgaaaaaccctgtgactaaacactggagagaattaactggagttttaatactagtaaattctttggaggttttgagagtaactgcattctccacttctgaggaagtatagaaacaaagcgtgtgtttttgatgggagggaaaatgaggtaatggtgtgtgtgtgtgtgtgtctgtgtgtgtctgtgtgtgtctctgtgtgtctgtgtgtgtgtgtctgtgtgtgtgtgtctgtgtgtgtgtgtgtgtgtgtgtaggaaagaaagaatctcagaaaagcattatattaattttcttcatgctcaaaaccagtttttttttcctgatgaaagcacagcctaactgataaccaagatgggttttatcctcaaatatgtatttttgtgtatgtttcaaatacaagtattaggctgctttgttcttagaaaggaaagaaaaaagaaaagtgccctctctctctttcagtgttattttaaatttactaagtcaaagctgtttgaataattacatcacacagatatctgggtaaactagagactatcaacatgatcaaggcagtgttcccaggaggcagctagaaagaggggaagcaagcacacaccctgtggccagtcacggctgcccgctttccacacctgacctcttcagttcatcagtggggttcaccagcatcacccccatttttcatggggagaaactcagaagtggagagaacgtctgaggctacatagccagtacaaagtaggttttctgcttgaaaaacctgtttctatttctttttaaaaaatcatactgcataacagaatagtaaaaacaaaatgcgtgttaagacttacagggaaacagttgccgtttcattttaagtgagacttgctactctttttcatcgtctcttgaaagactgacagaaggaaaatatgacttatcagaaatctgttgtctgcatgcatggacctagtgttttcatcagctcccttcagcatcttgggacctctctaatcctgcctaatttgggactttttctgcaggattgtaatgtaaaatagttctttagctcttggagatttttaataatacgagttattaaaaaccaccaccaccagaaacttgattaacttgattaccctgttgagtagagaggt

SEQ ID NO: 1882876 - DNA, 4001 bp, Homo sapiens
ttgattggggtcatgttgagaaaagacttgactgctttgcactaagaagtttggtcttcagactatagaggatgaaaattaggtacatgttttttggaactgtaggtttcaaatcctttccagctctctcatttactgaaagtgtcacttcagaaggcatttaatacttgtctacagtcttatttttaaaaatacaggaaataaaatttttttcacataactaaataagtcaatagttattcaaatataatggcaagtaagagccactgatttttttgaaggaaaaagtacaaatggctaaagcatgcaacgagacattaatgttgccagtgctctgctcaacaaaacgattgatgtgtgcatcctatgaactaccaaatctaggaatcattaacaaatgatagagcagaaactctacaaacactaaaaataaaataaaaaatttataagtatggaaaataagatagcaaattatttattttaacaatagataacatttattgtacactttttagaactctgtattttttagcttgctttaaaaggctaacttttaaacctgaaatcagatcattttgagactcagactctactttttgaggacatcattgcccaatgtctgttgtttaattcctctctaattgaaatttctaattgaggataaatatgcctttatacctatgtatgtgtatgtgtatacattatatatacatacatacatacatatacacatgtatcacacatacatacatatacatatgtatcacacatacatataacacgtgtatatacacacatactgtacatatacatgcatgtgttatacacacatactgtgtatacacacatgtattatacacatctatatatgtgtatatatgtgtatatatacatacacaaaaatatatgtgtatatatacatatgcatataacatgtgtgtgtatatatatatgtgtgttttaggatcaggtacagttgttcaactatattagttttaaaagaatgctcaatcaaaatagtttttttaatgagtgtttactttttctcatataacaagaaatcttaagatatgtagttactgacattgtttttagctgtttagtaaagccattaggaatgcaggctgtttctaacctctactccagtatcctgagcatggtgaatttttccttgtgcttgtcacttcacttcatggtcagaatatggctgctacatctcagatattatgtccatttccttctgggctaagtgtcaatggccagaacatagctgctagaagctgcaagggcagttaggaaagtggagaatgattgaatgactttccagaccactgtgatccatgtcctgaggctcagcaggtttctgcccaaaactaaatcagagctcttttaaaaggaaagaataatgggaggaatattgggtaggcaactagcagaatttgctgtaagaatactggattaataaaattgcctgacttgaaagatgcttatgataaattgtaaaggataataaagcatttgggaaataggaggaaagagaaatccttccaaaacaaaggggattgtatgtgaaattttgttataatttatgacaactcatttaattagtgaaggaaattttatattgattcttaaaagtttcgacagttcttctatgaaaaaaaagatacagtcattgaaatgaataaatagacttttttgttgttttctgaggtagataactttcaagaaatgtaattcagtatatctgtagtaaagaaaaaaaaaggtttaaactgataatatatttttagggataagaatcatcctgaactacaaaatgtgaatttatccacattacattaggtgagtgattctggcttaccttaataaggagactacatctgttgttctatagttggcattttcttaggatgccagaaaggatctcatcacttggtatgtcccacatattagattgaaaaaaaaggagaaggaagagggggtgcagttgccaaaggacctgtagccttagaatccggcagaaatgacagctgagagcagtcacaggcatgatgcttactcagtaggtgtgataaattagcaagggtaagcaagtattgctgactggaaaaaaagaagaagaagaaaaagagaatttcaggatttctaaactattagctattttagtgtggtgccagcaagtccaagacacatggaaacacagggcatttggagaagtaaataataggtaattgttgcaattgtgtaatggcagtttcaaatgacttttatttctgactgctctgcttctttggctgagaaaatggatttgaatttggaaaattatatgttcagccattccggatgtaatatttatgtacacccaacaaaaaatgtttttcttttatgtcatttgatttccactatcatattatattgggtggaaaaatagattaagagaccatttgctcaaatatgaaagaaacatcatctggagggtaagaattttgacagttaattcagttgaaaatgatatcttgcagttaaaaatggcatcttattgagactatacctgcagattaggaggcaactgaaatgatggattttgaaaactttagaaatgttacaatatgtaagtctattagctacagtttatgtcaaagctgtttgttttgcacctgtgcacacctacataatgctagtttgtgtgatcatggtagtgcaaatagattcatgaattctaattctgagactcagaaggatttgaaggaatataattttatgattattgcagatttcctgtttcttctatctttaattgtttgtcttggctcaatttccctagtatatttgattgaaataataagagtttcaggaattcttacttacatttttactggtattttgatttataattaattctttccagtatggaaataggaaaggttttaagataaatctttataagttaacaagtcatctttaaatatcaaataagtatttgatagatctacattattggctttttaactatatcccagtttattttttattagattataaggtcaaacagtcgcaaaattgtttgaattgaaaaaaggaaaaaaaaaccctacattctttcaaaccttgtctcttgctaaaaacatttgtagatatactacaaaataaagaaattccttttatttattgcataaaaggagtaaaatcattaatatttgtgtaggtttttcttctttaactttttataccatcctacttaactaaatctagagcaactttcaataacttaaaaatcttttcagacttctaagacattatgctaagtaaaataagccagtcacaaaagggcaaatattatatattctacttatatgaggtacctagagtagtcaaatttatagacagaaaagtggtttccaggatttggggtaggatggaatggggaggaatgaataaatgagtaaatagtctttttagccatgcaatgagatgtactataatatttcagtatgattcaagagtaacatatcttttaccatgatataggcttcattctaaatgaaggataaatttaggaatacatgcaaagcattgaacacagacttggcaggcaattattgtctcagtaaatgttatctctgttatcattgtggcagtaaatgtttgagaagatcaaaagaacactttgaaataatgcatctttttaatgggttcctgagtatattgatgacagaatcaaattacatgcttaaaatattttccaacatcccttaccaagaaactttttttatttttaggaggaattgttgataaagaccttcgtcactacctcaacttacgatttcaaaagggttctgtggaccatgagcttcagcaaatcattcgtgacaacctctacctccgcacggtgccatgtgagtacaatgggcagtattaatatttttatgttgagagataaatgtttagctatatattcattgattaaaagaaagtgaaattgcacttattttttatag

SEQ ID NO: 1882877 - DNA, 4001 bp, Homo sapiens
tagctcttcagtggaaatcagcagcctccctgcatccttttgcccctgtcctcccctctcttggatgcaaacctggcgaaaagaagggaacactgcttggggtcagcgagctgagttccagctccgaatgtaccattttcaccctcgggagtcttctcccctttctctgtgagcaaaggagtgttgggccagaccgtcttaaggattcttccccaggtacaagccggactctggcggctttcctgggcaagggagtgtctccgccttgtctctgccgcaggtccctggttaaattgtcaatttctctgcggaggctgctcactgcatccgctccctccacccctagccctgtagaccccttctctttcccctacttgggaaaagtgaagccccttatccttggatagcctttcaccagacaaccgcagccgtccgctaaattcccctactggcgggacgcgcgggcgggggcctgccccggggaatgcgaggctgcttcccttctgcgtaatcagggtacgcagcctccagttctctaactttctccttctctaagagggaatttcgagaactttaagacaaataagtgactatatagatgaagacatgaaacctctctacacagtgaactcccccacgctacaaggctcccagggatcccaggccttctcccgcaatgccccgccgggtcccccgccccaactccttctcacggcaggatcccgcgccaggacgctcgcagagcccgagatgtggcaccaggcgcgccacaagtccaggtcccgctatttctgctccatcggagcccaggtcggagggagtcagcgcgtcctcctcgcacaggagcctggcgcgcggctcggtcgcacagaggctgaagaaaggtccgcactgggctcgaggcccttcctgccggcctccccacgccgggcctaggctcccctccttcccggctcccgcctcctcccgtaggctgccaggcggacccagcctgcctctctctctgccttcactaccgggtcaagctgcggagggagggagggaggcagcggcgaagccctccgtggctccccacccggcgcgcgcgcccctcctcccctgcctcctcccgtctgccagtacagtagaactagtacacacacacacacacacacacacgcacacgcaccctgccactgcagctgccatggatatcagctaacaacacacacccaggcgcgcgcgcgcgttcccactcgcaccacgcaggagtggcccccggcatccctaccctccttccccacccccaccacacccgctcaccagctcggctactgctcgctccggctgccgccgccgccgccgccgacgccaccaccactgcttcctctgctgcggggccacagccttgagtgtcattcaagggacagcacaacctcatccaagctctcctacctctgcccagccgtccctctcatcctccccattcctcgtccacactccatccaaagaagagggaaagcaccgaatagaggggggcgaaggcaaagtctgctgttcttccccctgggcccccttgctcctccatcctcattctctcaccaccagcccccctaaccccaaggagcccaggaactgaggcgactcgccccactgccatgtccaaaagcttgaaaaagaaaagccactggactagcaaagtccatgagagtgtcattggcaggaacccggagggccagctgggctttgaactgaaggggggcgccgagaatggacagttcccctacctgggggaggtgaagcccggcaaggtggcctatgagagcggcagcaaattggtgtcggaggagctgctgctggaggtgaacgagacccccgtggcggggctcaccatcagggacgtgctggccgtgatcaaacactgcaaggaccccctccggctcaagtgtgtcaagcaaggtgagagcagcggcttgctcagtgttttgccgggcggtgggaccgctcggggcgcagggcaatgaaagggtggccgcgcatgttgaagggggtgtgttgcgcgatgatggggtgggggccagagagcacccgcagtgcaagtgagtttcgccggggattcgacttgggggctaaagggaggggaggggcaggttgtggtgtggcgtgcaactttgtttgctcagttagaccctcccctttggaaggtgctcggcctggtctgacctcctcagagctgctggggcaaattgaatgtgcgtcagtggcatcacccgaagcggatgaagagcttttggggaagggaggaaggaagaaaagaaagaaagaatgggaggaagggagggaaagaaggaaggagcaacttcagggtgcagcggcatcaccagcgggtctgggaagagaaggtggtggggtgagcggagaactgcgtccagcgtttctggggctgggctgggggcgcctgggtccccagctgtcccttagggatccgtgagccaccgctggcgaagaaaagaagggacaaattgctttgggcgctttgacgggtcttctgtaacttttccccttcttcactccgtgtccccctcccccgctcacggtcgtgtcatgtgggcatcgcgcgtcacgtgcgtactgactaacccctgcgctcacccctagccagcccgggggaggaggctccggaagaaggcgcggtgctaggagcgcagtctagtgctgggcgggggtcggaggagatgaatggttgtcggaggagatgaatggttgtccgcatggactttactcaggggttgccctcattgagtggaagtcctctgtggttgggctctcctctggctccgatttggggggcgtgttttgggggaggagctggatgaaaccctggccggttccagcccaggctccctcagctccaacctgacttaaatgaacctcaattggaggctgtgatgtggatttggggagattggaatcatccagaactccctgtctttgctcgaaagaaaattatggtgcagaaggagagaagagtgagataaaagtttgaatagaggacaactttaagtagaataaagtagtagcttttttcttttctgttttcttttttagctcactgcacaattcgtgtgcggtatgtatggatatttgcgtcacaggcatattagcataagggtttgttgttgtcgtcgatgtacactgtttgtcctgactcaaaggtggaattgagcatgtcattacctgcattttgccgcttaatcatgatcaactactaagaaatgcttttacggagatgtaccgcactgttaaattattctctaaaaaacttgttttaaaataaacaagataaaaagaagtactgggcaaggtttcttaaatgtaaattgccatacaagaaaatgttttccttgggtattcttgagtattaagaggtaataaattgagataggttattataagtcaacatagctccatactatttaacactgaagggatatgagtttggtaggaaggaaaatagagtaacttgatatttttgaagataagatacctaaggttcaaatacagagattcatgttaacatgttcgatgtcaaaataccaccttataggaatagacataaatggaaagatctttgggtacgaaaagtctactacacaactaatgaccatggttttgttggccaaatgcttgatatttgtcatggaacgtggctgcaaaagttaagcgttgttaaattggacttaatagagtcccacaaacggatgccctattatagtttgcaatgatcatcacatcttaaatgttgtgttcaattctgagcactccttgttgaggcggacgttggcaaactgtcacgctagcaaagagtaagttcaaaagagaaataaaggaagattattgtgtattatagatgtattctatgaaatgccgtggaaagacttaacgtggagaagtgaaagaatgaaagctatcattaaatagcgaaaagctatcaggtaagaaaaggaattctgactatcctg

SEQ ID NO: 1882878 - DNA, 4001 bp, Homo sapiens
acgttagcttcactattaacaagatttgtagccttgcaaaagttcatccttgtatacctcagtttccttacctgtaaaaggagataacagtacctattttatcaaaatgtcaggagaaattaagtattatgtgtaaagcctataaaacaacatcttgcatgtagttagaacctaataaatattagtatattccatgaatggtagcttgtcatttggttttacaatatgtatatattcggttctcatgatgagtttccatttagaactatgcctcataatgctaacactcaacttctctgggtgagattaggctttgctatcaagtcttgcctactcctgggcattgcctgcagctctggcttcagatcctggcactgcccctggctcactgaataagcttcaactagtgcagccaacttacggaggatctgttttctcaagtgaaaaaaagacacaaggttaaacaaatcatctttttttaagatctcttccagttctgactacatttgatccccctcatccccaagtagtaagttatacctaagagggaaagaggagggaattatcatttcgaactcctactcacctgtgccaggagagcactgctgtgactgatttccctgatttcatcctcaccacagtcctaacagattagtattgttaaagtccatttaacaactaagaaagctgaggctcaggaaggtcaagcagtttactcaagatcatattctcagtaagccgcagagtctggattgaaacctggtctttctgtttgggtcgactcaacatttttaaccgtattgtttgcctcctacatcgccttcatctcagacattaagaatcctacctattcaatgcttttcatcctccgctttaaagagataagtgggtgcacaactttttttttgcctgaaacatatcatctaaaagttaagcaaatgaaattcatttaccagttacaggaatctttttcttaaatcactgttaatgtctcacaggaaattagctcttcagtggaaatcagcagcctccctgcatccttttgcccctgtcctcccctctcttggatgcaaacctggcgaaaagaagggaacactgcttggggtcagcgagctgagttccagctccgaatgtaccattttcaccctcgggagtcttctcccctttctctgtgagcaaaggagtgttgggccagaccgtcttaaggattcttccccaggtacaagccggactctggcggctttcctgggcaagggagtgtctccgccttgtctctgccgcaggtccctggttaaattgtcaatttctctgcggaggctgctcactgcatccgctccctccacccctagccctgtagaccccttctctttcccctacttgggaaaagtgaagccccttatccttggatagcctttcaccagacaaccgcagccgtccgctaaattcccctactggcgggacgcgcgggcgggggcctgccccggggaatgcgaggctgcttcccttctgcgtaatcagggtacgcagcctccagttctctaactttctccttctctaagagggaatttcgagaactttaagacaaataagtgactatatagatgaagacatgaaacctctctacacagtgaactcccccacgctacaaggctcccagggatcccaggccttctcccgcaatgccccgccgggtcccccgccccaactccttctcacggcaggatcccgcgccaggacgctcgcagagcccgagatgtggcaccaggcgcgccacaagtccaggtcccgctatttctgctccatcggagcccaggtcggagggagtcagcgcgtcctcctcgcacaggagcctggcgcgcggctcggtcgcacagaggctgaagaaaggtccgcactgggctcgaggcccttcctgccggcctccccacgccgggcctaggctcccctccttcccggctcccgcctcctcccgtaggctgccaggcggacccagcctgcctctctctctgccttcactaccgggtcaagctgcggagggagggagggaggcagcggcgaagccctccgtggctccccacccggcgcgcgcgcccctcctcccctgcctcctcccgtctgccagtacagtagaactagtacacacacacacacacacacacacgcacacgcaccctgccactgcagctgccatggatatcagctaacaacacacacccaggcgcgcgcgcgcgttcccactcgcaccacgcaggagtggcccccggcatccctaccctccttccccacccccaccacacccgctcaccagctcggctactgctcgctccggctgccgccgccgccgccgccgacgccaccaccactgcttcctctgctgcggggccacagccttgagtgtcattcaagggacagcacaacctcatccaagctctcctacctctgcccagccgtccctctcatcctccccattcctcgtccacactccatccaaagaagagggaaagcaccgaatagaggggggcgaaggcaaagtctgctgttcttccccctgggcccccttgctcctccatcctcattctctcaccaccagcccccctaaccccaaggagcccaggaactgaggcgactcgccccactgccatgtccaaaagcttgaaaaagaaaagccactggactagcaaagtccatgagagtgtcattggcaggaacccggagggccagctgggctttgaactgaaggggggcgccgagaatggacagttcccctacctgggggaggtgaagcccggcaaggtggcctatgagagcggcagcaaattggtgtcggaggagctgctgctggaggtgaacgagacccccgtggcggggctcaccatcagggacgtgctggccgtgatcaaacactgcaaggaccccctccggctcaagtgtgtcaagcaaggtgagagcagcggcttgctcagtgttttgccgggcggtgggaccgctcggggcgcagggcaatgaaagggtggccgcgcatgttgaagggggtgtgttgcgcgatgatggggtgggggccagagagcacccgcagtgcaagtgagtttcgccggggattcgacttgggggctaaagggaggggaggggcaggttgtggtgtggcgtgcaactttgtttgctcagttagaccctcccctttggaaggtgctcggcctggtctgacctcctcagagctgctggggcaaattgaatgtgcgtcagtggcatcacccgaagcggatgaagagcttttggggaagggaggaaggaagaaaagaaagaaagaatgggaggaagggagggaaagaaggaaggagcaacttcagggtgcagcggcatcaccagcgggtctgggaagagaaggtggtggggtgagcggagaactgcgtccagcgtttctggggctgggctgggggcgcctgggtccccagctgtcccttagggatccgtgagccaccgctggcgaagaaaagaagggacaaattgctttgggcgctttgacgggtcttctgtaacttttccccttcttcactccgtgtccccctcccccgctcacggtcgtgtcatgtgggcatcgcgcgtcacgtgcgtactgactaacccctgcgctcacccctagccagcccgggggaggaggctccggaagaaggcgcggtgctaggagcgcagtctagtgctgggcgggggtcggaggagatgaatggttgtcggaggagatgaatggttgtccgcatggactttactcaggggttgccctcattgagtggaagtcctctgtggttgggctctcctctggctccgatttggggggcgtgttttgggggaggagctggatgaaaccctggccggttccagcccaggctccctcagctccaacctgacttaaatgaacctcaattggaggctgtgatgtggatttggggagattggaatcatccagaactccctgtctttgctcgaaagaaaattatggtgcagaa

SEQ ID NO: 1882879 - DNA, 4001 bp, Homo sapiens; identical to SEQ ID NO: 586676

SEQ ID NO: 1882880 - DNA, 4001 bp, Homo sapiens
aactgctactttttggcaaaatatagcagaaataatatttctatacccaataaagttttcagaaacaaattacaacattaatttaattatccaccctttagttcatatattatgagtatatgttaccaaggaaaatttatctattaggtaaaattcaaagtagagtttcctatttaattttaaatatttgaagttccatgacaactcatgtcacacgtgtgcagaagaatggcaacttttaaaagaatcgttgtgaatcttaaagtaaaatttaaatacaattttgttgtattgcttaatatgagctctagtccccttaaaataaaatagtcctaataaaaagaaatctctgcctttactcttgaatgtcattttatttaagccgaggaaacaatagatatacacacttatcaagtttaaagaacctagcctacgtttaaaataattatagctgtggaccctgcaagagctaagtagcttaccttttcacagaatcaacctctttataatgtgttacttgatattgaaaccttacatgaaatgttggcattaatataacttatcttcaggaaaactcaagtatattataaatgtaggataaatactatatcatacatagttgtaaatgattgttatatagaaattttataataaattttataatttttaccattcttcttgatatcattaggtaaaaaggcatcttttcaatattggattttatggatgtgaacactgaagtagctattataggaaatgctagggatttttttcccgttgttactacattttaaaaatttctctataacctagaacataaaattcaatattctatcttattccaaatattctaataaaatttaaaaatctttatgtaatgattaatacatatttagaaatccagagaaaattaaagttatatttaattctggaattcaccaagacgtcctttttagtccttcattttttccttccaaatattttccttatattctgttttctataagaaaactggacatcataatttttgctgatattaaatgttctgtgtcttcaattaaaaagacctttcttgctagctttgttttcattgcatgcctttggaatgacttcctccttttctaacctttcttaaatttttcttcccaggtttctggccccacagttctagaggctgactgactggggcaggttgtagagaaacttctggacaggttgttaacatctgacacagtgagtgagaaaaaatccagcacagtcactgggcaggtttaagaagaagtggcagcctcgggagatgaaaggtttgtgtgtgcttgttgctggttacctgcaacacactggttaaattcaaatccattcatttagtaattgcttagcttcctctaaaccaatgtaatgcaaaccaaaaggaccgttgtggatgttttgtactgatgtctgcagatcatgagtaattttagtctgtcttgtctgacattttccacaatgcttttagttgacagcattatattatgtaaatatttctggttaggtttattgaggtggttgcctaaatctcactttaaataaagcctttaatgctttcacccagaatccatagagaagctacatgagttggggaagtttagtgttgctctttgtactttaacttttaatatcagagcacatattgaaaccataaacacaatgaaaatacaaaaaaatattccgacgatattggaggactataactcccccacctctttttattcttaaagagccaagggcgtggggagtggcaggaagagatattctcaagatctaagtcctggacgccatcctgcgagtgcttaaagcccctagaaacgtgcaacctgaacaacaccccttttcgaagtctaaaacaatattagattcccaaaatatcggcaaagaaagtcttaccgtcagacttgcagcaggtttcagctcagacccagactgaaaagctgagcagctggtgaacaaaagatttagtttttttttttttttaaacgaagtctgcaaaactaatttccctcaaaatagagctcaatttccgttaaagaaagcagcgcttacaaatctcagaattcctgatcaacccccactccaccccacctctgagcaatagaaaacaattcgatctttcacacggatgttattgcgaagccactattctgcagtgtgacttaaaagaaaagaagatagtgaggcttaagcaaggggactggaagaggaggggaaaggttctgctttggggacacctctcaaagattaatcaatgctttttcctaattcaaaccagatgtctagcccagtttgctgtacccattaatcccactaacaacttcaaagacctggtcatcatcctctggacacctgagacaatgaaaaaacggggcgacactgctggtggcgcatttggggccccgggcagaataggtgactacagatattctcctgatgcgacaggtcgcagatgggacatgactgttcctcctgctcattacagcgccactcacttgtgtgtaaacgactctgcccccagcggaccctgtcgcccgccaagcaagtagcagcttcaaagccctgccctcgctctcgcatgcttactagaggcgagttttctattttattttcaggggtgcaaaattgtaaccaagtgcccacggtgagtgaattttgggagctatcgaaatgtaagaattctcagtaaatggaaccctggtggtaaggaatgcattagcggatttatttttgagcagaagagagtggatttctggaggaaaccgaggagatctgggctagctcctgaggggaaaggctagaaatgcgcgtgcaatctacacatctcatatgaccgggacacaatcgcttggaaatattcttgacccaggaaaagttcttcttggtggacaagtggctaggaaattgagcgggaccgggaaagagggggaagggagcctccacctggcatcgcacgtgaggatgccagggagcaggcatctgcaaccctttcagactcacgccttcctcccacccacccaaccaggtccgtcttctttctgcactgagaaccgccttttccaggccatggtgctcatccccgcaacctcagatctggcgtcccagcctattaacaacccaccgacagaaaccagctgcgaaaacctaggcgcgctgcggcgcccggggcacgggaagatgcaaagtttgaaaaacttcgagggtgcgccaaactagctctggtcttttcctttaaccctattacttctttcgtgttcctgaaaggataggcgtatccctagcttttctgcaggtgacagttcccaaatgacactgacaagtcacgtttccccgagaggaaagtgagtaggtaggaatcagggtgctaggttgggggtggtgtgcgccgcgcccaggcctccagagtctggagggcagagctgctgccctcccgggcgggacttagacgttggcgtgccgcttgtagtcctggcagccggcagtgctgggcgggcgtggacgctctacgtccgtccagcaggagataggaagtggaactgggagcgcgtggcgcaggctgagcgggagttttggagggagtttgcatgtggtcaactctgggctcctaagccagcccccagctcacgttacactctatttataacttctcagagccatttccccctgaaagcagttctctgggaccaccttcttttggcttcaacctctcccactcttgacatctgagtagctcagggaagctcttccaggtccgactgttcatatgtaaaggagactggccgctggggctcaggaccgggattatccgagctctgcagaagtgcaccgctattgctttgggaggttaaaaaaaaaatcacacggtttccagtgaaaaagtgacagagggtggtggcctttggaaccgccgtgaagtcttctgcctggaacccgaaacttgcatgctatggaacacccgctctttggctgcc

SEQ ID NO: 1882881 - DNA, 4001 bp, Homo sapiens
cgagataataaatgcagagctttctacatgaatttttgcacagatctgaggtcttatcatgaggcggaactgtgttagacttggaatgtgacaagaatgtgtgataagccactggctgagggagtactactgcatgagatatcctgcacagtccaggatagcatctgtccagaggaactgaaagggtgcaacttcgagcaagccagagccgactttgaatttatgtgtggctgtgtgttttctcagggctccaagtgttttataccttgggtcaaattctccccctgcggaggaagctcctttctggaagtaaatcaggcacatttagaagattcgttaactctttggctcctgggggattatggccagcattttctctcttagacttcccacagcgaattcctggttgggccaagctgatatctttgagctgacttctgtactcagggttcttccaaacaggaatatgctttctctgcctaagatctgggttccatgcccatctcaacctcaatccctccttcaaggaagtttttcctaactcctcggccagacatcaataatgtctgaagggaggatttctcccgagtgccagacttggaattcctgttgtcttcaggagctctccctggcgctccctccttcccccagggcctttaaactgtttctcctccagtctgcccacttgatccatgtgggtagacatgttccatggccttcagaataagatcttttgtggggtactcagtccataaacagaaaattgccttcatcttggatgctggtgtttctggcctggtgagaatgaaagtgtggaatttgtttgtaggactcaaagtttccattaacaataaatatgaaaaatatataatgcaaaggcttttgttattgttattattaaaataggaaagcctttacctttttggaagaaccgatttagattttgcagagtaattcagtctttaaaaggtagtggtagttaaaataggtaatctttgacttgtaaagagactaatttaaattttgttaagtaaccaattaaggccataaagagtttaaatccatctgtggcttctcattttctctagaacaaattcctaattccctacgatgaaattctcttgctatcctaattttttgccggctcaaaggactaaccgttttccccaaacacgcggccctgagcctccggtgctttgcgaaagccgtcccctccggctggaatgttctttgtctctctggtaaatgtctattcatcattcaagaccacccttcgcccctccccttaattacttcctcccctgtgcgccctcaaattcttgtactcattcaagcagtatttattaggggccagctttgtggccggcaccgtggcgggctctggggctacaaaaggtgaataatacttgggctctgcctctgagggccttacacgttagggaggagtgggtcaactgccacaaacgtcgctaggaaattaaaaggaaaattttacaaagtggcagttcttgtctgtcttcccctccagatggcccgtgtgttgttttcgggccggggctatttctcatttatttcgcacccccggttcttagtgccctgtaggtgctaaatcagcatttgtttcatgagtgctttttctgggggcaaccagacccctgcagaagtgtacctgtgttgtgccagaggttctgatgataggcttataggcggtagtttcctcagtgtccgtgggtcgcccccggtcccgggttggatgccccgcggtccagcaccgaacctttcggggtgcagagttgcagagccgcggagggcccgggccgtgcgcagccgaagggaggcctgcagcgccccctctggatgcagcgggcaccggccggccgccccgctcacccgctcgcaccccacgtttgttcaccagtatttcagtttacggtcagaaaatgaacacagacacttcgtgatactctacacttttcaaaggcgtaagggatgccttttaaaggattatggattagaaaaattcctccctctttcttgtgcctctgggcccttgcattgtgattctatcttacgtaaataaagggggctttgctctcctaattgtgcccactgttctgtgcagcgcggaccggcgcatgcagcgagcggggctgcgagggcgctgctgtggccaggcgtctggcatgctgaccacgtcgcgctgctgtaaaggaaacctgccccgcgcagcggcggtggctggagcgggagaaaccggactttgtgcaactttggccatagtggccatcccatgaatctgtttactagcttggtggtgggtccaacagagcttgttgctccctagccgcttgctcgtgcccttggtggttaccggtagttaagcttagggcgcatagggccctcgtggctcgccacctctcacggttcagtacccacgcttcgaacgagggatgggagcaggcgccacggccggcaccccagagccctgctgccccttagttcgagcggccatcctcctgtggggcttgtgggcagcctgtggggtttgtgggcggcctgtggggtttgtgggtggtctaaggaaagagttggggcactcaggggtctgctgtttttgcccgtggccttaactcatcaggggagggtttctgcagcagaatctcgggctcagggttggcggttaacgagggagcagcggggtcttggggagggggctcgacacccctgaaggtgccccctaaaggagccactgttagaggggcaccccatctttgtggccatggcggtggtagagcggctgggaggggctctgcggcgagcaagggagcaggcggtaggggttctgcggcgatgggcgggctaggggcggggcgcgggtgggctctaaaagtcggtgcccactcgctccgcgctgccgcggcaaccagcacaccccggcacctcctctgcggcagctgcgcctcgcaagcgcagtgccgcagcgcacgccggagtggctgtagctgcccggcgcggcgccgccctgcgcgggctgtgggctgcgggctgcgcccccgctgctggccagctctgcacggctgcgggctctgcggcgcccggtgctctgcaacgctgcggcgggcggcatgggataacgcggccatggtgcgccgagatcgcctccgcaggtgagtgtgcggtgggaacgagggggtgtggctggcggccctgggactagggcgcaggcgagcggaggactgtgtgcccgtgtccgagctggggctgcctctgggcgaaaactctaccgacaggcggcacgcattccgcgcccgctctgcctacttgaggagggggtgtcactcctgcccgcaatggaatgttcagaacgcgggacctccttgggttaggatttctagaccccgggatcgtcgtggtgagatttaggatttctggaccccagcgtcatcttgatatgacttaggatccataatgaccctggtctcaccctgatgcgaattgggatttttagatcctggcatcaccctggtgcgatttaggatttttatactcagtcattgctgcagcatgatttaggatttctaacccccagcatcgccctggtttgatttaggatatttagactccggcttccctctggtgcgattcaggattcttagactccgccgttgccgtggcgcgatttaggatttatagatcccggcaaagccctggtgcgatgtaggatttttagaaccccagcatcgctctggtgcgacttaaaggataggccccagcatcgccctggtgcgatgtaggatttttagaaccccggtgtctccgtggcgcaccttaggatttcaagaacgggataatcgcagtgccgagatcgccgcggtgcagcttaggatttcaagacccaggtatcacggtggcgggagtcaccgcagtgactagaactcgcagtgcccgtcagccgccttaagtatttttcagatttcagtaacaagcgcgagtgagaacgg

SEQ ID NO: 1882882 - DNA, 4001 bp, Homo sapiens
gtctacagaagtgtgaacttttatttggtaaaatttttttagtctagagagctatttgccatgcaaaatttaaaactagtatttaccaagaaacatcttcctaagattatgacaatgatggcaagctatcgcttgcagactttgaaaaacagtaagagaagacagacttctgttggaggtgtttggaccatgtttaccagaagcaaatgtatagttactagtgccaatagcccatatagattcaggaaaaattttaaagggtcagagagtaatacttgctagacactctcctctgttgggctgcagcccactgctgaagtcaaggcaatcattgagagttcagccccatcctggcatttgggccccaagaagacattcatgattatttcagtaactatattcaagacttccattgagcttttaacctctttagcaatagacaattcctgtttcctgtaagtatggtgtatttcccaaaccaaatccagggtatattggcttgcttaagggatagaacactgaatagagtttcagcaagtacaccacaaactgctagaacacttgatctctttcaatacaattgctgtcaatgtttttaaaattttggagacatagagtactttgtgcttatgaaggtttttcatgtatgcatctgacaaaagttttctgagctgcaagtatcagtctaataattgatttggctcataaaattgccttacatgttcttcctttatcaactatgcttttcaaacatggtatacaagaacacttttttttgagacacagtctccgtctgttgcccagactggagtgcagtggtacaatctcaactcactgcgatctctgcctcctgggttcaagtaattctcatgcctcagcctcccgagtagctgggattataggcatttgccaccacgcctggctttttgtattttttgtagagatggagtttcatcatgttggccaggctggccttgaactcctgacctcaggtgatcctcccaccttggcctcccaaagtgctgggattataggcatgagccactgtgcccaaaataataacctatatggaaattttgtaaattagcttgcatgttattaagctatccttatccacctcaactcatctctttaatttatttgtctccctgtagtttattccctctaccccgcattttaactttctggaaacgtgtggtaaaaagcaatgtgtaaaaggcaggcttccaatctgaaaagagatgagcgaaaacagtatatagcataatggactagatcagagtaactgcttaggatggaacagccaaccgttcttcagctgcttccagagttcatctgtagcccagttatctagagccttgctattcaaagatggtctgtgcaccagcagcactggcagcacctagggacttgggaaaaatgcagaatctcaggccccacccaaaccaacttaatttgaatctttttgttttgttttgctgcttgacaccacaaaggtttctttctgtctctcctcatgatgaattatgttggtggggatgaggagtgctggcttccgcatggtcacaggactatcaggaacccattcagaaacacacgacccatttagcagctcctctccttaactgtcaggtaacgtttgtcatgcaacagatctctagaactcttttcatcttccaaaactgaaattctatgcccattaaaccgtaactcctcattttccctccccacagcccctggccaccaccaccaccagaatctgcattttaacaagatcctgaggtggagatcatagcaacttatagtctgagaagcctgaaccagacagcaatttgctccttccaattctatgcttaggtctctaatatatcctttacctgagatttcagcaaaaactgtatctaattacctcacatggaagtagggcctaccctccttatctgcagcttgctgttagtaccatctaccacttggagccatcctagttaatttggatcagtgtgaggagagaggccatttctcttcctgtctcccatctctgaagaggaggagggagtaaaagctgaaaaacaacaggaatggagccagtggcaaaaccaaccgacgccactgaccaggcctgaggttaaagattaaccccccaactctaaccatgtgttgcctatagatcacttgctccgtctatcacaaccctttcacgcagaccctcttacagttgtaagcccttaaaaggaccaggaactttttcttcagggagcacggttcttgagacacaagtctgccgacgctcctggccgaataaagcctcttctttctataacctggtgtctgcggggttttgtctgcagctcgtcctgctacaagtacatcatagctgaaattgaaccttattaactggtatgttcaaattcaatccactaggcaagaggccattaaagatagggagaaatgaaaacaacacaccacggtatggaccttctcaagttatttttatcagtaaagaaaatggccaggcacagtgggtcacacccataatcctagtactttgggaggccgaggtgggtgaatcacttgagcccaggagttcaatacctgcctgggcaacacagtgagaccctgtctctactaaaaataaaaaaagaaaaagaaaatagagacagtctagatgtactgaaatttccaattatgtaatccactgacagaaaaaagtgtggatatgccagaagtagtaacagaagtctagaatttataaatactgatgtatttttggattgccacaggtcaagcaaattcttaaaagttatttaaagcatataaggttctaatttcagctttgttctaatagctaatctactttttacttcatagaattgtcttgattttgaaaccctggcattcggaaacatcctgacttctagtgtttcaatggttcattcaatacttgtattataattggaaacagacgctggctgcctatctttatttctattgtaaagtttccatatttgcttcaattaatttacatataattactgtacatgagagataatgttatgacaagaatagtttctgcaacattaagtatgggtcaaaaaaagaagaaatgggccaggcgcggtggctcatccctttgggaggctgaggcaggtgtatcacaaggtcaggagttcgagaccagcctgaccaatatggtgaaaacccatctctactaaaaaaaacacaaaacttagccaggcatggtggtgcacgcctgtaatcccagatactcaggaggctgaggcaggagaatcgcttgaacccgggaggtggaggttgcagtgagccgagatcacgccactgcattccagcctgggcaacagagcaagactccatctcccaaaaaacaaagaaatgactttagacaaatggcttgaatgaaattacaaagaggagtgcattaaaaaataccagcagtaaaatctcttgaagaattaaaatgacaggctaaaaataaataataaatgttctttttagaaaatactaagttgctgctggcactctatattcttcttctttgttttaatggatgacttgtatgtacatcttctggcttgtcctctggaggctttggcacagatgaaattacctaattaaaaaaaaaaaagaaccattaaaacttagtttctatagcacaggagtaaataagctattagaagaggtaagactacatccaatagttcaatccttgatgtcactttcgaggcagagttcgcctaagttcaaggtacagcctatgacctaggcacagagtggagtcttccatttgaatactgatgacagtaaaatttctaaagctatttaaaaagaaaaaaaatttggaggaagaaaagtgaacatatgctctactttaacattcctttatagatctaaagacacttgttatattacggattcagatagatatcctggttttgcattcttgaaacactgataacgtttgatagatttggggggatgaaaac

SEQ ID NO: 1882883 - DNA, 4001 bp, Homo sapiens
taaggggagttgctagtggaccaaggcccagaccacaatgcaggggagagggagaaaaggggtggaagagtgacaggaactgatatttttttagcagttactatgagaggaataaaactggacaggaaagaaagagaaaatacataaaacaaggacaggttgttcggcatctcttcaggagatgactgtctggtacatcctttaccaccattatcctcaatcaccaatcactaagcattgccatgtaccaggcccaggggctgggactatgggagctagttcttatagtggctcatgatctacttgggaaggcaagacctaaagaaatgacaagtaagccacaatggcatatgctttgtcgaatgagagggtaccaatcagcgagtgtgccggggacttagaggaaggggtcacaatgccctgggatggctgaggtccccacggagatgttgggccttgagccagaacttgagtgctggataacacttgagtggaaaggaggggcacagagactgtccagattggaatggacaaggcatagcagaaagtacggtggtacactcaaggcactgtgaacagcagtttattattattttttccttcatgctgtcttttggggtccttaggaaatgactctgttgtccttcacaagcccagctaggccctggaacaaatggcctttagagagttcaacagtatgaaactcctactacgagtaaatcaatgttaggtgttgtggggtatgtggaaaagtgaaaaaataatagtccctgccttaaaggacaagaaatgattttccctttatcaaatgtccagggaaggaaactgtgggatgacactgtggcagtgaagtctcacatctgataaaaggcagtgggctctgggcagcatggacaagtttaagaaacactggatttgccatctatcaagatgctccatttaggggtggtccaaaaggtctttcagtaactcagcagttctcttctcagaattagttcccagtctgtgccttccaatcttcccagtatattcctttaccagcacaaaaactcatgtacagccaatgaccagttcagaatagatgccaaagtaatcagactataccagtagctcaccccatgtctggtcaccaagtaagccatcacagactctgcaaataatcctggaaaggaagaggtaccaggacaagaaggaaagaactaaaacaaggatgtgaataacttctaaactggtcagccttggacaaaaggaaatctggaaatctcgacttggcctgagagaaacctcatcctggcccttaaagtgccaattaaggctgagttgaaaaggagctgggcatcatcaaactgcaaacaaacttagcttaggcacccacagtgtgatgatgtgtttatttccatgaaggagcagtctatggagaagtgcaggaactttcaaagttgcatgggcagagctgcttcttatatgacagaattggcagctgcctgtcacttcacagtgggtcacatgaatatgaagcagagaactggctgtgtgcgtcagcaggggagcttaagactgcagattctggggaatcagcactcactgtgacacatgtgatcctctgtctcctcagacaactgaaggatgatgagaaggggatctctggagccttgaccttctgggccccgaatttctagctagaaaacctcttttcaagacaaaaacataccaaagtacattttgaagtatttcgaagaatgaatcacatgccctaactttataatagaggaaggcacagatctcatttttgtgacaggtgaaacataatccttgccacaggttaactccagaagaaggaactgtacagctgaacagagcagattcttagaaactacaaactaaccaacaaacaaacaaataaggcaaagaacagctgcacatcatcttaagattccttatttaaaggttgtatctctaagccaggctattatataatcaagcaggaaaatactactaaaacttgatagttttgactggtggccttgtcttggatgttaagaaaaaatttgctgttgtttttcaaaataatagagatgggggtctcactatgttggccaggtcggtctcaaactcctgacctcaagcaatcctcccacctcccgaagtgctgcaatcataggtatgagactctgtgccccacctgttgttttttaaccaagcaatctgcaactcaactttcatgttaattcagaaaactccatttcctgacacatcaggccctgaagtgaaggagaagtgagcacaactctcactgcactaaaattcccaaggcaaggagtcaatggagctgaccaaatagcccatggtaaggtgttccaaaggaagacaccatatatagaatttgactattaagaaagggaagattcaacctcatataaagaactctttaaagaactgtacaacagctctccaagcaagtgaatgaggttttaacatactgttaagttgttaaaagaaatatttggatctaagagaatctgacaatgttatctgaatgaacaccaattttgatctatcctaagtgttaagatatatttttgaatgttaaagatattcgtgtactagggaaaaaagagtggtgagcagacggagagatggccaaggaaaaacagatcacctgactggcaggttatagctattgtgacactcttaataaagtcccttacttcctccacactgtacagaccaggctgagaaagacatgttgccaggctaccgtaagaacatttgacagcccaagtcatgtctcgaggtgaacttggagataaatcacctgtcctttcgatctctccaaaaggtctaaatatttccatggcctctccttcatccatttctaaaccaaaggcatttcagagcattcatgggttccccaagatattgcgatgaaataaccatgtctcaaccaggctcatgcctgtaatcccagcacttcaggaggctgaggtgggcagatcacaaggtcaggagtttgagatcagcctggccaacatggtgaaaacccgtctctactaaaaatacaaaaattagccgggcgtggtggcagcacctgtaatccccgctactcgggaggctgaggcaggagaatcgcttgaacccaggaggcggaggttgcagtgagccaagatcatgccattgcactccagcctgggcaacagagcaagactgtctcaaaaaaaaaaaaaaaaaagaaataaccatatctctagctcagcaatggttctgtcaaagcattatttgtaacactcaactagactaagcaatcaagaattttgggccacgttctcaactttttctcttgcctactgaatactgtttcttcctttcctaccttatttttttcattcaacaaatatttattcaatacttactacgtgcctgggtcagtactaggtgctgtgtctacaggagtgaacaagagggataaagtccctctcacaaagcatacattctaactggagagacaaacaatttcagatagagattagtgctagaaagagacaaatgatttcagatagagattagtgctagaaagaaacagggaagcaggccaggcgtggtggctcacgcctgtaataccaggactttgggaggtcgaggtgggcggatcacctgaggtcaggagttcaagaccagcctagtcaacatggtgaaaccccatctctactaaaaatacaaaatttagccaagaatggtggcgtgcacctgtagtcccagctacttgggagggtgaggcgggaaagtcgcttgaacccgggaggtggaggttgcaatgagctgagacagcgccattgcactccagcctgggcgacagagtgagactccatctcaaaaaaaaaaaaaaaagaagaagaaacagggaagcagatttcagtaagggggcaagatagaggggaggggaagaaaagccctactttagatagtctgggaagagctccaggaggaggcgacaactagtggag

SEQ ID NO: 1882884 - DNA, 4001 bp, Homo sapiens
ctgtacaatagcttcacacaatccgacatttctaatcttctcattcttttctattttttttttttttttggagacggagtctcgctctgtcgcccaggctggagtgcagtggtgcgatctccgctcactgcaagctccgcctcccgggttcacgccattctcctgcctcagcctcccgagtagctgggactacaggcgcccgccaccacgcccggctaatttttttgtatttttagtattgacggggtttcattgtgttagccaggatggtctcgatctcctgacctcgtgatccgcccgcctcagcctcccaaagtgctgggattacaggcttgagccaccgagcccggcctcttcttcttttctacctcatttggatgataaaataaaatcttattttcctcctgaaacatgaggaaacagaagcacatcatgaatagaaacatttcatcttagctattgaaaacgctaagttcagtgtcgacctcttgtgtcgcacatgctaatgacaaaaccaaagaaaaaccggttttagaaaaacaggaattgtaatcctagcactttgagaggccgaggtgagaggatcacctgagctcaggagttcaagaccagcctgggcaacaccgtgagacctcgtctctatttaaaataataacaggaattatctcatcattgtgcaaatactgcccaacagtcagaaggcaatttcgatagtcaataagtcacatctgaagtagcaccaggtaatttttatgaaaactcaagtctccatatttctttcctagagctaatctgtaatacaccaatgcttgtaagaaataaaggtttgcacatctgcagacacatagctccctgaaaattaaatccagccagttcccaagcatttgaactgacgagttttttttttttttctttttctggagatggggtctctgtcacccaggctgtagtgcagtggcccaattacagctcacctgcagcctcaatcacaagcgatcctctggcctcagcctcctgagtagctggaaatacaggtgcgtgccaccacacctggctcatttttcgattttttttttttttttttttttttttttggtagagtcgggggtcttgctttgttgcccaggctggtctggaactcctggctccaagtaatcctcccatctcggcctcctaaagtgctgggattacaggcgtgagttacagcgcccagcctggacagtctttaaaagaactctgacttgctggtaacgaaacacagctccggacatcctttgagaaagtcgccgtccccacctcagaaaacacacacacacacacacgtgtcccggaacttacacacacacacacgtgtcccgtaactaacttacacacacacacacacacgtgtcccggaactaattttcctcatttgggtgaaaacttttacagggtcctccaggcttgcatcatttgaaggctagcgtctgccactctgcttccacgcttctagttggggactacccacttaacaaagccaagttcaattttaatttcccagaactgacgcaacgcaaagcgcaaagagactgaacctggggtgtggagtgatacagacctgacggggctttattccatagacagacatcgacccaggacctgaagcggtccctgcctgctgtcaggtccccgccgcagcccccggcccgggctcagcacctggcacaacgcaggctaggtcagtgccgctcgaggtgggcagaaccacagggccgccgcccctggggggcaccgacgccgcccgctcacgcgccgccccctccgcatacctctccttcccgcggccagaagcgcgggttgtagatgaagaaactcagcagcgccggcaggaactgcttctcctgggccgccgagggcccgctcccagccccggccgccgctgcagccatcccggccgggtccccacctcgggagcctcccacagccagcccagagaaagcagccacctgctagaacaccgcacttccgcctccctcgccaccaccccggaagcgctcgccgccgaccaggaagaagaacccgcctcgcagcgtcctcttctggcaccccagggtggccttgttgtctgtttcccggccgagtttgtgttttgctggctcgcggagttttctcctggctacgggcgagggttgcgcgtttcaggaaaaactgagtggggcactgtttgtttgtttgtttgttttttgataggatctcagtttgtcatccagtctggagtgtagcggcgggatctcagctcactgcagcctcaacctctgggactcaagccatccccctgcctcagcctcccaagtagctaggattacagggcgcgccatcaaggccagttttattttttgtagaggtggggtctgtgttgcccaggctgctctcgaactcctggcttcacatggtctcccatttcgacctcccaaagtgctccgattataggcgtgagacaccaccgcccaacctgttgttgttttggtggtattgtttttaatttaatttagagacaggatctcgctttgtcacccgggttggagtgcagtggtgccatcatagctcactgcagcctcaactcccaggctcaagcgatcttcccacctcagcctgagtagctgagaccacatgcatgcaccaccatgcccagataattaaaatatatatatatatatatatatatatagagagagagagagagagagagagagagagagagttagagagtagagacagggtctcactttgttgccccagctggtctcgaactcttggcatcaagggatcctcctgcctctgttactggatggaaggtcttgaccgtggattgcccaggttcttggcgtgttgaacaaagaattgaacaaaatgcacaaagtagcaaaagaacaaagcaacgaaaagaaacaaaagaaaaaaccggagtaaggaagagacagatttattgaagcgaaagtacaattcacacagcaggagcgggatagagcaaacggttcgatagcacccgtcaggatttttattaagctggaagaattaggtaacgcccctaggtgcccgttagatgcctccgattggttacaccctctgaaggattggcctgtgaccaatcagaggctgaagtggagacttgcgcaccaccacccaccccccgccgtcaatcagaagctgtcaccctccccccgcccccctctccgcctgattgacggaatgaacacgtggcctccatgctgcctaatcttgcctagaactggctgcacctgctgttcttttgtttctgccttaacccttggttaccctcatgccctattctgcctcacctggcctcccaaagtgctgggattacggatgtgagccacccacacctggcccattgttttgtttttagtttatttaaaaagtattttattctaagacagcactttgctctgttgtccaggctggagtgcagcggccagatcatagctcactgcagcctggaactcctgggctcaagtgatcctcccacctcagcctcccgaatagctgggaccacaggtgcatgccaccatggctggctaatttttaaatttttcgtagagctggggtctcactatgttaacccaggctggtctcgaactcctgggctcaagtgatccactggccttgggctctccaagtgctgggattataggcataagcccctgtgccatggcagtttttttgtagaaggaaatgtaaagacacaaaggaagcctcatttagaaagaaacaaggctgggcacggtggctcatgcctgtaatcccagcactttgggaggccaaggtgggtgaatcacttgaggcctggagttccagaccagccccgtctctactaaaatacaaaaaactagccaggcgtggtggcacatgcctgtggttccagctacttgggaggcttgaggcaggagaattacttgaacccagtaggtggaggttgcagtgagccaagattgcaccactac

SEQ ID NO: 1882885 - DNA, 4001 bp, Homo sapiens
aagtccaaggctgcctgcttccacctaagtggtctctgttctacactttaatgtcaccctctacatcatcttacctagcccacccaaccttataaacatgataattgactactttcctgagctaaattaacttgtttttcacatacgcaaaaaagaagggatagtaagcagatttttattagaaagaagtccaagccttgatcctgtgggcactgtgaattaccaggagggagagtttctcaatgaccgtttactacatattttggagaggcagctaggaagtggtctaaaggttgggattgctgtatgtgatcacttgtgctgattttcatcacccgctaaccagagctttagagtgggagttgggaactaagtaatgacctgtctgctagaaaaggggaaaaaccaagagaccctgcatttcatactggcgccatatccccagagcctgacttgcacacaggcagtataagaccaaataagggagtcggggggctcaaaaagtggagccccatcttaagtatctccaaacagcagggaccgcttagtccttgccgcatccccagtgtctatactgggggcctggcagggagatgcactttactcaggtaatttactgagtggatgaaatagcataaaaacgaacaggaatctaaaaaacgcacaaaaccctgttttaatggaagtcaggcccaggctagaagatgacaatctacaaacacttttattagcaaaaggagtaagtgcagcatgggagaaagaggggctcctccttcccctcaaaggcatcactgccccttcccaaggggcaggccagcagggaacaagaggaccccagggttgcaagcaggctggaatcagacaaaagtgatccgtgtccgggaagcattgacctgccagacattgagctcctcatattcatccagagccgcctggaactgggcgggtgtgaagccacgagatacacagcgctgctctgcctcagagaaccggacacttcggccccctgagaccagttcacggacggtggcaaatatcacatctgctggtctctgagtcctgaaggaaatgagtgggtgtgtaaggtcaggatacaaacaggaatgctcgacatcaacagagaacaatggtggccagtgttagaattgaggccaacctcagacacatggccacagaagacaaagtgacacagctttgtccttcactaaaccactcacctagctgtctgccccttgtctcctagaagagagtcctttgacatctccattagcctgatggcttcattcacatcttctttctccaccacatccaccattctcagacgtgcctaaggggaaggtaggggggaaagatgggaacgggaggagggcagtggaacgaggtcaggggacacccttgttctggctttaaggctgggcagcccatgggtcgcctactcacaaaacaggagtggaatcccccctccccccagcatccgcagtgttgggccggcactgtcagaccgagacaagtgcaatgcccagggcagcgtccagcaattgcccaagtctccgcctctcaacactggccagtcccggagttcagctgtcctgtgagggagaccagacccttttgaacgccactgggctccccagcatgacagatggagcttggggagctcagccaagaagacaattggcagagagaacgtgtcccgggggctcgggaagtgctagctcagcagtaggttgggtaatcacactacctgcacgaacagcactttggagcccccaggactgaggtccaagacgggaggacagaaaggaaggtctgtagcacaggatctaggacacatggagtgaaacagaccccaaccaccctctcagtgaaggttaagaagtggggaaaaggcctttccctccacggacgctgtgcgtgccctgctggagcagcaagtacccacagtgcggtagcacggagaggaccactatctgcactgtcagcactttagccccggcagggctggagcgggaggtggggaggcggcaatgagagcacggtaaggagctacccctttaagggtcaaaacagatggccctccagcaatttgggcacttaccagagcagtggaaaggcgcaggatagccagcagggtccgggcagaagtataggtggcatccttactagcccaagcctctcgcctcatctccacgtatgctgctgtgatgtagtcagccagagactctggcaccatgggctgcttctcgcggcacatggctatgtaacgcctgtgggggaaggttcatggggaagcagaagagggagatggggaagggagtgaatatgagcccatgttgttttctgtaccagggctccccatttaacatggtcccctccaagaattttaagtggaaaacacaaattagtgggtgattatttgcttggcttgaatatcactgatggatttcaccaaacgtatagcccccaccagtatcctccaagttatttcctatttttttcgggaaaatggcctttgtaagacaaatccgtctgtcattaagagaggatccagacccctcctctgagcgcatgacatggcaaaacatatattttatttaaagagaactgtttacagaatatttaaaagggagtaaaaaccggaaagaacactggaggctcatgggaaaatagcgatagagattatcatccagaatgcctgggagcaggtgttttaaactttaaattttggagtatttgcatatgcatgagatagcttggggatgggactccagtctaaacatgaaattcacctgtatttcatatacaactgatacacataacctgaaggtaattttattaaaaatatttttgtgggccaggagcagtggttcatgcctgtaatcccagcactttgggaggcagaggtgggcatcctggccaacatggtgaaactgctctctactaaaatacaaaaaattaaccaggcgtggtggcgtgcgcctgtaatcccagctactcaggaggctgaggcaggagaatcgcttgaatctgggaggcagaggttgcagagagctgagatcactacactccagcctgggtgacagagcaagacttcgtctcaaaaaaaataaatagtgtaggaaacaaaatttcctgtgtccctatgatatgaagtgtggaattttccacttaaaagctgatctgaggctctggacatgtctgtagcgggaagtggtggtgtgaaaaacacacaccctaagactaataagcactttttcaggaggctcgcacggcccacgccaacgtttgcccacccgcacccagctctcctacctcatgagcttcatgtccagaggttcaaactgggaggggggctgccggctgtgctggtgcacataggtgatgtgctgggccaacctggacagagggaaggttagaaggaacaccctttttagggctacgcacccatgtcctcttaggtgtccctcctttggctctgccacttcctcacagtgtaggagggacaagctttcccgggaaatcctcatcagcatttcagccccaacccaccatttccctgagaaccatggaccagcccctgctgcaaaggggaggctctggggtttccaggagcgtggaatttgttttctgattcacctctcctcctccctacacagatcattacaggggacctctctttgggtgttgagcttcattcaccgtaggtcattgtctcggtcgggccggtcctgaatcagccagaggaggtcaaaccgggagagcagtgcagcaggtagctgtatgttctgctccaggctgcggcgagggttgtagcgcccgtaggcagggttggcggcagccaggatggagcagcgggcattgagtgtggtgagaatgccggccttggcaatggagatggtctgctgctccatgacctcgtggatggctgtgcggtcggcctcagccatcttgtcgaactcatcaatgcagcacacaccctggtcagccagcaccagggcccc

SEQ ID NO: 1882886 - DNA, 4001 bp, Homo sapiens
gctcaataacatttaatcattcttccaccgaccaaagtctggcattcaaagcactctaccacaaggacttactcagctcctggttcacagtcttccttctaatgaccaaatctattgtgcattttttcagtgaccattacaggactgctctgctgcatttgacaccactcgccactccatccttattcaattttgactctgtgagctaacttcctacatttcagaaaccccttcttctctgttagctcctttttgtttggttgcttttttttttctttttttttaagagatgggggtctcactctgctgttcagaccagtcttgaactccagggctcaagcaattctcctgccttggtctcccaagtagctgagattacaggcatgcaccaccatgcatggccttagcaattttttaaaatcagcacttaaatctaaatttatgtcactttctgaaaagatttatcagccaggtgcagtggctcacacctgtaatccccgcactttgggaggccgaggcaggaggactgcttgagcccaggagttcaagaccaacctaggcaacgcagtgagatgccatctcttaaaaaaattaaaaaattagccaggcatggtggcatgtgcctgtagtcctggctactcatgagaatgaggtgctgaggtgagaggatcacttgagccctggggatcaagacttcagtgagccgtgatggcaccactgtacttcaacttcagcctgggtgacagagaaagtccctctcaaaaacaaacaaacaaacaaacaatcaaacaaaatacaccctctactcttcctaggccactctccagggttctgacttctcattctaactctcttcttgggggacctcatctactttcataacttttactgctatgtgtaagctgattaactcacagatctgtgccttccactcagaagtgtcatactcttactatcaactgccagtgaacacttccacctgaatcctcacaagcaatctaagaaccagatagcttagcccactttcctaatatagctctttttcaccattcaaatagaaaatttggaagtcattcttgattcctctctatctccttcaccctgacaacaagagcaactattgttttatatctactatgtggtaaggcactttactggatgttttccatatattgtttcacatccctatgggctaaatattactgtcccaaatttttatttttaataaatggagtcttgctctcttgcccaggctagagtacagcggcacaatcatggcttactgtagcctctaactcttggactcaagcaatcctcctgcctcagcctcctgagtagttgggactacagatgcatgccaccacacctagttaatttttaaaattcttttagagattatgtctcactatgttgcccacgctacactcaaactcctgacctcaagtgatcctcctgcctcagcctcccaagtagctgggactataggcacaagccatggcacccagcttactgtcccaattaagatgagaaaactaaggttctcaggggtatgtaaaacatccaagatcctaaaatggaaaagtgacagagctgggatttgaacccacacttatccaactcaaaaagctattctctttccaccatatacattatctatgttgatcataagtccctgttaagtctacctcttcaaaatatctcaaatgtctccattttcaccatacctattgcttgtacactagtgcaagcccttatcaccagttttgccccttctaatattcatattgcagacctagctccccaaaaagccaatgggccctccatacattcacaataaggtcagtatttcttagcatagtacataaagttcttcatgatctaactcctgcttagttttataacttcatctcttggcactcctgctccatgcccactctcaccatcacctacagtgaactcctgtcttctctaatgttctgtgtctccgagcatttgaataatatagctggaatccaacacattctcccaccccaaacctccatctcccttggtctgacaaaagtctattcatcttacagattttagtctttaatccttcttaccaatgaaactgctttgtaaaataatttttttaataactcaaaatttcttggtattgtaactacacattatggtgaaacagactgaggatggccgttcttttatttttcttccacattaccagaggtaaaacattccaaggctgcttggagcagccaagccatctttcttattccttttttgttctgcttttttttttttttttttttccaaatatagaaactgggccaaggtaatggagggggacagtttgttggtaggtagtaagacatctgaattgctaactattcaacaagatctagcttgttggacatttcttgctcattttcttttagtaccagtagttttttgccttagtagagtagtaaaatttgagacgacttgaatttaagctaacacgtagaaaggaaagtcaggtttagctggtaaaggaaaaaggcatattccatatagaataacctagttctctggattgtgaggcaggggcctatgcctaagccaacaaattctaacttgaattttggtatacctagctccctaagggatctcaagaattggttgaattagaatttaagtatttctggtcttactagtaagacaccatctcactccatcataatattagtcataaattatttccaacaaaagctgctcaagaaagaggccatctgtgtggtttttatgtcatttgtcctttggctaccaaggttcctgacacactgaaagtacttaatgaatgtttcttaaataaagcgaatgataatctaaaatctatacaaacatagaagctttcttacgaaactcggccagcagtatatcacagggctgctaaatgacagctagtttacaatacacatgcacatgggtgacaagacagtaagaaaccaaatcaagtggatatctgctacacttcctccctgactcactgatatggcagtcagatcatttagaagcagatcccagagcataactctcaaccttggttctgaaactatgtactactctctcaggtatcagatttctcctatgacatttgctatctacattcagcaaggtgttttttttttgaaaagagtattataaaaatattaactctaaaaaattataggcccagcatggtggctcatgactgtaattgcagcactttgggaggccgaggtaggtggatcacaaggtcaggagtttgagaccaactagtcctagcctggccaatatggtgaaatcttgtctctactaaaaatacaaaaaaattagccgggtgtggtggcgggcacctgtagtcccagctacttggtaggctgaggcaagagaatcacttggatccgggaggcggaggttgcagtgagtggagatctcaccactgcactccagcctgggcgacagagcaagactccgtctcaaaaaaaaaaaaaaaaaaattataactaaacttgccatttagggaataggctaagatttctccctttctacctattttgatgaaaataaatagtttagtattacaaacacatacactttaagtttctttttcttctgattttaagaacaaagcatgctcaccatagaaaactatgaatgaggaaatgaaatcatccagaaagtaattacccatagattaccactattatcattttgatgtgatgatctaagttctgttttaatctttgttcaatgtattttgatgctgatacaactttactatataaaaattctgtattatcctcttttacttatttagtaatataagtacttctaagttattaatattacaaattattttaatagttgtgcaatatttcatcatataccataatttacaaagccattactgtactgttagatatttatttccaaatacttattataagtaacataaagtaatgagcaacttgaactaaaat

SEQ ID NO: 1882887 - DNA, 4001 bp, Homo sapiens
gcttaacacctagaatattagaaaaatagagaattggataaaggatataaaaatgcaatttgcagaaggaaaaatccaaatgggtaaaaagtatgtgaaaagatgctcaaactgactagtaatccaggagataagaattgaaacaattaaatgtcactctcagacatcagaatgatgaaaattcaaaaggtggttcataccaaatggggatgtaaggagatgggaactctgatttgtttctattaagtaaaacaatctgaaattaaagaggcatacatcacatctggaccccaggatccaactcctggacacgtatcccagatataactctcacaaaggtccccaagggtcacaaataaggatgttagctgcagaattctctgtggtagcagggagctgagtgtctatcaactggggaagatataaacaaaatggaataaatgcagacaatgaaatattatgcaaatgtgggaagtttatacaacatagatatatctgaaaacataatactgagtgaaaaaataagcattcttactttctatatagtctatattacagagatttatcatttatgtaaattaaaacaaacacacacaaaaataatatataattttgtaaagacattcattttagttctagcatattaggtggttctctgaggagggaaggaaatgggtgtagggaatggggggtgaagaggaacaataacaaaataagaggagggtcttgcatggccttagggtgacaataagctatgaactgagcagtatgcataactcaactccatatctgagggccaattaattctttaaacattgttgagttcttgtacagattaaaccagatctataagtcaaacttctggcaatgtaggaggtgctcaacacctatttgctccccctgtggctctcagaaaatgtaaaagggatggggttttcttttgcttctctaataattttataagtgaaaatatgagtctcaagagaatgaggtaagaagagtagcactcagatatgagtgtagaaggctagttctccaccctgggtgcatatcacagtcacccaggggattcacagaaaattcagataatcaggcccaatccactcgttccctcccccagtgacaatgtgtatcatcatctctaagggcaggaggaataggggccagggccagggtccacagtacattttgaaaagcattagccttgtgctggagggtctgtctgtccgctgtgctctcagccactcatgttctttggattgttgcttttgaaactttcaagggcttttgctaaataaagcgtcaccaaactgctcaaaaagaaatacatttcaaaatatatgattagtgtatacagtatggtaccccatctgctcttccaaaatacttgagttttagaaaataatgtgtagacaggtctataaattgctacctcccacaaaacaaagtagactcactttaaggggtaaggaaaaatattttttttcttttggtttacccatagcaagagagttaatctataagagcaagcaagcatgccttcattcattcattcattcattcagtcagtcagtcagtcagttggcacttgggctaaaataaagtactttattctagggatggttcagctaacttataggaatttagcatccataataaatagaacttgcacaaacgtagcaacttttcttctcacagctcaatattcaagcaagtaaatatgcaccttgggttgcaagatcctagaaggcagagaatgtaactctgttgaatgtcactatgtgctccatgttatccagcatttggttaatagtgactaggataatcgttcatgtctattacatttcccacagcatatagcatcgtgtgagtctcagccttttctaacactgctcagatgctggctgaagactttgggacttcaggctatccctgacaaattcctgaaccaatctctctggcaagtgattgaggctcagaatggctcaggagaagtagcatagtaaactaggaagaatgtgggctttggggtcacagaactctggatttgaaacctggttctctcacttatgggctaagtctcttcatctgtaaaatgggataatggcatcaaccttgctgggttgctatgataattagataatgtacactcagtgcctagaacagagtaggcctggcaactgtggaagggaggctgctgccaatcaaagtgtgttgctgcacactcagtatcaagtatcctaaaagaagctctgattccccattgctcatgaaactctagtttgtatttccaagctctgtgatcgatgctgggctcacggggaagagtttctgcaatccaaagctcccatcagaatgggagcccttcctgaaccctattgctaatgtgactgcaaataaaacaacctgtctaatcatttccatctcccttcctctgattcatttaaggaacgaatcaatgccttaattatgtgaaccattcagaactataatgtgtcacgactgggaacgccctatgagatgccaaaagccccaccccttttgacatcaacagtggcctggatcagggatgctttggttctttcctttgggcactctactctggaatgatgtccaatcactttcttctgcaagggccaacctcacactttatcccttcagcctggccactaagacccagctcttgcctcttctactctggctaatatgccccttggccaggccaccacacagtcaactacagggcttatgaactacctgaaaaatatttgctgaatagaagtcaatgagtatgtgaaaatgaatgaatgagtgaatgaaataagttgcttctcatctctgaatgagatttggattaattgtttcattggactgttgccccatgcaagcaactatcatctggcagtgcctctggaggaagaggctgacctcatatagctctaaatatgaagtccaaacatatagtttatgtttcctaattcagctgatttgtggatattaaaaacaactgccacaatgtccaaaactagatggttctttaaagttaatcacaacatggtttttggtttatattctaaaacataatctctcacccaatacattaatttacatatccacataatgaaattcatgcatatatatgtgcacatattttaatgaatctaaatagatcactatagttttatgcatgaaaggcttttaaaaaaatctggcataaaacatagccatattaaatccctctccaacatggtaatttaagaacagaattttccatgttgttttctactgctgatttcattttctactgttagactgaccaccttgtgtctcctgaaatgccgtcttgcttgaaaagtccttcttaactctcccacaagtcactctcttctctatgaaccccaaatcctttttataggtctccatgagcagtgtcaaggtcttcatctatggtctgaatgtttgtgtctccccaccaaattcatatgctgaaatatagtccccagtgcaataaaatattaagaggtggagcctttgaagggagaggattaggtcatgaagattctgctgtaatgaatagggttactgaagttataaaagaggtccaagggagcttattagtcccttccaccatgtgaggacgcaagaaggcatcatctatggagcaggaagtgagcctttgccaggcaccacatttgctggtgccttgattttggacttcccagcctccagaactgtgagcaacaaatttttgttatttacaaattaccccgtctaaggtacgctgtgacagtagcctgaatggaccaacacaatgtctttgagaagcagtgtggccctgtgatcaagagcgggcaggcccactggaccaaatcttctgcctttggaacctggctctgccacttactagctagctgatacaggcaagttattaaacctctcttggccttagttgcttcaactgtaagatgaggacaaaaacagtatctaaagtcttgtgaaaa

SEQ ID NO: 1882888 - DNA, 4001 bp, Homo sapiens
tgtagtttatgcaactgggttaacatgtttacttcaacaatctcatcccactgaaaataagtacactgatatatttattataaaagtaagcataatttaaaaaattactaacatacctttcataaattcatcagagctatttttttaaggatagtcaagtgaagcagtgggagtggagaagaactgtaattgattgtgatcaaagagttgtaaacactactgcacatggaccagccaacaacagaactatttataaagcagtattaatgattcctacactttcctaatataatactgtatataagcagacattcaatatatccttgttaataacaattctcttctagcagtaacttccattttcttgccctaaacatgtattatttgtgtacatataaacaaagaaagtgttcatggcatttttaagatacatatgtttagaagcattcagtttctataaataccaattcttataatattgaccacaaatactaaactaagaatgtgccagaaagataatgggttaggggatttttaaagtgaggttctgtctgggaggcggaggttgcagtgacccgaggtcacgctactgcactcctgcctgggcaacagtgagactccgtctaaataaataaataaaataaataaagtgaggttctgtgaatgaaacacaggtaatttatgtgagtatacattaagtataaggaaaaactaatagtatcttttaaaaatggctatctacatttatattgtaaaatataaccttatacataggaggatatactaaaatagctacttatcaaggtacagactgaacagagtcaagatatcatactaccttaaactgccttctcttttaaatcaatcacctgaaatttctttattcaaaagccacaaaacagtccattaatatggcttcaaaacagttcaatatacagaaaaaaatacaactgtagtatagttacttctcaattatagaagtcaaatttccaacaaaagtactgagcctgtagttatagaaggtagaaacaactgacacaaaaaacacaactgtgtcccatggcttttcctatctctgacactaatgtatcccatgtagtgttttaaatgcaaatgaaggtatttttgcagatgaaggtgtttgctatgtttttgctaagcttgttgaatgcaatcctagtagaccttggtgaatctaagacaactgaggacaagctggttgttcccacatttgacggctgaaatatgcaactatcttaaagctttcaaaggtgccataaatttatcagtggtttacagagaacaaggtaatgactagatggatagaaaatacctttactctttggttcaatcacctgtttagatacccaaggatagcatttctatttatagttcaagaaactgaacctcttatctaaggaaaaagcagactgttaattaagaatattattgtcatccttctgtctgttactgctaactcatttatttgaatcctggatcaaagtattatacataatatgaaatgttatatttaagtgttaaataatatcactaaaccttcatttgaatactatataaaactttgtattattgccaaaaattggaaagctaacaaacataaaatatagtttagagaaatggcacagcatcaccatccagttctatgaagaatgatttgcagatgttggtataaaatgctctgaaacagcagaggaaaaatttcttgaaatggtggggggcatttctccttcatttcctttaatgaacttagtacaagagaaatagaaaagtggttacaagctaataaacagcagcctattttgtgtgggcaaaatagttttaacagaaaatgaggatggtgtggtggctcacacctgcaatcccagcactttgtgaggctaaggtgggagaatcaccttgtagagataaggtctcactttgttgcccagaccaggagtttgagaccagcctgggcaacaaagtgagatcctatctctacaaataataaaaaaattagctgggtgtggtggcatatgcctgtagtcccaactacttgggaggctgaggcaggaggactgcctgagcctaggagtttgcagctgcactgagctatgatggtgccgctgcactccagcctgggcaaaagagtgagactgtgtcccaaggaaaaaaaaaaaaggaaagaaaaagaaaatgataagcaaatgacccaaaagcaaggtgaccgcaagagagcagtgcccaacctttttggtgccagggatcggtttcgtggcagacaattcttccacagacaggggtgtcagggatggttttgggatgattcaagcccattttatttatagtgcactttatttctattactattatattgtaatatgtaacgaaataattatacaactcaccacaatgtaaaatcactgggagccctgagcttgttttcctgcaactagatggtcccatctgggggtgatgggaggcagtgacagatcatcaggcattacattctcataaggggcatgaaacctagatcccttgcatgtgcaattcaaaagagggttcatgttcctataagaatctaatgccaccgttgatctgacaggaggcagagctcagatggtaatgcaagtgatagggagtgctgtaaatacagatgaagctttgcttgctgctcatctgctgtgcggcccggttccttacaggccatggaccggtaccagtccatggcctgggtgttggggacccctgctagaagagacttcaagaaattaagctccaggtcattactaaaatcagactctattccaccctatgttcctagatattttatctccattcacgtgtgtatctatcaaagtaactgttgcccttaaagataaccctgaaaattaatataaaatgactaaactatgactgggatatttcaggagttatgtgattataaagacctatcaagacacataaaggggcgagcacggtggctcatacctgtaatcccagcactttgggagggcgaggcagtcggatcacctgaggtcaggtgttcgagactggcctgaccaacatggagaaaccccctctctactaaaaatgcaaaatcagccaggtgtggtggcacatgcctataatcccatctagttgggaggctgaggcaggagaatcgcttgaaccccggaggcagaggttgcagtgagccaagatcacgccattgcactgcagcctgggcaacaaaagcgaaactcatctcaacaacaacaacaacaaaaaagacacataaaaatgaggaaaataaaaactgggtttacagtgaaatttcctaatctaaatgccttttaaaaatgcataagcttcattattactttaactgatttggtctattcttaacaaatcttaattaacaaattacgaggcaggtggatcacttgaggtcagaagttcgagaccagcctggcaaacatggtgaaacccccctatgaaaaacacaaaaattaggtgggcttggtggttcatgcttgtaatcccagctacttgagaggctaaagcgggaggactgcttgaacctaggaggcagaggttgtagtgagccaagatcacaccactgcgtccagcctgggtgacagagcaagactctgtctcaaaaaacaaaacaaaatgaaacaaattagatttgatttttattagcttcctattataaactaaaaagctgttcatcccatttaaatgtgttaaatatgccaaaaaataactgataaacctgtattttataatgacttacggttagaaaaaggagcaccataaactaacttctaactgaagagctctaaagtgggattgaaaagggtctaacccacctactgctgctgtcacctgtgcacatagtgccaggaggtcaacccacctgcctgccaccagcacctgcaaactccagaggtgggcttggagagaagcctgccctgcccaccactgccaccagcacacattatctagggtcctaaggacaa

SEQ ID NO: 1882889 - DNA, 4001 bp, Homo sapiens
gatggggagggtcaggatagcatcaggggcaggagctcccgtggtcacaggtattattcagccgtgccgttttgctcgtcgccatcgtcccttctcccactgctgtctggctgtcacctagtgggggctcggttggcctcacaaacctgcagtaattgttcctggacccgtaaacccagcctttcttcctgaacctccacagcaaacccccagccccactcaggatcctttagcacctctgaactcagttgcaggcgacacgccagctcacatattgccttaaaatggcctccagcagcttctgcttagggaaggaatcttccaggggccttgtttcttgagggctgtggctctgcagcagtaaaggccttggggaggcctgatgccacgcccccaaccttgggctgtctcggcacaagtggccaccccagggccgagtgggaggattccagataaggagggtccctggcccctggccatttcctggccgcagagcactacggcactcggcactcgggagcctggtcatccgtctcattgtcagtggtggacaacaagatggatgtccgtgtggtcattcctgacctgccgtggcctcaccgcggctgcagtgtcgatcccccagctatccggcatgaggaggagggactgggaatctacaacaacctgtaattggcataacctgttttctgccccatttatttatttatttagatggagtcttgctctctcacccaggttggagtgcagtggcgcagtctcggctcattgcaacctctgtctccttggttcaagcgattctctgcctcagcctcccaagtagctgcaattacagacttgcgccaccatgcccagctaatttttgtatttttagtaagagtcggggtttcaccatgttggccaggctggtcttgaactcctgacctcaagtgatctgtccacctcggctccccaaagtgctgggattacagatgtgcccggcccctggcctctttagaggtgaggaccccacttagctgtatttcacttctctccatatcatataggtcctcctctgtcctttatcccaacatggttctcacctttggggaagtttccttaggcccccaacccaactcttgtatatgacccctgctgtcagctctgtcccctgtcagtcccctgccccctgagggctgacacctgtggggcctcccccagggatggtaactcacaccttcctctttcccagggtgtgcaattccacctcctctctctagaggtctctggatcctcagcaagcaatattattgactctaacaagcaatcaaggactttatttgaaggatttgggggtagttcacagaatgaagggcgcggttaagatccaggccagggcagggcagacattaggcaagtcagtgatacaggcagtggaagcttgtcatcttctcgccatacactgctgggatcaatcagcatcaattattttgttcccaatctcagtatcctttacagatttcaattcttgtgtccacccagtgggcagaagagggcaggacctcttgagtgacaacccacccagaagtgtccatggtgtggaagggggtcatccccaaaaggatttcagaaggagatcatctgtatacagaggacagaatgctgggagagctgtgtgaccttcatccaccaaagcggttttccctggcatgtaattgagccactcctttatttttcttatctgtggagtctctcacttgacattgcccactggtaaatgatgaaaagagtggcataagtgaggcccagagaggctcagtgctggacttaaagtcactcagcaactctaaaggagagccaggagaccccagttccattcactgttcttgggtttgctgtgactcacctggagcccttggggcagcctcccctgtggacaaggcctcccgcagatactttttggggtaagggcttcctgactactgttgagaggaacagcaagcccagaccgcaaaaagatccaaaggagacagcagccatcccatggcaggggggctggaggggaggctgtggcccctccagggcttagctggtaccaagaagaccgggtcggggagggagagccaggacctagggggaggaggggagtggggggggaggtggggggagaggaagaaaagagtcctggggagaagagaaagctgagagccccagaggcaggaggcaggcaacaggaatcccagctgtaatccccctccacctcccaaagtcacaacctccttcttatgagacagaagtggccaagctgtagctcactcctgggaaggggcagtttgaacctgcggctccccttcattttcccctttcatctcctgcatcctgcgcctcctcagagccctctgctgtgcctgggcttcatttggatggtctggcccagggtctctctgcagccgtggtgcttccttggttccacagtgtcagtacacccagttcccacaggggactctcccagagtctcaaaatgctaagtgccccaagaagaagatgccatccctggttgagaccttggggacagacatctttgaacttgcaagtgtgggctctgatgtgctttcagcagacgctgctgtcatggaaaaggcaggggtcccagggccaggccaacttagcctgattaaattgctcctggctgtctcaaatgagctgtttctccaaggtggcagctaagccccgcatctcacagtggcctcctgcttccataacatgaggtcagcaatgctacacagaggtccctgagccaacctggcctgggtcttacctgccttagaggctgcagccctggaagaggcaaggagattccagaagtgtcaccattgcaggtttgcagaatggatggtgtccgcctccagttccctgcagagctcagcatgcaatggtttatctcttgcttttcctgaaggtgtggaggagccatcgggacctgctagagaggggccctcgtgccttgcccagactcccaacatgacacaacacggacttgtcagcaggggccagctggaggcactggagagagcggccctgctgtgcaatctggtccagggaagaggcccagaatgtgagtgtgtagccatggatgggagggcgtggctgtggagcaggctgcagtggagaacctggggacagagagactctgaggatgcctgtgccgggacaggcatccatctgcctccccatgggttggcctgggttactctcaggagtaagaggagaaaaccctttcttgcccatggagcaggcctctccttcttagctgctcatcttggagcccgagcccctgtacctggcagcgactctggggcagcagccaggtacaccttgagggggcactgtggtcttccacggaatggagaattgcccacagccagctttccgcgctggctgctcctgggatcgctgggtcccacccccaccagcatggttcccatgaaatctcttggaactccagtccctaactccctcctgccccaccttctttgctgcagcctggggcagaaccaacacagggacaatattgattcgtggtggcggggcgcagacaccctcctggtgggcttgagctgagccacacaggccaaagagcctgggccactaggcagggctagtgagggcagcggggagcatggcaggtccctccggcacctacacaggggcctgcccccactgagggtgctctcttcttggcatccccgggggcctcctcttccaaggcttctcctccgtggattctgcatgtccggcacttccgtgtatccagtgctcacttgaagcacagtgctgtgggctttccctgtgggatctcacctgttcctacatcaggaaatgaaagtcctatttccagctttagggcaaaaacctcagagtcctctctggctccttcctgtcactttacctcgccatcagcaaacattgttatgtctttgaaaagactctgacctgcttctcaccccctccaccagccacca

SEQ ID NO: 1882890 - DNA, 4001 bp, Homo sapiens
ggttttggggctgtgaggggagatggcacagagatcctctgttgagacgctgagtttctaggactttcctgaatctcttttttccaagggaatgtatatatacactaacacatatatatatgcgtgtgtgtgtgtgtgtgtgtgtgttaaatggagcaacaagatgaggactggctcatgatatatatgatttgtttcttaagtgatgataaaataaattctgaagtactgtggtgattttaatgacaacactttggaaaccttttgggacatgtagacagggattacagtctgtgttatctacttatctatctcaggggtcggcataccattcatatttactatcagcaagatagtaaatattttaggctttgtgggccatatggtctgtgttacaactactctgcccttgtagcagaaaagcagccatgcacaatagctaagcaagttggccgtgttccattaacactttagctatggacaacttccttgtgtttccttcagtttcatataattttcatgtgtcataaaatatttttctgttgagtttttaaaaaactatttaaaaatgtgaaaacactcttactttgtaagtggtgccgaaacaggcctacaggctgtagtttgtcaaccctgagtctatctggctatcatttgtttatttgttggtctatctacctgtatgttttccttcttccttctttcatctaggagaagaaatctggttccattaaattttgtatgagaaattctttcctatttatatagtcaactactctaaacacttacaaaggggatagagaataactgatttattggatttctggtattgattcgcttgtgtcctgtggttgaacttgtacaagctttatgtattattattattttaaaatactacatttagcattcttatagccaatttagaataattactttgtaaaagatccttgaggaagtacattacatctaataaaaaattatcttggatcttgttaagacttgaaaaccccaggtgaatgatagcgttgggtcagtttttacattctgaatagagcacgtgttttttctgagtcagacaggcaagacttggatagctgtatattactgtttatgagccttatcctttcctgcaaatcaagtgtttattccactcctgaacttaattagcagctaagagctttgtgctttgtattttaaggaagcatgtgatttgttcattagttcaaaagcagattaattattatatctttagtcaccatctgtaaacacatctatattggtgagctctctcctgctgagttaccttgaaatgccctgtggtgttttattagcttcaattctgtgtttattacagttggctggagatttttcaatttagtttattggccacagaaagtccaatcattctgtggaaactaccaatttctgagagtgaggggtttactagtgctggctgtcaatttgctctaaacattttccccaaatcaaactgtatttctgtttggattaaagatagtagtagtttgattataagctaagattttaagcaccctatatattgtccgcattcaaggaagagcaattgggattaaaattagtaatctgcatgaaaaagtatctttctaatccaagttagctccagacaaaactgtgaagtacgtgaacgaaagaggataaatgaatagttattgatgcctgggcattttaatattatctaattttggttttgcagcaatgctgttaggttccaagtgattctcagagaatttaaagaacttgcataagatcattgatagagctgggatatgaatcaatattagtgtgacttgtgagtttgtgcttctcttcaccagtgtctagattgtcagaaaaaaatataggacacctagtaatatttgaattttatattatcaacaaatacttttttagcataagtatgtcccaaatattgttgtcctaaatattgtgtgggccatacatatattaccaaattatttgttgcttatctgaaatttatatttaagtgggtgtcatgttttattattacttgtgaaatttggaaaccttagtagtgtcccttccttctctctccttctctaggcattaagtctgtccaggaacccctttatctgcttccctgctccctctgtacttctggctttggcttattaaccccattctttgcttctttagtttgcagtttacctgctcaggtaaacttaaacattaactggggaccttattctctctggttttcaaagtgtctagtgactattttaaaaaaggaataggattagcctgtttgtcagagctaatgtcttcagtgattatatttttcaagttatgtatttacttaacacagccatgctttaatgcagggtaactctagaggccaaaatttttagaccctgtgcaaagaaaaagaagagcttaagaccattcttttagttattctgatagggtatttttcccacagaacctgttggtgactttatgtttttaattttatctaaaatttgattattattattattcagatttcttttgcttttgattcttgtatactaaacaaattttgaagacaattttcgtgcatttaaaaaaaactttataaaatacttttcaaagaattagtagatgattgaggtctctaacaattcttaaactatattttcacttagtaaaaggtaacacttttacaatacaatttttatttcttgagtaacaagaatacagagggaaaagttacggttctcagtatccaaccatttagctatataccaacatagtagcagaccagacgcttctcagtgaagctaatccaagccagcaccttatgttctctgcccaaactctaggaaacttgtacctttaccaaaaaatctcagagactggcttggaaaccactgggtaaatcagtaggattgttttattatctagttaccttaaggactttaactggggcctcaaagtcttttcagaccactaagcaggaagcgtgtgctgttagccataatgtggctgcaataagaatgatagttttgggtcagctaacagtatgttatggatgaatgtggctcctttcatctctctgaatcttggctttgttgtctgtaaaatcaagcaggggtgggattgaatgatagccgaggtctttattagtttgttactggcttcaacagagttgggaagcctcaagccacatgaacctttctcagaactgcttctcaggacaccttagggtagctgagtgattacaaaaagcatctgaactatgtgcagatgccttggaatagaagcaggggatctggaaaggctgttccccaaggtctctgcagtcagccatgcacttagatttgactacagacaaaacagatgtattcaaaaaattgaatggcatgttttacctaaatggtaggggttagggaagatagcttcttaatgggtctttgtgccatgtctctttattccttatgattagtacagctgaatcctgattctctttccttttccttgtcttccttccctctcttcctgtctctctttttttctccctccctctctcattgctcatttttttccttttcttcctttcttgccactctaacaggctgagaacaggacttttaggagctagctttccagaagtgatatagttacattgccttatctggatttccagagcgcatttctcctcatgtgctttttcgcaagagagagaacataacataagcccctaatcctttcaaatatgttaaagagaacaatgctgtgattgaagcaaggagactgggatttgactctcgtgtcttcctcttacctactatttgtatggctattgaagaagtcactgaatagatttcattatatctaaaatgtgagtataatcctcattgaactcttaggatttcattaacactgaaattctattgaaaaacagtttttaaactgatataccatggaaattattttttcatgtgcctaggtaggtttgttttctt

SEQ ID NO: 1882891 - DNA, 4001 bp, Homo sapiens
gatctgggttaaatgaacaccacggcctccccagcgttccttgttcttccttccctgacgtttatcacccttctgattattttatatttgtattgtctacctcttgcatgagaaagacctccaagagggcagggttcggggcctattttgttcactgttgcattcgtaacgtctagagtaacacctgatgctcgggaggtgaaaatacactgattgctaaacgactgaggtctatgagaccatgccaggtttacagtaagcaccccaagactgccgattttcccagttcctattcctggcatccttagcaccagagtaaaccacagccctcctgcttggttagtccttaactcacttgtggtcacaaacaggagaaatgcaaatcacttaagcatagaagtcaaaccagactgaatcatgtcagggactccaaaccttgcctttctctggaggtgagagatcctgacctaattcctttgtatggatgactactctcccagtcaaccgctccactctttacctcccattctcttacaaagttgatttaagttttcttaaaattcagtatattcagactatcttgtggagatgtacagacataagaactaggaaagagaatcctcttcctcaagtaagcataccttacatctcaaatgaacacaagacgtacttgagtttggatcactttatttaactgcacagaaataattcagccatttttgggtaaaggattgaggaacaaaagcaaagcagtcactgatggaaaagtgggagaatggataatggccacacaaaagagaacacatgctgccttaggatcaatacacagcatttctgtgaaaagcaactggtaggtcctgccattaagctctaacatcaagcagctgaatactttctccctcattgagccttcctccattatcatccctctcccgatgataaaccactggaatatacctaagtaaaaaaaatggtggctttctttaccaagggcttcccagagacacaagcaacccccaggtttctgaagcatcccataaaatacatcagaaggcccttcccttacctgtcagcaccacgggcacaggaaccatttccttttttccctaccaccctgcgtcctgtgcctggccaaaagctcataaaaccaaaacagggcaatgtccatggaacaggactacaatttggtgccagtcactgacccactatagagagcaggctattgatagaaactcaccaacccaaacctccattccactagggatgagagagcagtctctccacctaaaggatctccacagcccaaaagcataaatgtccccctcccccagtggctttcaaaatgctttcttggaaaaagttcttcctttccattaataaaacttactttaaaaaacaaaagtgaactgcatctaaatcggaagcagaattgagactagatctccaaactcaatccctgcaggctgtcatttatccagcaggtcgcttgagtaaaaggaccattatctgtggcttttgtacaaatacatttccttctttaagggtagagagtttaaattcctgcaaggcactgcacactaacacacccattaataaatctgcagctctcctggctcagtttaagtgaggccagtctttcagtacctgttaagcaaccttgaaaagtccaaagctttatttttttcttctttaaaccaaaaaattctacagtcaggagtccaccagggtaagatgaagagatttggggggattttgttcccatttacagggtttaacccacccgcttcaagggaattggtcaagttcctcgtgctgcacttggaccccctctggccttgcccctcccccaagggaaaggcgcagcgacgtggccaccagggccactcggcctggcgtctggagcactggcggcatcggcgaccacagcctctagagacaaagttctgtagtgcactgacttctatcatactcagagtcggagtgtctcagaactttgcctcaaaagaccaaacgtgctgtcttcctccagaagtttcttcctgcaggtgtgttcccccaccccccagctaagacaaagaagaataactcgttaaaagcaatttagttcaggatgcgaccgataatggaacgggtcattaattatggaaagttactgccgcagtcagcaggagcaaatgcccaacagaaatggtgttttaacagcccgattcgacaaattctggtcgcaatgtcacagcaaaggggctgcaagaatcgcacactctccttccttcctacccgtcctcagattagaacccattcctggtcgaaccctcacctccctcggtagttatttaaacttttgccagcagctaactcactctaacttgtggcaactttttaccttcccatctggaaagctgggggcgggggcgctgcacgaggacgaatattcggagctgaaagagttaaacggtggggaacaaatacaggcccgggaaaagcccctaagatgggacgacccaagaaagacccgctttgcggggcctcccctgagacccccttccccagccattcccagtactctattcccggtcttccagccgcccgcgcccagccccgggaactcgggtcgaagtcgtcccatcccctccgttccacccacccactctttgggattctccctgccccattaggcagtgcttcccgcggaccccgttcgcgcacaaccttgcacacagtccccaagactgctcttctccccctcccggcacccccttttccctgcagcataagcgaccactctgtcccccatcctagcagaccccctccccccacataccgcacctgaacagctgttgcgcgcgtgcaacaggtctggaaagtgctttcccatcttcccccaaacccctcgccaccgttccatcccccgccacccctaagagacaaggccggaggggcagtgggctgcgtcccccgggccggggtgcacgggcggctggcggagtgcggggcgcccagaggctcccggggttgggggcggtggtcgcgctgggccgggacaccttcgcgagtggcccctcgtgcgcccgccgcaggctccccagcctgcccctccagcgccggccgccaggcattcccgggccggctcccccctcgcgctccgctccgctcccttccatcttgacttttgccgacgtggaaattttgggtttggagacgacctgcgctcttattggctgccggcgggcggggtcggaggtcacggctgctctcgctattccgcgccaaggggagccgcacagcggctcgtgtcaagtcagcaggttccctccgcctcccccggggtcacgtgcgccccgggcgggcccgggagacgcctccttatgcaaatagagcggccgcgcggggctgggggcgggggcggggtgggcggtggcgcgtgggggcgggggcgggggcgcggccggcgctgggagggcggggcgctccaggtggccacctggctcgacgtcccgccccgcccttctgcccaccagcctctgccaggctgcctgttccgcttcccgcgacactcgggccgggcgctgtccccggccagccccgctgggcccagggagcccgcgttttgcaagatgcccctgaatgcccgctttccccggagccccctcctccaaacccagccggagccctgcctgggcccggtgtctcctggctggggaggaggcggcggcgaagctgctgcagggcagagtgcgaaatggaaacctcgggaggacagtttcctcccctggcagggagttgagaactaaatgcgagattcccggtaagggaattctaggacaaagcaaaatcaagaattcatcaaggttaaaagtcgtttcttttaataaactgcccaccacccatccccaaataaaaagaggccaaagagctaactaaaagtagtaaaaatgccagttctggatttttttttttaacacgtctacaaggactaaccgaaaggccggtttgcctccacc

SEQ ID NO: 1882892 - DNA, 4001 bp, Homo sapiens
caaagccttgcctatccagcaccaaagagtccgtggaaagtaaacattccatcaaccggtgctttgctacaaacctttgaagccaggaggggcagggtggctgtggaaggagaggggaggtgagtgtccagtgagcatgaggggagggatgcttgaatacggcggagcccaaaccacagagctttctcctcctctcttcctattccctgaggagttaccagaacaaggcccttctgatgggagtgtgaatgcccagtctggagggcaccacgggagctgaaggagcagttgcagggactggactcggcgtgcccacctgcagatgggccgcggccacagcctagccaggacgcacttgatctgtgctgccctctggtctgtgaaacacgaggctgatgcccaaaaatgggcgggctcagacacaggcacaaccagcaacggcctccagggccgtgtcaccgtttctgttagaggtgtttgttgttgtttttccggggcacacagtggtgcgaaggctttggggagaggcggggaaggcaatggtgaactccttagaggcaacagcacttgtatgccagagtgccttgaacattcttggtccctggagaataaagaggttggaaaacagacccacttatgtctacttctacaattttccattcctgactcaggctgtaaagcatcgagggctcctgatgacagaatggataccaggcctcaggggtgcaccccagcatgggggtgggaagccctccagctcagtaaagaccatgtgtgtgtgcatgagactgcacgcatgtgtgtgacgtgagcacgtatgtgcacacgtgtgcacgtgtagaatcaagcaggctcaactatcagaccaaatggtgagtggctttgctttgaaaggccttttgcctttggcagaggagtttactggccatggctcagcctctgaatcttgcaaatgggaatgacctcagttctgctcctccagcttcctgctgtgtttcacacctcgtggtccactctacgcagagactaagctcagcttctgggtccacacccaccagtcaccaggggttgctcattttttcctcatgagaccaagtacacccaaaaaagggacagtaaaacaaaccaaaccccaaaccccaaaccagataccctttaagaaagtgtgctggtttgaggaaaggccagcataagaagtcagtagacagcggtggctcatggatagctggtcagctcctgctttggcaaaatgcagtaataacccccttggctgggaaatgctcctagccagtgaatttgtggctacgatggcctcaacctgcttccccactcccgaaactcctgtctctatctcacagtatacggaagataccattttctctgacatgttgtgcctggtggccttgggaaggtttcgctgtaattttcatatccgtaccagcccccaccttgtgctcaacctatttacaaaaacccacgggcagtcaaggacatgtgcagtgtagatacagggtgtggcatggctgaggactttatttacaaaggatcatgcagttgtattattacacgcaaagcatcacaaatagagaggaaaaccacgacatattgaacacaagagttcatccggttgacccaagatgtagaccacgagttattcaggaaggtgacacagccgtctcatttgactccatcagaacaaagaatcagtgagcaaaaggtctccaacagtaagaaaagttggtatcatagaaacttccacaacaggaattcactgagaaagaacgattagtgatacaaaccaacccaggggtcaccgggcgagagcgcaccgtcatgcaaagcaccagcaagcaaggtcagaggtcgttagaggctcagaaaaggggctttccacatcgcccctgcagtacagtcacagtttccaatgatcacttttgtgactatgcaactgggctcatattactagctgcaacatcacaaaaatgacactggccaccgctaattagctggcaaggtaagggtttgtccgttttaccgtgagcagcgttagtgagcaccattgcacacagcaagaagggagagagtaataatgagagagagagagagagagagagtttttaaagcaaagccctcacatgtgatgctaattatctcttagcagtttctctttaaagtgtaaatgcgctccctctgggctccagaaatatttaatcacacatctcggtgcctggcgaacgcgccaggccagagtgagaacgcgtcgtctattgttcaaagataagaaacgctgcagcatgaagatggccggtgtcttcagaaggggtctcacctttcctgtcgctgaaatcggggtggctattttatacagaaaaccagccaccggcaatgcttgtctaagtgtgaagctttctgagaatgtgttcgctcaaacccactgtccagataacacatgaaaggtggccttggccgaaacgctgggcggtgccaggtaaggcaggcaagaaaagctttctactctgacgtggctttcaaaaccgtgtctgggggttcattagcttttgaatttaacaaaaaccttcttaggctgtatctcctcagaccctggagcaagggaaatttgggaatccaatttttcttggtgatgaatcataaacactgagggtcggtgatgtacatgttcccgtccatatatggatatggacatagcaacgtgcccatatgcatatacgtgcaaacacactggatgaacgcaaagacggggtgttaagatgaattgccgtctttgtagttacatccattttgccaggaatgactgttttttgaagactctatttcaggaaattatgtaagatttctacatagtatgtctttagaaataaatccgtattgacagaatgtacataatggccaggaaattagcgtgggtgaggaaggagccgtgtacagtagttgttttaggatgtactcaggactctggatctacgctctgcgtccccaggggaggtgacggcaggcaggggccactgagtgtgtgttgtggctgtgacaccagattcaagtgtctccttgcagaggctcttgattgatttctattgattcaaattacaaaaaactgcattttgcttttcaatgtagactaaaaggcaaaataaattgaatcataataagcttcagaatctgtaatacacaaattcaagaattccacagagaattcaaaaatcgcttctttatgacaatctttgtctcgttaacctccctccagttacataactgtagactcgagaatgagtaactgttaagaatcaagtcactttatgatagtggggcatggcattggattcaaatgcattttttcttcttattctccttgtttggatatttgtctcttttcctcaataggtagacttctgatcagttaaatgtaagacatattctatacaatttagagcttcgtcactgatgcttttgacaatttcattttccttgtggtggtttattcactaagcaccaccacctagccaatgcggaccgactgtttaccacaatcaaagctgtggtcttaaatgctgcttttttttcattgtcaatttcttcctgtaagacagagtctagcattcacttcaacagttcagtaaatacactctcaaaccagacaacgtattgggtgactggctgactggagcaatgaacaaaaaactgaattttttaaagagggtcagtttcaaaatagccctaaaaatacagacagccacgggctaagtgtctccgggcttccctgcaagatcacgcagggtggtatctgggcctgcgctcgctacctctttcatcccatgcagccagatgagaatccaactgaacatccgagctttatgcatcaatatcctgtggcacatacactttaggctctttgtcaactgaagaaccttatcaaaaataatggccctatttccacagttcgaagatgcctattccccctcacattttaatacctctgaagctag

SEQ ID NO: 1882893 - DNA, 4001 bp, Homo sapiens
gtagtcccagctactcaggaggctgaagcaggacaatggcgtgaacccgggaggcggggtttgcagtgagccgagatggcgccactgcactccagcctgggcgacagagcaagactcaagtctcaaaaaaaaaaaaaaaaaagaacagagagcagagccgtttcaggccctggtctctggcagacccctactcaccttcctgggcatgtatccaaggtccttctcccatggcacctgcttcctctgccatcgtggacttaatggccaagtccaactcctcctttcattctgcacacagccacaagagccatccaaccagaacacacatctgatcacaccccctctggctgcgtggctcccatggtccttaggttcgggaacaaatgcagccttaagatggccagccttccagcccggcatagaccccaggaaatctgtgtgctctccaacaggagtctcctcctctccctgagggtcactcatcttccaggactccccacccctccctgtgtcccagcaggtgccgtgtggccctagctcagagcagccttcttcatgccctgcagagccagcctgtttacgcagcgtctgcttgtgctcacggcatgtaacatgcatagtgcagcctgcgggagaacagttcccttctctttctgtctcaagagctgccggctcagaccttccctactcggcctgtgtctccccaaaagagcgcagtgagctgcacggagccggttgagcctggagccaccagatagatgtctgccccgccctgcccagccacaggggttggtgggtcatggaaccacacatgaccctccgagggcaggtgaggagaaaggagggctgatgggggctgatagaaggggtttgggggatggggagcaccagagaaggaaggctggcaggccgagggctggggagcaggggataggccttcacatttgcatttgcaccgttcactgcgggctaggccacactcacacacacacttacacctgcacccacaccctctcaaccacacgcgcagctcccactctggctcctgagccatctgcaggccaggagactccagggccgggcttccccagcaggtctgcccaccaagcccaactctctgggaagtgccactcactctgaccctgtggcccggctccggctcaggggagctcccactgcaaacacaagctctgggaaggtgagtggaggctttgtctcaggttctgaggcgtcaggaggaacaaatccatgaagtggaatgctggaggcatagaggtccagcccatgggccacctgcaccccagggggccagtcccgcatttacacaagtgacttgtacactctcctcctgcacatctctggaggcttatcccatctggccctccatggcctcagcaggatcactggatgtccgtgatgcacggcgtgccctccctgccctcatcctcccagccagcagcccaggaaggaaccactcttagtgacctgtggaaggttaggagaccctccctcggggccctagagcccaccctgaacagggcctttcaggggagagggtgagaaggttcaccacccagaggagccaggccaaagccctgaaaccaaacatcccccagttccctcactcctcgattcagactccagggccacagcctggagcagagctggaccccagctcctcttggcagcacccctgagggccagagaacggcttcccagctgacttgaggacctgtgacctcagggggatgcagggaaacacagagtgtcacttccagctgcacctgccctctgccactacccagcagtccgggacctgagtcccctccttcctcgcggagaacagcaggtccagcatggccggcccttccctcgctggctgtgcacagggtgccggctgagtcctcgccccatagttggcaagtctagaaccaccggatcctgttacctcaccagtgtgagttctaccattgccaaaaacggggggaggcaagcagctccccccaggagctggggaggcctcggtctgtgctgaggaagagacagagacagttaggatggtccaggcagggccaggacagaggcgcccatccccgcaactgcgacaaggtccttcctgcagggtcgccctggtgtggaggcccaaccccacagtcccccttcctgctggtcccggtccctcctcagccccctcctctcctcccttcccctcatatctgtaacctgcagttcctgtgggcaggcatggagcagacaccatccctagggcagccaccaggatccaacccaggccctgagctgtggtcaccactcccaagggaacccgagggcacctccactcccagcacctgacagcagggactctgggaaccagcacaagccaggccagagagccctgcccctgggcgctggggaagagatggctaatgtgggctgggttttgctatttactaagcccacgtcactgctccatttaatccagagagatgctcccaagccattccctagagcctaaagctcacaggctgcccaccccaaagggagagagggaagttgctacacaaaacattcctcctccctatcaagtccaagggaggaagagcattccacttgccaaggcctcttccctaaaagcagtggacaaacaatggcgctgggaccttctacccaggaacgggaacaggcagcctctggggccatcagtcagtggcaggaatgggccaagctaaaaccaaccaaatatctcccatccagacggcactctcctgaccacagaacccactgcacacacccagcagccctgcacacacccagaccctttgagggctggctgcgatctgattctcggagtggcatttccccagaccgccagtcacttacccaagggcagcacacttccgtgttcccacttcccctgatgaggccaggtcctttcccaaggggtgttgaagtgtcctgaaggcatctcaagcctttagcaagggtgcaggctgcctgcccccaaccctgcatccccatgcctcccctgcagcctggaagggactctttgccctcaagcctcctgggcagtatgggcccaccatgagcaggctcattttccgaacatgccccggctgggggagcagctgacttggcagggcccccaaaatgacaccgctgccgccgccaccgccaccacccctcccatcctgcctgccctttagggtggagtgagatgggatgatggcttaagatgcaaacagatccaggccatccccagggccaagtccaggacctcggtggcacccagaccggaccggcagcctgggcttgggcgctggggaggacacctctgcccgaaaggagaggcttggtggggaaggtttggcctctgagcagaggcacgactctggaagcctctccgagggtgggcgggcctgctttgggacatcagcagcactgggctctcttggtcccatggagcccccaagcctgggacttgctgaggaggccactcccaccctcctccagtgtgtatgtggggggtcctgtcctcctccccacccagctgtggccgcaccagccgggctccatcggcagcctggggctgcaggcgatcaatggtgccggatcgcatttcgacccgcctgaggctgggcagaggctgggataatggcctggaatgaataagcaaatggagtggtgggggaggcggggagtctggaaaacccactcatacagccctccagggagctgcccctcctgccgctccacgcacccagacaggccaagcaaggtgcccgacatgggggacgccctaaacccgggcatctgggagccgctgcttttgacaaacagaaaaacaaagcaaaaagtgcttctcagtgaccctcccgctccagcaagaaaggccttcgctgcagtgggacagcgttcctgcctgacactggacaccattggacagatcatgggcagaaccttttgcccatctcacagaccttctggaagccacacaagggagg

SEQ ID NO: 1882894 - DNA, 4001 bp, Homo sapiens
accccacctccagggctcattctcactcaggccgggaaatcccttctttcctatcccatgggacctgcagcaggacgccctaaggaagcacccggggcggaggactggagcacagagacagggtgcggcacaggccagccaggttccgaggggcagagggagagctggggccatcagaagagagacctagctacagggacacctcaccagggcagaagtccccttctatcctgaaataaacaagcccctccttttttctgcaggggcttggagagcttctgtagagaaacacgggcaccacaccccagagggaatttattgggggctcctcgcggtttggtgatagctaactgacaagaaaaaaaaggcccaacccacccaaggcagtccccagggcacccaggcaggcagcactggtcaccatgttcctgctgtgcagtcaactggacccgtcatcctccagctgccagcttcaaccacacacatcccccacccgggcactccctggctcagacacctaaaatgactcccactgatctgggctaagtccaccaacccttgcctgaggctccctggggagaagcagccccatcaggggctggcccagtgacctggggcatgatagctcccagctggtcccaagtcggccactggtctcctgcttgattgctgaccaccagatttcacatgggtccagcctggctggccaggctctccccagctttgacagactaggtccaggcctcccagcctcagtctctgccatctggggcatccttgggagcccaggcctgtagattcagagctgagacacctccaggccctgggtgcctccatggaaggtgtggctggtggcggaagagccacagtgacccagctctaccactcaccaacctcttcagccaagcctttcctctcaaagcctcaggttccccatctatgagataactattttaaaaaattacaagccccacagggctgaggtgggaactgttgggattatatatgtaatgtcacctgacacccagatggagagcataggccagttagtcatagcccagatccagggacccaggaagctacattaccagtgtgtggtgtgtgaaggggaacattggcctctgctccagaaccttctaggggcaggcctgaaaatgccctccaactccgagccccactaagtatcctcctcttggagctgttcggagatgacccactccacagcaggctacagctccagagacggtagcccccctggaaacacccaggctgacctcaagggcagcccacctgcctggagctgcccccttcacaacctgcagcagaaaagaccaggccctgtgctgccagccaaggtctcaccccaagcgtgtgctgggagcctggctgggcctttccaacccacggcaccattcaggatggccctacagatggtttcagactcccccacctctgccctgggcggccccatctgctggcccagctcagattgctgggctcccagctctaccgtggccccaggcagtgtaaggcgatctggctgcccaccagcgctgggccctcacacagcagctgagccagatgggctggggaggcggtgaggaggccttgaggaggagcaggctggggccctgacacaaggatgcaggggaggcggacgcagctgcgggtcctgcttttcccatattggcactgcacatgattgctcagagcggagagacacaagcaaaaatgtgctagtgccaaaatcggccaagcagatggcactggtgcgggctctctggggacacactggacgaggggccttgcatccctgcacccttggaagcagcctgtttccgacgtctaggagcactcaaggcagaagtgggtaaggtgctccggaggccctcgtggatctgtctctgctctgtttatggcccttcggtaattcactgactgagactgttcacagtgaattctaccagtgccatacacagaacaggagtcacactctgcggcctgccgaccctgcggagagaccagcggcccacgatgcccgttccctgctcctagcctgcccactcccttgggggccccccagcaggccctcagcagcggctgctacggtctctaccccccaccccatcccacctcttcacaagatccacatgccccatcagcccaagatgaccttcaaggagacagggacagtgcgggagaggagctgaccttctggccttgcagaggagaagaccacaccaaggtgtctcctatctccacctgaaggcccacatccctccacatcacccagactgcgcctccaggctggggagggagtgggtcaggaccatccatctccttgccagagtaactctggctcggagaggcaagcagctggccagagcctcctctctacccaacctgccacaggggcagtgaccagtgggacatccaagatgcctctcgtagcctctgagcccagacaccagcagcccaggctcctaggcactttggtctccattatcctccaccccccagcctgccctgtggcagaaacagagccccaggaacaaaccgaatctgctgctcacccccactcccatcccaaaccagaccagattgggccagactgtgaaccgcccaggctgggcatctctgctgccggcctaggatcaaggcaggaaaaggccaggaaaggagggcagaagagaagtcctgcagccacccaggtggcttggagggagccggaggcacggatgcactctagcaagggagtggctcctggctggctctggagtgactgcggaggaaagcggaggctcaggagcgagggaggggctgggaaggttgcatcagtggttgccagagcagctgcctagagagaagttgctgtggaggccctgcctctggtgtcacaggccctggggaaggacgggaagaagggagagggtgggagggagggtctctggggagctggcacccagggcaggcaagctggggcctccgcagagtggccactagagtctcagcctactccaggtcagcggtggcccagaaggcagggtggctagaaaatatcctggaagggtcagagcaggtgccctggcccagaaactatgcagacctcttggcgatgttacccccaggaactacctcccgtggacctcagagctccatctgggtaccttggccaaagccatccgctctcccctagacactgcttaatgctccacccttcctgctcccgaggactctttgtcctgctcccacacacccccactacagggctctgcccttctagctggtctatctccccagaggacaatccagcttgatgaggtggtgatctcaggaagtcactcctcagccttctgcctcagtttcccttactacaattttctgaactctactaaggaagagagaccagacttcccagccttgggtggggaggggaaggggtgatggcagggtgttagcaaagagtatggggtgggtagttatgaacattgcttagggtgtagccataagcatcacccaaggagcctgttgaaatgtagattcttgagcctgcctggaaatctgcattttaatagcaccctgacagctcagcatggggtgggggtgggggtgggaagatctattttgagaaatctttcccaagaagcctcaccctgggataattaaacagaatgcagaattcttctttcttctggctgggcgcagtggctcacacctgtaatcccagcgcactttgggagacgggaggatcgcctgaggttagaagctcgagaccagcctggttagcatggtgaaacccccgtctctactaaaaatacaaaaattagccaggcgtggtagcaggcgcccgaagctgaggcaggagaatcgcttgaacccgggaggtggaggttgcagtgagcagagatcgcaccactgcactccagcctgggcaacaacagagcgagattctgtctcaacaacaacaaaaaaaaaaaaaaaaaaaaaaagaattcttcatt

SEQ ID NO: 1882895 - DNA, 4001 bp, Homo sapiens
tgggcatgtctggatgccttttccacgttttatgcctgagaagacactgattatttcagtattttttaagtaaaaaagctgttcctttaaacagccttagccccaaaataagagagttactgaacaattagcaggcgttgagtgttaagcagatgttactggtgcctagaaagcggagaaaaatcagaaaaccaaatattgtcttccttcagcccaaaggtttggagccagaatagtctgacttttttgtctgcttttattttcgaagtgaaagagattgcgtatgcataaagaaataataaatgagtataatttaaagcggccccttctcgactgagatttctgaaactgtgatctctgaaataaatccaatgccctggtccagaaaatggcagggaggagttgaagggaatggggtgtgtggtcctttcagacagcaggtcggtggctgtgcaacgaaagagttcctgggcctccagtccaggcagggaaaggaaacagctttgtgggcacgaatctgtaactgtgtgtgttgggagtagggagagatagtttgttttctgttttctgtagggaaaatggtcagactggctcccatctgtagactacaatttggaacgatgactcaagtttatatcaatggctctggaatttgggattctttttgcccatttaaaacatactggctcttggaagggtccccttctccagcacccagctgcacaaaggtgctgtatggaacatattttgtacctaatggaagccactagtaagcaagcagtcaagctttgccctagccagtctccctcaatgcggtcaaaccccaagctgtgaccggcaggccgggaagagccagctaagagcttcccagcgaatggccaggctccagcgaggctggttgggcctcagctccagtccccagtgaggctggcgaaggcctccctgccctcgatatgggcacacaaagctgcagcgaatgtcccctaatcagatctcctagtcagccgttagcgacaggcgaagaaacgcaaggctgccgccatccggtcgtgatcataaccgaggccttgtctgcagagtaacacaccaggcccaaacccaccgccctcggcagccgccccacgcgggcccttcctcggcagacttcccaacctctacttgagccgcagaggaaagtgagaccccctaggctctcctgaagccagctctgggcccctccccaaggatgctttgggaaggagataaggaggtgagatagaatctggcagagacggaagatgaaaaaaagaccaacggaagaaaagaaagcaggaaggagcaaaggaaagaagaaaaaaagaaagaagagataaaagaggaagggaagacagggaaaagaaggaagaaaagagaggcgactcctagcagcggccgagcttacagagagaagggtaagtgacaaggccaggatcccagcctgccctatccttcctagtccagcctgagtctccactggaaggaggttctttcctgagctcacacccgggactggtgtgtgtgtgtgtgtgtgtgtgtgtgtgtgtgtgtgtgttccagccttacaagagaatggcaggaggtccctgggcaggcgcaggcctccagtgggaggctcaggatggaagcgggcgcccctgaccttgaatggcccaaagcccagaattcctaccacgcccccggcgtccgcgaaggagcagccaacctaaccctacctgctgtgaccaggtggaggtgtgtggtggaaggggaaagccggccggctggcaaagcgctgcggagaaagacacgaggctcctgagcagggaaagccgaggttgccaccgcaggcctggcacgaccagggccgtgatgccccgcccggcccgacccccgcgcgcagaggtacctggagacgatttcaactgaagtaatgaaggcagtgtcgtgctgtcgagagaaaggtggatcccaacaacaggaaactacctaaatcaccgaccagttctggtgctgcccgcgaagggctgcctcgcccgccgccgccgccgcctccgccgctgccgccgccgccaaggagagaaccctgccatcgcgcctggcccggcccagcccagcccctaggcaacctgcgcccgccagtgcaacagagtgccccaggcggccgcaaatgcgtcaaggaaggggaagccacaggccccagtaaggtattcctgggagggagagggaggaaaagagagggaggaaaggcagggagagaggaataaaggcggggagcaggcgagacgagagcagctccgagaagcagtgtgcgcgccgctttcccaaatcttgcagcccagcgagccggcgccaagaggcggtagccgtggaaggctcgaaagcgccagggacggtacagatcccggctccctgtctggccccggcctcccgcctctcgctctccccctctccctcctagctgcccgcccgccggggcgcgcgctcctgcgccccctccccttagcccccgccccccccactctggcaagcaggaaacgcgtggccctaaggagtgccgccaggtgggggaggccgtactgggggagggggaggcccccatgcagtccagcccgggtccacctaaccgctgcctccagcggctagagatgcgctgtgggccaggcctgctccccgattcagattgagggtcatctgtgacccagacacccgcaaaataaccggcctctgcaagcctccctggggctcccgaaagaaatcctgtttggcttcctctgtctatgtagctcccctctcaactgaaatcactggtccaagacagccacaatccagatatactagcaagccataaaactgaacaaaagccgacaaaccttacggcaccagggctatagggcccagacaaattacgaccgtctaggtaatatttaaatagatgcctaaagtaattgcaggggctcgggttagtcctcctgttgtaaaagtggtgaacgggataaagtggaaggtgaagataagaagtcaaaaaagaggtaaaattaaaaagcttcattccacagcttttattctataagaacataaacatcgtctttttccacgcacagcagcaatacaatattaatttattctgatttaagattagaagtaaatagagctagaactaacatttataataacgatagaatgcatttgcttaaaacaagattggcaattcttcataataatagacatttatacagatttgtatttatagtttttttctttttctgcatctacaggtttgacccttttatgcatgtaacttcacagtataaaggaaatccaaacaatgtctcccttctctagtttattccgcttaccccagtcctcctaggcttctgtgaatttcagaaagcaaaaacaaacaaaaaaaaaactttttgttcaaggcgatttaaaaaaacaacttcacaagatagggagaattgtggtgtgcttgtcacatgttaccagtggtaacaattttaatgacaaaaaaatccactaattccaaatgcataaacaaaactacattatttatctacagccagaaggatatggaaatttagaggtaaatgaaacattttagtcaggcaatgtaagaccttacagaaactggaagagaagtccccttctcttggtaattctttttttttctttttaaagctgggatatcttacagaggaaggaaaaattaaccttttttactttctttctcactttttaaatcagccaaagtcaagcccgtttgccaacctgcatgtccatgcctgtaagcccttctcttggccaaggaagaaaggaagaaagaaaaaagaaacccaggggcctgtatcccctgattaaacacagcacagcactccaggcagacatgcccggtggcggctcctttgcaccattgacctcaggccagacacctcagcgccaacaatgggacctcggccttccggctaggtttgccccaggctgggcaggaaaccagctcggcc

SEQ ID NO: 1882896 - DNA, 4001 bp, Homo sapiens
cccagcaatgcaacgacgtggggctcatggcctacctcggcaccatcaccaaaacgtgcaacaccatgaaccagtttgtgaacaagttcaatgtcctctacgaccgacaaggcatcggcaggagaatgcgcgggctctttttctgatgagggtacttgaagggctgatggacaggggtcaggcaactatcccaaaggggagggcactacacttccttgagagaaaccgctgtcattaataaaaggggagcagcccctgagcacccctgctggtggctctgtcctctgttaggcaccacactggttggtcaacttggatgttcatcgaggctcattctggccttgctcagaagcccttctgatgctcttcagtgagggaggcactaccatttgaagtgaccccatgtcagtcacatggactggtctttagcaaagtccaaggctgcctgcttccacctaagtggtctctgttctacactttaatgtcaccctctacatcatcttacctagcccacccaaccttataaacatgataattgactactttcctgagctaaattaacttgtttttcacatacgcaaaaaagaagggatagtaagcagatttttattagaaagaagtccaagccttgatcctgtgggcactgtgaattaccaggagggagagtttctcaatgaccgtttactacatattttggagaggcagctaggaagtggtctaaaggttgggattgctgtatgtgatcacttgtgctgattttcatcacccgctaaccagagctttagagtgggagttgggaactaagtaatgacctgtctgctagaaaaggggaaaaaccaagagaccctgcatttcatactggcgccatatccccagagcctgacttgcacacaggcagtataagaccaaataagggagtcggggggctcaaaaagtggagccccatcttaagtatctccaaacagcagggaccgcttagtccttgccgcatccccagtgtctatactgggggcctggcagggagatgcactttactcaggtaatttactgagtggatgaaatagcataaaaacgaacaggaatctaaaaaacgcacaaaaccctgttttaatggaagtcaggcccaggctagaagatgacaatctacaaacacttttattagcaaaaggagtaagtgcagcatgggagaaagaggggctcctccttcccctcaaaggcatcactgccccttcccaaggggcaggccagcagggaacaagaggaccccagggttgcaagcaggctggaatcagacaaaagtgatccgtgtccgggaagcattgacctgccagacattgagctcctcatattcatccagagccgcctggaactgggcgggtgtgaagccacgagatacacagcgctgctctgcctcagagaaccggacacttcggccccctgagaccagttcacggacggtggcaaatatcacatctgctggtctctgagtcctgaaggaaatgagtgggtgtgtaaggtcaggatacaaacaggaatgctcgacatcaacagagaacaatggtggccagtgttagaattgaggccaacctcagacacatggccacagaagacaaagtgacacagctttgtccttcactaaaccactcacctagctgtctgccccttgtctcctagaagagagtcctttgacatctccattagcctgatggcttcattcacatcttctttctccaccacatccaccattctcagacgtgcctaaggggaaggtaggggggaaagatgggaacgggaggagggcagtggaacgaggtcaggggacacccttgttctggctttaaggctgggcagcccatgggtcgcctactcacaaaacaggagtggaatcccccctccccccagcatccgcagtgttgggccggcactgtcagaccgagacaagtgcaatgcccagggcagcgtccagcaattgcccaagtctccgcctctcaacactggccagtcccggagttcagctgtcctgtgagggagaccagacccttttgaacgccactgggctccccagcatgacagatggagcttggggagctcagccaagaagacaattggcagagagaacgtgtcccgggggctcgggaagtgctagctcagcagtaggttgggtaatcacactacctgcacgaacagcactttggagcccccaggactgaggtccaagacgggaggacagaaaggaaggtctgtagcacaggatctaggacacatggagtgaaacagaccccaaccaccctctcagtgaaggttaagaagtggggaaaaggcctttccctccacggacgctgtgcgtgccctgctggagcagcaagtacccacagtgcggtagcacggagaggaccactatctgcactgtcagcactttagccccggcagggctggagcgggaggtggggaggcggcaatgagagcacggtaaggagctacccctttaagggtcaaaacagatggccctccagcaatttgggcacttaccagagcagtggaaaggcgcaggatagccagcagggtccgggcagaagtataggtggcatccttactagcccaagcctctcgcctcatctccacgtatgctgctgtgatgtagtcagccagagactctggcaccatgggctgcttctcgcggcacatggctatgtaacgcctgtgggggaaggttcatggggaagcagaagagggagatggggaagggagtgaatatgagcccatgttgttttctgtaccagggctccccatttaacatggtcccctccaagaattttaagtggaaaacacaaattagtgggtgattatttgcttggcttgaatatcactgatggatttcaccaaacgtatagcccccaccagtatcctccaagttatttcctatttttttcgggaaaatggcctttgtaagacaaatccgtctgtcattaagagaggatccagacccctcctctgagcgcatgacatggcaaaacatatattttatttaaagagaactgtttacagaatatttaaaagggagtaaaaaccggaaagaacactggaggctcatgggaaaatagcgatagagattatcatccagaatgcctgggagcaggtgttttaaactttaaattttggagtatttgcatatgcatgagatagcttggggatgggactccagtctaaacatgaaattcacctgtatttcatatacaactgatacacataacctgaaggtaattttattaaaaatatttttgtgggccaggagcagtggttcatgcctgtaatcccagcactttgggaggcagaggtgggcatcctggccaacatggtgaaactgctctctactaaaatacaaaaaattaaccaggcgtggtggcgtgcgcctgtaatcccagctactcaggaggctgaggcaggagaatcgcttgaatctgggaggcagaggttgcagagagctgagatcactacactccagcctgggtgacagagcaagacttcgtctcaaaaaaaataaatagtgtaggaaacaaaatttcctgtgtccctatgatatgaagtgtggaattttccacttaaaagctgatctgaggctctggacatgtctgtagcgggaagtggtggtgtgaaaaacacacaccctaagactaataagcactttttcaggaggctcgcacggcccacgccaacgtttgcccacccgcacccagctctcctacctcatgagcttcatgtccagaggttcaaactgggaggggggctgccggctgtgctggtgcacataggtgatgtgctgggccaacctggacagagggaaggttagaaggaacaccctttttagggctacgcacccatgtcctcttaggtgtccctcctttggctctgccacttcctcacagtgtaggagggacaagctttcccgggaaatcctcatcagcatttcagccccaacccaccatttccctgagaaccatgga

SEQ ID NO: 1882897 - DNA, 4001 bp, Homo sapiens
ttggggagaaggcaatgtggatggctttggtatatgcctagtgttccattattggaatgctaagcatgtgggagttgtctcctactgctcaaggtcattgccaaggtctgatggcaaaaattcaaaaaattgcaacctcaagcataaatggattaaattgagacaagtttagaagagcaggctgaactattatacttaggagctactaaaaatataaaaagcaagatgtctcaaaaaatatcccaggccagacctctggtttgagggaaatcaacacatagggatgtatttggaaccaggggagtaaataagattacttagggaaaacagcgaataggtaagaaagcaaaagacaagagttttgggaaaataataaccatgggatagaaaaagatgtggtggaatgatcctgattctcgttggatttgtgtggtagacagaatgttttggctacaaattgcatgtgttagccccgaggagaaaaggccttttccagacaagtgacaggcaggagggaaaaggagggaggcagtgtgagagggcgggaaagcttaagcagggtagatagaatattaactcttgattgtgaggccagtggcttttccaggccagaaagaaaacagaaggacaaggcccaaattccaccaggtgcccctgcagttctccaggacgccacatggggacagcaggtggccggtctgtgcagtacctgtgttgggagctgcacacaggggcccctggaggaggagcggccgagatggctcattcttgagccttttattttattttattatttttatattttattattatactttaagttctagcatacatgtgcttatacccaaaggattataaatcatgctgctataaagagccttttatttttgcctcttagtggacctaaaaactcagtattgtttttggtctaatgacttcacttctagtgaggttgtgttagtccgttttgcgctgctataaagacatacccgagactgggtaatttatatagtaaagaggtttatttggcttacagttttgcagccgtacaagcatggcactggtacctgctcggctcctgatgaggcctcaggatgttttatacatggtggaaggcggagagggagcagacatgtcacatggcgagagagggagcaagaaagaaagagcaagagagaggaaggaggtgccagcttttttaaacaaccggctccctctaactgagcaggaactcgttaagtgaggacatcaccaagccattcacaagggatccgccccatcactcaaccacccccaccaggccccacccccaatactggggatcacacttcaacatgagattggaggggacaaacatccaaaccatatcaaaggtatactctaggatcctagttcaagtagcacctgcttttgttgctttgccttctaaactgaactgacacatattagcacagttctgtctcagccatagaaacccagtttctctggaccatttttccttatgtaagaaaatgacctgtttaaccatggagggaactcctcagccagctaagagaggagagttcagagatagctggtgcagcttctcatcaacaacagaattgactccctcgctgctcctttcccatcatctaagccagtcatcgattttccccaggagtgtttctaggtatccgtcaccaaaacaaaacccccaccaagtctatggaatttctataaagtataaccattcatgatatgctaatagtgaaccatttgttagtattataccacatgcaattcaggtcagtgaaattcaacttagaaactggaagaagaaaaatcacctttgcattattgctttgcatttgttttcttagttcttgtccatggccccaacggtcaccaatacatttcctctcagcagtcagcatcatggtgctcttccccaatcattataaccgatttcagatggtgctagaaaattatattgactctgaacaccaaaagaaatcagtcatcctctaaggggtcacagaaggtcgtgagggttgggagggcccaaatcttactaaatccagcatacattgggctctttaacccaggcacaatggaatgagtctgtactatctattaagtgctataggtttattccacaaagaagtataaaattccaacaatgcgatatcctgtacaattacattcatcccttggtatccttgagggattggttccagaaagccccttggataccaaaatccacagatgctcaagtctctgatagaaaatggtgtagtatttgcatacaacctacacacatcctcccgtatactttaaatcgtctctagattacttagaatacttaatgcaatgcaaatgtatgcaaataattgttatgcagtattgttagagaataatgacaagaagaaagtctgttcatgttcaatacagacacaacttatttttggaaaactttcgatcacagttggatccgccagtgcagagacctgactgccatttgtgatatatgccaccactgttggcaggggtgaggaaggggtcagctacatgtgaggcaggttctcacagccatcctgctgttgctttcaaatacttcagagctgtcccattcacttcttttgctgttggtagtgcagcgcagctggtctcccccaagaacactgatttcaaatggtgctagacaatcactatttaaatctaaaccaccatatgaaaccagcttcctgaagaagctttatgatctatttttttcttcataatgctctcttacaataaacccaagacaacctagaaaggaaaagttgaaacctagctgtgagttactcagtggtctaaacagagctttggcaaatttcatatattcataaactgatgtcactgaatttgttattgatgggagagcatgcctgggactcccttattcttaagttaagttgcccagacaaaggttcagcttcatcatttagaggcaagggcacatgtcagccccgtcactcttgggtgggaagacaaggaaaatcctttgcttgggtaaaggcaggagaagtcagaggcatcctgtgatcaagtacccaggcaggcggaggacgactagcagtggtgctggagaaccgtccgtcggacatgcaaataggacaaagcaagcaagtgctccatagaagttgaagaaaaacgctttcctaaacctattattttcacttggagataacttggatccaaaggattactgagattttggggtctagggaagaaaatagactagctcagaggccaagtaagtcacataatggcactaatgagatgctaatgtcgcttccggaatgaattccttagactgcatctatgagttaggggtttttgtgagctttacttaagactctccttccctctactccaaaggtaaggctttgtactctgagttctccttggcaaattattttttgcagcagttctttttcgccgtcatggtatagttcttggtatcatcttattaggtggcctgttgtcgtccctttttgtgttctaggcatccaaaaagatacttcatgtacccaggccacctaattaaaggggtgtgcactgtttttataaactgttataaaaaattttatacattaaattggaatgacaatacaatgaattcctaaatccatactatctaaattcaataactattcctttttatcatgttttgctttaattatatgtaatatagatacatattttttgctgcattgtttgaaagtaaattgataaccacccatacatacactgctcctaactactttgaggtcgttctataaaatgaagacactcttctacataaccacaaaatcttaccatacctaagaaaacaaacaattccttggtacccacaaatatccagcctacatccaacttctcccactttctccaaacaaaaggttttttataggtttttcaaacccagatcgcatcaaggttgattcactaagactctttggtctcttttagcctcaaaa

SEQ ID NO: 1882898 - DNA, 4001 bp, Homo sapiens
aggggcccctggaggaggagcggccgagatggctcattcttgagccttttattttattttattatttttatattttattattatactttaagttctagcatacatgtgcttatacccaaaggattataaatcatgctgctataaagagccttttatttttgcctcttagtggacctaaaaactcagtattgtttttggtctaatgacttcacttctagtgaggttgtgttagtccgttttgcgctgctataaagacatacccgagactgggtaatttatatagtaaagaggtttatttggcttacagttttgcagccgtacaagcatggcactggtacctgctcggctcctgatgaggcctcaggatgttttatacatggtggaaggcggagagggagcagacatgtcacatggcgagagagggagcaagaaagaaagagcaagagagaggaaggaggtgccagcttttttaaacaaccggctccctctaactgagcaggaactcgttaagtgaggacatcaccaagccattcacaagggatccgccccatcactcaaccacccccaccaggccccacccccaatactggggatcacacttcaacatgagattggaggggacaaacatccaaaccatatcaaaggtatactctaggatcctagttcaagtagcacctgcttttgttgctttgccttctaaactgaactgacacatattagcacagttctgtctcagccatagaaacccagtttctctggaccatttttccttatgtaagaaaatgacctgtttaaccatggagggaactcctcagccagctaagagaggagagttcagagatagctggtgcagcttctcatcaacaacagaattgactccctcgctgctcctttcccatcatctaagccagtcatcgattttccccaggagtgtttctaggtatccgtcaccaaaacaaaacccccaccaagtctatggaatttctataaagtataaccattcatgatatgctaatagtgaaccatttgttagtattataccacatgcaattcaggtcagtgaaattcaacttagaaactggaagaagaaaaatcacctttgcattattgctttgcatttgttttcttagttcttgtccatggccccaacggtcaccaatacatttcctctcagcagtcagcatcatggtgctcttccccaatcattataaccgatttcagatggtgctagaaaattatattgactctgaacaccaaaagaaatcagtcatcctctaaggggtcacagaaggtcgtgagggttgggagggcccaaatcttactaaatccagcatacattgggctctttaacccaggcacaatggaatgagtctgtactatctattaagtgctataggtttattccacaaagaagtataaaattccaacaatgcgatatcctgtacaattacattcatcccttggtatccttgagggattggttccagaaagccccttggataccaaaatccacagatgctcaagtctctgatagaaaatggtgtagtatttgcatacaacctacacacatcctcccgtatactttaaatcgtctctagattacttagaatacttaatgcaatgcaaatgtatgcaaataattgttatgcagtattgttagagaataatgacaagaagaaagtctgttcatgttcaatacagacacaacttatttttggaaaactttcgatcacagttggatccgccagtgcagagacctgactgccatttgtgatatatgccaccactgttggcaggggtgaggaaggggtcagctacatgtgaggcaggttctcacagccatcctgctgttgctttcaaatacttcagagctgtcccattcacttcttttgctgttggtagtgcagcgcagctggtctcccccaagaacactgatttcaaatggtgctagacaatcactatttaaatctaaaccaccatatgaaaccagcttcctgaagaagctttatgatctatttttttcttcataatgctctcttacaataaacccaagacaacctagaaaggaaaagttgaaacctagctgtgagttactcagtggtctaaacagagctttggcaaatttcatatattcataaactgatgtcactgaatttgttattgatgggagagcatgcctgggactcccttattcttaagttaagttgcccagacaaaggttcagcttcatcatttagaggcaagggcacatgtcagccccgtcactcttgggtgggaagacaaggaaaatcctttgcttgggtaaaggcaggagaagtcagaggcatcctgtgatcaagtacccaggcaggcggaggacgactagcagtggtgctggagaaccgtccgtcggacatgcaaataggacaaagcaagcaagtgctccatagaagttgaagaaaaacgctttcctaaacctattattttcacttggagataacttggatccaaaggattactgagattttggggtctagggaagaaaatagactagctcagaggccaagtaagtcacataatggcactaatgagatgctaatgtcgcttccggaatgaattccttagactgcatctatgagttaggggtttttgtgagctttacttaagactctccttccctctactccaaaggtaaggctttgtactctgagttctccttggcaaattattttttgcagcagttctttttcgccgtcatggtatagttcttggtatcatcttattaggtggcctgttgtcgtccctttttgtgttctaggcatccaaaaagatacttcatgtacccaggccacctaattaaaggggtgtgcactgtttttataaactgttataaaaaattttatacattaaattggaatgacaatacaatgaattcctaaatccatactatctaaattcaataactattcctttttatcatgttttgctttaattatatgtaatatagatacatattttttgctgcattgtttgaaagtaaattgataaccacccatacatacactgctcctaactactttgaggtcgttctataaaatgaagacactcttctacataaccacaaaatcttaccatacctaagaaaacaaacaattccttggtacccacaaatatccagcctacatccaacttctcccactttctccaaacaaaaggttttttataggtttttcaaacccagatcgcatcaaggttgattcactaagactctttggtctcttttagcctcaaaacactacccaaccttttctttggcttgttttatcatgacataccaccttgtgaaaaccaggctccaatcctggctgtaccattcacttagtctgttcccttggcttgtatttaagaactgaactttagtttctccgtctgactttcctcatatatcatcctcattttacaatctcactatgtgtattagaagaacatccaattaccacgtgcctgtggttgatgattccaagtgggttcagtgctaatcagtcaggaggtgcactgcaggctgtttaccttgggtctgattagcataacattcttgttcctcatgggcttggccagttatcttttcataaggagatcccagcacaaactcatcctttatcatcatggagaagcatccacagcacatacctattgctgctaggctggtttttaaaaaaaatctctgtgaataagggaatagaacaccagggctatggagatgcgtggcaatcatttcatcaaagatgtaaacagcttgttgactgcagtgaaaggcacatactttgtgaagtgacaggcagtgacacatttcaagtggatagtaaatttaagcaccaaaactgggaaaagtgccaggacagaagaatcactgcaactctcaaataatggtttcactaattctgtgattcctttagggaccccctgcatccttctgtatatgctactctaattcgcagtatcagtgactgaagtacaaaaga

SEQ ID NO: 1882899 - DNA, 4001 bp, Homo sapiens
tcaccaaatattaataataataattgaaggaaaagtgggtggtcaaaaatatttgaggagtggatcttgtagtaggtagattaaaagggatatttttcatttcatactttttctacaatctgttatttccatgtacatgtatatatgttatttccgtgtatgtgtgtgtgtatttttacagacagggtctcactgttgcctaggctggaatgcattggcgcaatcatagctcactgcagccttgaacccctgggctcaggtgatcctcctaccccagcctcctgagtaactgggactacagatgcatgccaccatgactggctaattttttattttgtgtagagatgaggtctcactatgttgcccacgttggtcttaaactcctggcctcaagtgatcctcctgcctcagcttcccaaaatgctgtgattgtaggtgtgagccactgtggctggcctacatgtttatatttaaaataataatttacacaaagtagatgaaagttaagtttgttaatttccaaatacaaatctactgccaactttagtagtccagttataagatcccagtttaacaggcaaaggatactacttgtattaatttgatattgaaaaatgaaaaaaattggaagtgtcttgtgggttttgtcatggttaaattgatctatatttttatgaacaatatcaagggttaacagttctgatctattaaaatatttatcagctaaggaaaagaacatatacacacacatacaagtatacatacgaacatgtgtatacacacagagaactgctggaggaagagaggagaaagtaaagagtaaaaaaggatctatttcagcagattttgtatcaatatctgcatttccagcttatgaaaaactggaagacctttcccacagagcttccatttccaaggcacagactggctgccctgtcctctgtcattgataaattttcattactgcctggcccatttgaattcctgtttcatatactgctatattctttgaatcctttataaagaaatagtatttgtgtagaattgagaacttttgaaataataatgataattgatttttttgcccttaaaatcattctgctactatgaaaagaataaagtggatgggacatatatcgtgtgcatgtatgtgttttaggaggatattcaaaaacttacctacgtttgaatgatacaaattaatttttccttaaaaataatatttatttactcacaatagcaatttatttgagtcccaaggtatatattatctcttaaaatgttccaagttacataattatagaattatacaaagggagctagaaaaaagtgatacacataccataagcttctgccctggttcagggcagaaaataacaaaatcggcttcaatgttaagatgaatgtgtccttgatcatcataaatatctccaagctctcccacaactttgatgttatcatatgcaatagggacacctaaaaggctgtaaaaagaaaaagttgaaaatgataccttttatcgtcttttatttatttatgtttttggagacagggtcttgctctgtcacccaggatagggtgcagtgacatcaacagggctcactgcagcctcgacctcctgggctcaattgatccttctgcctcagcctcccaaagtgctgagattataggtgtgcaccactgcactctttcaaaccaggccattttcatactgattagatattctatccaaaacttacacatctcctaaatacaccacctatgtcaaaaacaatagtatatgattagtctgtaacaactttagtagtcccatttcaccaatggattctgatgtgttggctaagttaaaatgatgactcaagatacacagaaacaaaatgcccaattaatgcattagcagtaaatcaactcttcttccctggccaagtcccattctttctatcctagcatgactatttgaattcttcaagttatactaggatagaaagaagggacttagcaaagaaaatgtgtatctctgtggacatgactgaataagaggcaattttggtattattcaccattactgaatttcagtacttgacggcgtataacaagggaagcattacggttaaagctgaagcccctgaattttaaagtcaatgacttaatagagaaaatcccaaacttcaactgttgatagtaaatgcaaatgttaatacaactacattatttaggaactgactgacactttagtctacaaatgtaacagtcatgattaagggacaactatttttcaaactgttatttcttagcttttaaggaattataactattaaggagaaagacctagtggtgggaggcggagggtgtggtgagctgagatctcagcactgcactccagcctgagcgacagagggagactccatctcaaacaaaggaacaaaaaacaacaaaacaaacaaaacctggtggcttcattaccacacccactacttgttggagaaaacttccctgactcccccaggcaaagctgaaatcattcctctactcctataggccaactttctcactgttcttaatctaattgtattgaacctatctgtatatatgtttgaatttcacacatgactctaaggcctttgatagcaaagaatattttttgttgaactcaaacttctaacaattcacataaaataagggaaagaatttatccctaacagatgttgtttagtaaaacagccagaagccacagaaaatacactttaagaattaccaaattaggaaaaccctaactcagagacttactcgggaaagcaattttctgaggttttaatttccgcatgtggcattcctaagctggaatcatcctatcactaagacaatgttagggacacagaaaacagagaataggaagaaaaattaactgccatactagacagaaaaacaaattatcaagactttatttccgctaatcaaagccttgtctctcaagtatcagagtgattctcaaggggaaggagggctgtggtcccctggtggaaggggggacatgtggaaatttgtgatactagtcatggttatcacaaactttgcagaagccagggaagaaaagagtctgtcatgtacaggacagtctgatacaatgaggaaatgtccttcgctctgacttttgaataaaaggacaaatctatttacaaatagctaggcacctaatttaactcttaaaacacatcaacacaaagtcatctttgcacagttttaatatatattaaaattttcaggaacttagcagtatataaattcaagggggattttgttaaaagtcatcagatatgtgaacacaggcacccaacactatatactttttcctccttcacttttgtttttcagataccatcctaaataggtatcagggcaaggtggtagcctcacttcagttctttaatactatatgttcaatgttttgtcccttattagtaatgcatagttcaaagtgtggtgcctgatttgcacttgaataaacagcatacccaagtaatatggaaggagtggtgtccagatctgttcagagccactctgcgtgatttccccctctagcctgtcaagtgcaggcagtactggttacagaaaacaagatagttgcttgtgtttccaaatgttatgactactttgtatatcctttaatttctcaaatccatcctctctaatcattttctcttggacaattataacattatcttaattcctctccttgtccactttctcatcctatttggtagctaaccattaagtaaatgttgtttcttaaactgcaaatctgatatgccagggactgcagagaagtactagtttctcaaaagtgtgccaagtctcagcgttaaagggactgagaggacggagcactaaccctgcttaagaaaacagaaacacaaaaggaaaaacaacaacaaccccaccttacccccaaaataacaaaaactggcaatggcaggaagggaaaagcaaaatggccatcctct

SEQ ID NO: 1882900 - DNA, 4001 bp, Homo sapiens
taaattcacaaagataattaaaaatgactgttactgttactgtaagggtccacattactttttaaaaaagaaaaaaaaaacagcatcagacttcaaaatacacaaaaggaataatgtccatgtgtccaaagatgagatgatcagcttttgaagcagcctgaggtgcatgagaatgagatctatccctaactagaactcttcacagctccactggaagaggacacacacagggccccaagaagctaagtgcatggccagtgtagagtgactggtgtagtgagggtggaatccccaaagaccctctgaaatgcagttacacaacaggctcccaggaaacactggaccaaaccaggcagctgagcagatactaccaggaatggggtgagcagaggagggtcagagccacaaatctcagcagaatacaccaaactgcaaggagctcctggctctgtgaacagcagctgtggctgcatcaggaccaatcttgtgaggcagctgctggggacagctgagatcacgtgtttttgcagccacccacccaacagcagtgcctcttgaacacagatcacaaaatcctctccattcatctttaaggtgacggatgatggatgaactcacattacaacatccccaccaacacttgcggacgagtgtatttagaaactcccacctaaagagggaacagtcaagagtagaatgagaatattgagggatgggggaagaatgcaggtacttgaccccacaaactctactgaaaacaagggaagagctgttatgctgtggtctccctatacttcacctcaccacatccatagatgccacatggttcttgttcctttattgacaaaggtgctgatgagcccgtgtgtaattgatcctgaaggagtaaattcttcacaaagtacaataacagtgtctaatatccatgaccagagtttttaggcttttttaaaatagtaatccgcattcaggaatcagaaatgaagcctgttggaatgtgtgatatgaacaaggtcttatttttatgtagattaacaccttggtttttacggattaaacacaaaagcataaaagctggagccattccagaatcaaaggaactttccctgaggacacctggaattaagggacatcaattattaggaagctacacgaaaccagaagtgctcccagaagtttccattgtctggacagaaaaattaaacagatcagcccgagagagtaaaggtacctccgtgagtgccgggggtgatgaacattccattcaaagcaaagttgtgaagcctgaggagtttcaaagactccccaagtgctctataccttgaaagtcgctcacacaaagctggagcaccacctgttcctgagaatcaggttgccattgtgtctttgagacactgcccagtcaggcctcggttgagatgaggccaatgatgtcacgtgtaaaatgcctaaactatcttcatctttaggtagctatttggggaactttccaccaaatgggttgggggaaaatggcgcaccagagacacacgcctgggatgtgagattttctcttctgctgttagcatctcctgggtaaaccaataatgaccctctctgccacctcaacatccacatccgcgaaaaaggcgctggtgagggtgacattttcatgaagccacagagcatgttgccccacgcaaagctctgaacttgtgcactggcgggccgggcggcggatttctccccatagcggctgcactgcgctctggctggagagaaaagagggcagcggcacagtggacagtgcctggaccgcaggccagttcccacagcagcttaggaaagcaggtggctccctgggctggaggaggcgtgatgtccaggaaagaccccgggtgcaggtgggagagggaacccagcctagcagcgggaagtgaggtgaggaccacacccgtccgagttggacaagggcgaggtgcacttcgcggcgtcacaccctcctcactgcccaacccggacctgcccctcctgtccctctccggactcacatcccatggcaaggaggtgtccgaaatcagtagccagcatcgctgtggaagcggcgagatccacactgccctgcccaaccctcttgggctgcccgccttctcgcatatcgcctgctaggattctagtccagccgccttgccaccaacgggcggggaaccgttaagagctacagtttccagcctgcgtggccaggagcgcaccgccccgctcctcccgcaagaactgcgccccgcccctgagaccggggcatgctgggattgcagtcccgaagcgcttgaaacaacgggcgggagcggtgaagagactacagctcccagcatgcagagccaggccggcagagccaggccggcacagcccggcttcccccttcaggactgcgcgccgccccatgttcatgctggctgggattgtaatccggtcgccctgcaattaaaaaactggaagctaatcaaagatgacaagtcccagtatgccaggcgtagctcccgccctccaatccacaccttcccgagtccagagcagttctgccatgccaaaggggagcctggttgttcccgaacctctcttgcctgccaagtgacagcgagaccaggcggcttgtcttatcgtgtaattatgtcactacctctccctgagatgctggcttcatgcttcgtcattgccagaagtttgatttctcacggagcagcaggggacctggagctactcgcaaagctgtcacggttgccatatcttggagcagtactcgccccgccccttctcctcgccccgctccttccctctgcgctgcctctcccctcggcaccgcccctccgtctcgccccacccctgacacgccccctttgaacatgcgcagtgtagtccctgcgtaggacgggctaatcgccaggtgtctgactgttctccgacttcttggcatcctacgcgggaagctccctcgtgagtgtctgaaaccgtccgttcgctgccagaaatggatatatgcgttccctgataacctagcacttgccttttcaaagccaccatttcctctatcctctaggctgtcgcaaatcctcctgttcatcccaggagtgccccttggaccccgggctggctgcatgacccacacctgggtcaggcctctcacagggacgctcctgccactctgacaaagagttgaaaacgtcacagcgaaaggcctgaccctgctgcatccagtcaggaaacagccacagggaagggagcccctaagacactttgggagccacatccaccgcttctctgcccccgatccaggctggttcccagaccttggggtcctagtgtggacctcccggccgtaattaacgcaggtgcagggccagagagccccttggtccctcccaacacataagggaagtttgtgtggtgaggtcatgaacagtgtctgcgtttctgctgtgaataggaccttcatggaaacacttaatttccctttttaaatatccctttggaaccacgtttaataatttgctggtggaacttaacagtgataattctttgaatccatttttcttttttctttttttgacacggagtctcactctgtagcccaggctggagtgcagtgactgactcgatctgggctcactgaaacctccgcctcctgggttcaagcaattgttctgccccagcctccccagtagttgaaattacagacacccgccaccttgccgggctaatttttgtatttttagtacagatggggtttcgccatgttggccagtctggtctcgaactcctgatctcaagtgatccgcccgtctcagcctctcaaagtgctgggattgcaggcgtgagccactgtgcccggcctgaatccattttaacatttagttttccagattaactcgaagtaccccacgactacacgctaatgaaactagaggaggcacagcctcagctccgtgcaggagggacgcacaagagcagaatctccgtgggacatc

SEQ ID NO: 1882901 - DNA, 4001 bp, Homo sapiens
ggatgaagtcatgaggacagctctctctgccagcctgaccctcatagtctgcgtctgcccccacaccccatcaccagccccacataggtgctgcttaccggtttgtcactgaagccaaagcctaagaaatcaagggcaatcacccgatgaaacctcaaggtcagaccttcccaaatctacaagaaagaaacgatgatttgggctttctgctcctgcccctccctttcaccagacctacagttgcacaggagcttcagccctatcttggcttaacagacttccataaagagaaaacgccatgaaactaccacaggtcccacagatgatcctcttggaaaatgctttattcctggtaattaatccctgttgagggagggtaacttggcagtgatcccttccagagtgccaaggagttgtttattcccttcagtaaataaggaacagttcaacatttaatgtttttttaaaagcaattcaaatgtgcaagagccttctggtgctgacaacaaaatccttgaggttttttaaatttttattaaaaaaaaatttttttttgagacagactctcgctctgtcacctaggctgaagtgcagtggtgcaatctcagctcactgcaacctctgcctcccgggttcaagcgattctcctgcctcagcctcccaagtagctgggattacaggcttgtgccaccatgcctggccaatttttatacttttagtagagatggggttttgccatgttggcctggctggtctcaaactcctgacctcaggtcatcctcccacctcagcctcccaaagtgctaggatttgagcccccgcgcccggccgagattttttaagacatagtaggacgtagaagtctgacttcattaccttgtaccagtcgtagctggatgttggaaaaccgtgtaaaagcacaactatctctggacttccaaccacacccacagagtctaggaagaaggaaagtacaatcaattatgccaaatccctataaaaataacctcgaagatgttaaaatctaagtaatctgatacaaagaacaagcaactgtgaccaaattgacattaaaatgacacaattatttgtaaaatgtaagcttaactgcgttaggtgagaacaggccttttctcctttcaatctgtatattaaaacattgtaaaaatcatgctatgtgaaaatacttgaaggcaccttgtttactttcacctaggtgtttttaaacagcatctccccatttctccttttgttctgtaatatgcaaattttttcagtgaaaagtaaattttcagttaaaagcatatgatcacaacacataaactacaaattctttgtactttatcatgaatggcctcacagaaattctctaagatacagcaactattcccaaggaacacctttagcttatgctgtttgctcagcactttttattcagcaggagacccaatctaacatcaaaaacataataaaactattacaaaatcctgtcaactataaaaagggcttaatcaacataaacatgaacttttttaatgcatatgacaatatggaagcattcagcatcatctaaattaggtaaacatttagacaatattaaccttgctaatagtatgggattagaacaggtatattcatatactgccagtgacatgaaaatttggtaataaggttttcaaaaataatttagaagcagttaaaaattgtatatactttagcctaagagttttgttcttgagaatctgtgcaaataaaatcattccatttatacaagtagtatagtttgaaaatgtaaggaaaaaataaactgtatggacatgaagcttttacttcaacattagttttctaaaacagtaaaactggaagtaacccaagccaacataataaaaattgtatacttacttaattgaatatagcaaatgagaggaggtcaggagcaataatgaaaaacggtttatgacaaacatttttcgttattgctcttgacccccgctcaaaacaaatcatttccaatctgtttctcagtttcttcacctataaaatgaggttaatggcacctatctccaaatgctgttgtaaagattaaacaatgaaggctgaaaacataactcagtgcctggcatatggtaattacttgataagtagtggtcataataatcatcatcactagcaaattaatttatataatggtatcaagacttaaatcacagttacactacaaataatctacagaaaaaatgaaatcagggatggtaaggagagagaaccaatggtggttatatctattaatattttatatattacctgacaggttgctcaaaaaaaaaaaaaaactaatattggaatacatatcaagctacaaagaaaacttatactaaaaggtaaggtctgcaggttggaatctcagtccctacccccattctcccagcagttttctgcgcttctctgcaagcacactacacagaaagagagagagatactctcctccatcattaaggagcaacaagagaccaatagccacaaaataaatacctcagctgggacttatgtgaccgatacacgcaggacttccaatagtccacttcttaccttggtagaagatacgcagtcccttgtaagtgaaaaacttgcctgaagacttccatgagtgaagggcaggggagagctgagggggtgggatgtgcaggtacgcagcaagcaggggcacggccagcagccccacctggacccaccactccctcatcctgtaggaaaagcagagacccactgtaagcagtcaggtaacattgtccactcatctacaaaccaaaacctggtaagatggggtgggagattgctgttaccatgcaatgattacattgcccttcacataggcacaaagctgaccgagactataatcaaacctctgtctgccatagcactcaccatatttgttcatcattctaatcttaaggaaaaaaaatacattatttcaacatataatcttctgcctctgctccccgactttaaccccttagcccctacccttgtggtcttcccaatacctgctgaagaggactttatataaataaaagggacatgacttaaatgctggacactctttcgttgacttttatcaaggcttcccaggaaaaaaataacttctttcttatttactccaaaagctctaccatctacccactacccccaaccagtaaaatgttcaaaaaatatatatgtgctatatctcatgttttaaagagtgtgtgtgtgtagtaacttatcacatgtcctcaagcagagagctactcctgattttcagccctcctgcctaaatgaagccccatttagtactcctttctggatttgggctgagaaactgctcagggtaaacagtctgtgaaagtaagatagctgcactgtgtattccaacataagcagctttgtcatgaccctgaatatctaatctcttgagaggtcaaggcggtagattacatttctgcttttcttagcagactctttaagtttccatttaatttcctaagatgctcccccacccccagataaggcataactcatacccagcgtgtgagaattgattttgtctttggaaaaagagcactggttggtacacccaaccctcccatgcccaggacttcaaaggcacaagtcagtttatccacattgacaaggagtgccaaacaggaattataaaccgttctgtttcaagtctatgacttctgatggtcaacagatcaagaattgtcagtagaatggaagttctctcaaaacagccagaatggaaataataccctccaaaactaaaattagagttgtcatagagctgaaataaattaattgctaaagccctgggggaaatggctttccgtctgtacacacattcttccctattgcctgtaatctacctacccgttcgctaacttcctcaacttacaagatacttttcccccccatatccctgatactttttgctaaaatctaaaaacaagcctgtggtttta

SEQ ID NO: 1882902 - DNA, 4001 bp, Homo sapiens
caggttggggacctcccagcagggcctccaggctggggaccttcaggcaggcacctccaggctggggacctcgcagcagggaactccaggttgggaacctccaggctggagacattccagtagggaccttctggttggggatcaccaggttaagaacctccaggttggggacctccagactggggacctcccagcacggacccccaggttgggaacctccaggctgaggatctcccagcagggacctctagtgtggacctccaggctggcacccatggggcaggtttctttcttcttccccagaagccttttcatcgtggcagtaggacctgaccttgacagagatgatattgcggatttcagtgactgaaccagagtcggaagctgaagggctctgcccagccttcctgtcttcatccattaagtctgatcggcagtggtggccacctgggctgctgctttgacaagatgccagtagttggagctgggaccccagggagcactgtccatccaccgcacaggagtagggcttcagcagctgtcagtcatcaatcatttccccatgctgttggatgggagagggacaatctgccagccccagtgtgactggctttgctgccaccgcagtgccctctgggaaccccggcaggtcggctggaggcaggacaccacccccctaacccctccctacttgtcaccagacagaaaccacagctcaccaacaaccatacacaaacagcgcactaaaagaaagcatgcggcaaaaatacccgcccagcgagaactgtgcctggcacagggaaacacactgggatgcgcgcccttccgcggggcgaggctgggttttggggtataaactgagtcctggggagcaggagcctgaggggcacccagggcagctccctcggcctgggtcacaaggttcgatcctccgcgggggtggcaggaaagcccaagtccctcggcacacccaggtgacagcgatgacggcccacaggcgtggcgcctgggccacatcggacaggccatgtcctggagcactcgaggccccctggacagggcaaccaaccctgagtccaccggagtctgctcgcagaccaccaggagccccgctgcactgttcgtgagccacggtggtgacggcagctcaggagggaaggaccagaagcctggccccgtcccacgaggacagacgcaggcctgcggggaggcatgtccccacccacgggcgcctcctggaccacgagctcctctttctcctgcatcgcctcagaccccacccaggggttccaaggtcaggagcctggtcccacgtcccacagccctctcatggggcacccgtacggattctgttccaatttaaagaaaaccttaatcagatttgtcacctcaattattagaatcccacggcgttaactcacagtagtaaactgctttttctgagaaacaagagttttttaaattaagccttttattttaacgcaatcgcaggtgacggccgtcgtgagggaacacgggacgcccacgtgccctccaccacctcctcccacggcaaccctcgcagagtagccaggaccacattcggatccggactctgaaatgacagtcccacaaccaacagcatcgatgtggtcttcttaatgatcagaaacacacaggggattaatttactcttattctgcaaaataaacaagctctcaaattctttaaaggtgaatcccccccaaccgtcctccctccccagttacttcctccctaggacaccagtggaacatcccatgctctcccccttccatgttgataccgaataaaacacactgcatcagaagacccacgcatacgagtccaggggctgctacaaagcgcggcgacgtctccgcggcgagctggccactccatggtcccggcgcagacactggggcaggcgccggctctgtcgtcgaggcgctcacaggcaggcacacgtgagctcctggaggacagggagagcggccgccccgcccctgcggagcacaggacgcttcctgccacccctgcagagcatgggacgcttcctgccatggtgccgtggcaatgggtggcacctgcctgtggccccttctcagaaggacgttttaaacgcgtgaggtctgatgcacagccacagggagacacagacgagcagatgtgggcatccgagtatttacaaggtctggtggctcctgcagccgcgacacgggctgagcgcaagtgatgtgtgaggtgtccccaacagatggcacggggagcgcccacacccgccaccgcggggtctgcggaagctcgtgtcagctggaggttagggaagacgcacaggggctcattctccacccaggttcaaactccctgaactcacgagacccaggctgaagacatggacagactcccagccccagcgcccctctgacagcacacccgaggcctcctgggaacctgggaccccttgcagggtcccccgcaggctccttcctaggaaggaggttcctgccctactccacatttctctccatccaacttccaactccttcccactgggccctggagaacatgacgaagactgtgggggcctcctcccaggaaacacacacacacacacacacacacacacacacacacacacacacacacacacaccagcaacgcgcccagaccccaatccctggcagcccaactcctcgttctacagagaaggggtgaggatctccaggggtgactgctcacatctcggcacatgtagaaggcagggctggagcagcggcccctgcagcccaggccaggggactggaggcccttccacagcagccctttccttttgatacacggtcttgctctgtggcccaggctggactgcagcggcaccatcacagtttactgcagcctcgacctcctgggctcaagcaatcctcccacctcagcctcccaagcaaccaggactataggcatgtgccaccatgcctggccagtttttaaattttttatagagataggaccaaggctgctctcacactcctgagctaaagtgatcctccttgccggcctcccaaagtgctgggattataggcatgagttttcaaactcctgggccacagcgatccttccggccagcctcaaagtgctgggattataggtgtgagcccacggtgcacagcccccactttcttcctaaaaaccctgcagcttggctgacagtgggacctgcctccctactcccgcctgcaggagctcagaagcctcagctcaagaggagcccttgccagagacgtgggaccaggaatgggccccacagagccctgcccgtgggcttcctaaacagcctgagttcagctgcacacaccaacgatgtaggcgggttgcaataaacagcaagaaacggacccatgggacaggagagacgcaggagccccaggggacaagagagacgcagaagccccaggtgcctttggtggccagtgctgaatttcgcaagcaacattagaaactttttatttctgcttttctcttaacccaagggtgaaaatggaaacctgtggtgtggggcagtctgctgaacgctaggatgagggcggggaacaagagccaccctccccgctgccacctggcccacaagagccttcccaggggctctccagtttcagcccctccttgccgagccagacagcgctgctggcctggacgggagggacacccaggctgactgagtgggggagcactttttataaagatcagatcaggtttctgaaaacaaaaagcccccagatcctgcgagcggctatttagacttgatgcacactccaccatttcacaggtatccattccccagcgtcacacatgcccatccccagctggagcacactcttcagtgtggaggacagaaggagcaggcagaagacgaccccggggcgctgggggagcaggtgcgggctcccacatacctgctctattctggttggaggtgtcacaagggaaggcgtggagatgctgcc

SEQ ID NO: 1882903 - DNA, 4001 bp, Homo sapiens
tcccagctacttaacaggctgagtgggaggctcacctgagcccaagaggttgaggatgctgtgagctgaaattgtaccactgcactccagcctggatgacagtaagaccttgtctccaaatatataaattactagacaaagaaacaggataacatggcccacagccaatagaaattgaccttcatatatcccaaatgttggctttaatactagaagactttaaagcagccctcatacagtaaatatgttcaaaacataagagaagaatatggtcttaataaacaaagatggggaatctgcagataaatgaaatgtatgaagaaccaaatggaaattctagaactgaaaccacaataactaaaatttaaaaaaatacaaaaaataaactgaaattctaagaaaaacccagcaagttgcagataataaaaaaattctcagaagatcagaaattatccaatctaaaggacaaaaagaaaaaagactgaagaaaaatgaaaagtgtctgagggacatgcaggacaatatacaattgtaggatgtgaggtccacaatagagaaagttcttgcttgatcaaggtcacagatgttctaattagcagaaccagaaatgacatccagatctcattgcataagaatacaccatcaaattacctgaacataacaaattcacaacataaatctgagtgcatctcggccgggcacagtggcccatgcctgtaatcccagcactatgggaggccaaggcaggaggatcacctgaagtaaggagttcaaggccagcctggccaacatggtgaaacccggtctctactaaaaatgcaaaaatcagccgggtgtggtgcacacctgtaatcccaactacttgggaggctacggcaggagaatcgcttgaatccgggaggtggaggttgcagtgagccaagatcacgccactgcactctagcctgggtgacacagccagactctgcctcaaaaaagacaataaacaggccaggtgaggtggctcacgcctgtaatgctatcaccttgagaggctgaggcaggtagatcacctgaggtcaggagttcaaggccagcctgaccaacatggtgaaaccccgtctctactaaaaatacaaaaattacccaggcatggtagcaggcacctatagtctcagctaccctgaaggctgagtcaggagaattgcttgaacccggaaggcagaggttacagtgagccaagatgacgccactgcaccccagcctgggcgacaagagcgaaactccatctcaaaaaaaaaaaaaaaagaaagaaaagaaagaaagaaaagtacaagaataaatctgagtgcatcccaacaggcatggtagcctaaaagagctaccatattttaaaatgaaaaaatgtttttaaaccaaccaaaacaaaactgacaatcctcaacatggtatggggttcgctatcaccagcgtgaagatggaaaacgctgtgtacaaagtttcagatttcagtttcgaaatatactaaattacttgaacaaagacaatgatctttgagttgctagtaaaaagactgacaaagcaggacaggaaagtgaataagaatatttacctcaaaatgaaaaatagaaaatataatgctcatacctcaaaattttcactaacttcttgcatcattttcaactttgtttcatcagctgtgaacggcaaaacaagcatcaggtaattgaaattatgttaaggaaattatgttaatgcaaaacttggatttagtaatttaagagaagcaatcagatcttatcagtttgactgtcatggcctaatagaaggcacatagctagttccctacaaccagtcgcacccatttgtactcccagacatacacgtgcatgcactgacaagcatatacacacacacacaaacacacacacgtgcctctttggggctccagccagtattactcatcactttgcttctctacaaggtagagaaaaggaaaatgagaataaaagttactgttacgattaatctcaaagtacacaacatctgagctgagataaatgtgtcatatttatgcatttctcttttttttttttttttgagagggagtctcgctctgtcacccaggctggagtgcagtggtgcgatctcagctcactgcaacctctgcctcctgggttcaagcgatcctcctgcctcagcctcccaagtagctgggactacaggcgtgagccaccacacctggctaatttttgtattttagtagagacgtggtttcaccatgttggccaggctagtcccaaactcctgacatcaggtgatccacccgcctcggcctcccaaagtgctgggattacagacgtgagccaccgcatccggccttatttatgcatttcttaatgataaaaaggatcaactcacgtgtattcacatctgtgagagctgccacaaactgaaggtactttttcatcaaagtggtctggtcaaccaccgtggccccctgtgttgcaacaaacgccatttttcttttgggctggtttgcttctcaagagaaaagtatcaggtccatgagttcaaccagcctatgaaaagaagcatagagttagtcaatttatggagggcacaggatcacaatctctgtgaaaatcttacctaaaggcctacataatcgatacgctttcatcttaatccagaatctaacactattccttctggtttttttaatatgaagtttacccaactccaattttgtctattaattttgaaacatgatttttgtatgcagatactgttccttcctacggtattttctctttctctgagtcaggggttggcaaacattttctgtaaagagccacatagtagatattttaatctttgtggccacgcagtctgtcacaactactcagcgctgctataaccagaaagcagtcacagacagacaacatgtaaataaatgaggctgtgttccaataaaactttatttatggacactgaaatctgaatttcatataactctcatttaccatgaaatatccttcctcttttccccagccatttaaaaatataaaaccattcttagctcatgggcggtataaaatcatgcagcaggccaggcgcagtggctcacgcctggaatcccagcactttggaaggcgaaggcagggagatcacgaggtcaggagttccagaccagcgtagccaacatgatgaaaccccatctctactaaaaatacaaaaattagccaggcgtggtagtgggcacctgtaatcccagctactcaggaggctgaagcaggagaatcacttgaacccaggaggtggagattgcagtgagccaagattgtgccactgcactccatcctgggcaatagagcaaggttcagtctcggaaaaaaaaaaaaaaaaacaacaacaacaacaaaacgcaggcagcaggctggattggggcaaccttggtcgtacgtgtgactggtttccaaacttcagcggacatcaaaatccccaagtgccaaaggtgggctcccaagcagcacccctccagactgtggttacgtgacgggcacgggaaactataaattctgtttgtagctgccaggcagcaggcactcagtggctgctcccagctgacacacagatggagacttggtttctattttaacaggtgtcacaaagtatcccgagaagctggtgaaataagttgctttcacccctcctccttgcataatcctgctctgcactaacaggtggtttcatggcttcgttttctttcaacagacacaccaggacctcctttgcaggcctaccggatacactgctttgcagctgacacaggtgacactagagagctccttccggccactctctcctagacaccaaaaacccttcttccatgcagagagcatgcccacaggtgtcccacaacaagcccaccagaagccccagccctctggctccgggtaggaaaagccaagaaggaaaccaaggcgggggagtttgtcaagccctgctaggggacctgg

SEQ ID NO: 1882904 - DNA, 4001 bp, Homo sapiens
ataatacagtgttaactctccaaactaaatgaagtacagaaaccacccaagctcttttccatttcacgcaaatggtcctgtgtgaccaagaaaagtaatcaatataatgccctaagtgtaatatttaaataaaacaagctaatttataataaaataatggcatctcattatgtaaacgttcaaacataactaccctagcagacataataaaacagtctgaatcttgagtttgtgtgctaaatcatcacaaatgcaaaagctattgttacacagtagtttcactcttggaaaattcagtatactttaaaaccatgcaaaacatactttctgtttatatataaaacaactaagttctcagccaggtaaataggttttcagctccatgaatctctgatgggacattcagaagttagagggcacaggacaattcttggagatgggaaactacccccaggcactgctagccatgaagatccctccccgtgccactaaacaccacagcttccctcaaattcctaaagtgcctgaagtggtgccgtactcctcaagtggggtactactcaaacactttctaaagtggtacagtattgccccaccactgcgcaccattgttttagacagggctaaaatattcaccctgataaatgaaaaaaagtgggaaatctagctattttatggtttgtatgaccacagatagatagtcacaaataatctactaatatttatatggatttttcaaacagataaacatttggatgacaccaaaatatctttccccaacatgatctctgccttaaggtgcccaaacatgactagctttctctagctccatactcaccaaaaccacattttgcccggtccacttataaagatcatcttaattttccttagggtaatcaaaattactctctgctaatcatcacattgtctatttttttttctctcctgatgtcctagagggatgagggctccattattaattcaatagaaatggaaaaggtgggtacaaattgcaacctaaacactccaggtctctgtgagatatcacaagaatgtacagatgccagaaacagattaaaactcatctacccccaaactgtacaaatgttttcattatttagcattcacattttcagattaccgtctttaagagaacaatttcccaaacatcgatttatttcaagctgacacatttcccatcaaaattatctacacaggatagcgcttgaccatttaaaactatgttttatatatgacaatatcagaatgaatactgaacaaacagttcaataaggccatatcatgtttataatgaaggaaaaagaaaaaggatttaaagctactcatcctgaattaacttataataattcacagagattcctttttgaaattaaggaagtgagggtataataagaaataatttctctataaacagcaaaaataagttagctttcactaaagcatataatattaaactatctagaataaatggtaagaaagcaacaaggatgagtaaaatctaaacatatatgatacttttaaaaaaatgcatctataattcttttcaagtcctttcagcaattggatccagtcttttttttttttttttttttttcaatgttcagtttcctttaatgacccccatctccctgaagggcaggtgcaggcagctaggtgatggcaagagatgttcacttgaagatcttgccgtgattgaaggctttgcccacatgctggaaggccccctcccaggaaaagtactctcgaaccagcgtctgggtctcctctctgccaggatccagtttccgccatgtgtatgactcgtagtccacctgccaatctggactcagcggaaaggcaagctcctggcctcggaagacccagactccagaaatggagctgctattgttggttccaaaaaggatgacactggcgaaggcattcttcctcagcttgtccagtcgctggaacattccagtgatgagattgcagctcatgaaggtctgagtgagttcttcagggaagcgatactctgagtaccacagggaccagccgtccttatcaaagtgctcccagaaatatggcagtgccacagagagtgtgtcctcattggagtacttgcgcttaaattcatccaacacaaaggtactcttgggcaggtgagcgaaggggtccttggccttgggctcagcagccagcgcctgctcacattcatccatctcctcctcaggagcaggggcagccgcctttttctcctccttccgctcagcctggggcttctgcttctcttcccgtgaacccttctctttccgtggtgtgtcctttttaggctgggtctctgcaaactttttagcatcaaactgggccatcttctcacacagtttcagttcccccaagacagcccggaactggggctggttaatgcaggtgaggaaccagcggttggtattgcgaaaggcccggcggaaagaaggctctagaacctgcttatagagccacaacagggtgcagacaactgtgatgtcagccaatgtcactcgttcgcccaccagaaaagtcctcgtcttcaagtaagcatccagcagccccagaattcgcctcacttcctcctttgcattctcagtggcctgtttgttgtggtgcatgatgcccaaggtggggaacacccaggtactggctgggggcactatatcggaatcagcaaagctcacccactgcaccacctgggctgctgcctctggagtacttccccgcagctcctcattgctcacatagtaggcaatggcgttgctctcaaacacacagaatccatcatcaccctcaaatgctgggaccttgccggcaggaaatttgcgaagaaattcagaggtgcggttggtttggccaaaatggaagtggggtggtgcggagagcacgcggatctgagccccgctgtactgagcagcgatgagagccttgaaggccctccagttttcaggatacgtgtacagggtcccagccgccatggtgattccgcaaagaaaggctggatccagtcttaaaagtgttatcaggtaggggtccttaggggaactgttttaatgaaactagtaattagaataccaacttattctccataaatagtaacatccaacacacatgatgatttcataaaataattcgctaggcaattgagatttcctttaggggaattttcttaccaaaccctccccaactctcaccccatgacccctttcccatcctgttagtgtaagtaaacataattcttctctaattttctgacaaattgtaaattaaatgaatccaaatgagtaagattttactgcatgttttaacacttttaaatgattgtaacatttttatctcaagttacacagttcatagggaatttaacaggaagaaattaatctaataaagcattatacatatataatatttaaaatctttaaaagaatagtataaaatgttcacatttaaatttatatgcatttcaaacaaggcagtgaaataagaatgttacgacatgttacacatgcaaaactttcattttacagttataaccactgtgtgggtgttgggggtatataccataggattgtgaaataaaatacagaaatatgtcatatctggttcatcttaaataggtagaaaaacagctcaatgaaaagtattcatggcaaagtatgtttaataaaagagtcaggtttacagagacctgtgttctcctgactaccctctgtgactttatttctaatctacaaattactaataaggtttctcttgaagatgaaatgccgtagaatgaggaggtattttcaggtcaaacatgaacatcattacataaacagaatgaaactcttcaattggagaaccaacagcattttattaaaaatcctgactgatgctgtataacatttcattgagccagtactatagtttgcaagagactgtttaaagccatatattcttcagaatgtcaacatgctaggatttgttggttt

SEQ ID NO: 1882905 - DNA, 4001 bp, Homo sapiens
tttattagtgtagatgtaaccatgctgctggagttttaaaaaatttactgattgaataattaattggaaaagaacaagctgcagattcctgatggatttatgagacaattattctgtcttgtgattatctacattatactatagaagcaatgagggaaaaaatcttattgaaaagatagtcataaatacatgatcaaaaatatcctcaaaagtttattttttaattaaaaactcagacattttagagtttaaaaagtagtatgtcagattcaaaaagatacatgtcttttttcttcctataaaaatgtttttacagtactctacctttaaatacagtacaaaggaaaagcagaaatagcttagcagagtttaaatataatctctaccaaaaaagtaaattttgaatgatattaattgataagaaatatcgagacattacgagaaaattagacaatatagtcgtcttctgtctcctccccaactacaaagccaaatgttcgttttttacctaaagaaatagagggagaggcaagactggcaatcattaatcatcaggctatacaggggccttattaaaaagtatcccacaaactttcattaaactagagttacccagttgattactctaagtttctgtgcaaacatcagctgaatgagataaagtatattcttttcaacagtctgtgtatctgactacattattaggttgagcttaaatctcatatatttttgagggaaactagtcttaattttctataatcacccacttctttttgtgataagctctctaaattaacattatgtataatgtacaataaaacatatcaatatgtgaaatacatcttaactgaaataaccaaagaaataggacaaaattggctataaaaataccatgacctttatgacaaaatatttgataaaaatctatttatatgtatcttatgattgatctgccttcttcagcacaccacatacatttctatttgtgatttgtacgttactacttttcaggttgctcaaagagggtttccttttaatatctgtaaacctatcacagaaagaaattctctctggcttcagccccaaggcagtgatttgtgcactgataggtgtactttgtttagtgtcacccatggtgtagattggatagattttgtaaaagatagcattactttaaaagaaacatacaatttgacaagcgattacattttactttcattttattgccgtatttttcatcacactcattgttttctaactgtcactaaattgttcattttcttagtctgttacattggtagagctatttactgtttataaagcaatatgcacttacaggtttgggagatggtttgggctctgagggtcgcatgtgcaagtgggtcatcattgcttgaagacgttcgcgttctttagaaagctgttaagaaagagtgagatcagaagcgttttagaaatgactgatacagctattttattgcagtgatacatcttatcattgagcttgcctcagaataatgattcctgcatgtaaaagtctgcgtcaggaggaacttatctgggaggaaatgcaactttagctatggagggggaaaaacttttatagcttttcttatgttaaaaggtcagagaaaacaaataacacttcatctttttgtcaataagagaattgaggtcacagttgcctcgacagtaacaagttactgaaaccataaattagaaggcccatggtgtctctttaaagtcctgtggacactgttagcaatggactagtgccaacagctgtgaaggggtgaagggttctcaaagcaaagtgcctgccaggattgtctacacacttcatgcattcccactgaggtccagttagtgccccctgcaatctgccatcatcaatctaattcaatagagtgacagagaccaggcagtgtgaaacgctgaactctgccacggagtcggcatctacacttgcactgggtctcattacaactgacggaccttacttttccatcagtcagacacagcagaaggaaaaaaaaaaaataggcgtaattggtcacaccgaagactgtatcatcagctgaactcttatgttttagtctaccttttataaatggtaaacaggtttataaaaagctttttaaactttaacagtgatggtgctttttgtgttcttgattattttacaagtcaaaacaaaatatttttagtaagctctctgaaaaaagcaatgacacgaatttgaaacaagatgtaataaaatatgaagaaaaatcgtatctttaaatgaaacaaagtattagtttcattgagaaaagatcatctttaagatgaaatgttagagaaagccttaaaggcttagtaaaacataacaagagtcagactttgggtgacataattgctttctgattagttctatggattctatttacttctggccaaattctgtttcaacattaatagaattttttttaacttaaaacagtcgcatttgatacaacatgtgtgtattatcatctgtgatataaattatctgcctttaatctagctaaagaaaagtataaagatttttttgcaagttctttaattaaaattacactagaaaaagaaaagaaaaggttatctttcagggtgttagttatattacaggcatgatattgtaaagactggtcatttgccacaatataaaatctcatggaaaaaaatcaaggttagctcatgtaaaaactctctctgtaataaaatcatatctaattgggagtttggtctaacctgcattgggaaaaacttagatctgactactttgggatattcaaattcatatgatgtggtctaaaagttataaaaatataagtgataagtacattaaactacagcaatccttcctgggttatcaataattgccactgtttaaaacaatctaaaatatcatgtatctccattagtattgaatggctaagacagtaaaatgcaggctgaaagacccagaatctgctcagtactcaatgtaacacaccagaaatctaagaagagtccattaagtgagcatttaacaaacctgtatttctaactgttgcaccacctgcatttgcactcgacactgagcagtgcttcggtcatccaatgcgtgttcattgttaaggtgcctaaacaaacagaagacacaaaacagaatgtaaagtgatgtcgatcttagtggcataggctacacttaaaaagcactacactgaagtcagatgtttctgtgcactgggaaaacagaaagccttgaaaccatacagataaaagttaaagctgcttacgtgttgtgtgaaaattatttatgtaatgtaaagagactcttcaaatggcagaaaatgtcactgtctctaagcttacctgttattacaaaaaatatttccccagaccatttacagagttatagtagaagtcatattatttatgccatttttttaaaaagaacagcttacaaatctatgaaccaaaagcaattctgaagagaacaaaggcaattttctatttcattgttagaacagtttgttgtttctatgatgtattttagtgagcaatgttttatttcattgggatgtggtatgaattaggtaaagatggcaaattatctcccgtggaaaatcaatatttatgaagaatgatgatttgctgttagtaataaagaacttcattgaagattttgatcattagaataacaagattgacatttcatgtccagtgttctaactaggagacatttgtcctaatcttatttttaaaatggtgaaaaataaatcattccaaatgatctcactctaaccttgaatatgcattagtctaccattattatttctatacgatgtttaaagagatctctttaatgagtggtatgttaatacaccaaaagtaatttagtaaagcagcatctccaatgaacatgaaaacatttaataatatatactctgtaatttgtaatacataatgtctttgatgcttcccaaaattaaagaaag

SEQ ID NO: 1882906 - DNA, 4001 bp, Homo sapiens
tgtgatattgttcctaatatccagaaggggagaggatgatattacttttaatatcgcaggcagtgtacacccccctgtgatattgttcgtaatatccaggtgaggataaaatgatattactcccaatattgcatggggtatacattctcctgtgatattgttagtaatatccaggggagcagaggttgatattactgtcagcatcgcaggtggtatacatttccctgtgatatttttcgtaatatcaagggaagaagaggttgatattaatcccaatatcgcaaaggtcatacaccctctgtgatattgttcgtaatatacggggggggggggaaggatgatattactctcaatatcgcagaggaatatacacatatcacagaggaccatatcacagaggaggtacgccccctgagacacccccctgccatatggttcataatatccagagggggagagaatgatattactgccaatatcgcagggagtgtacaccttcttctgatattgtttgtgatatccatagtggaagaggatggtattactcccaatttcgtagggggtgtacacccccttgtgatattgttagtaatattcagagggggagaggatgatattaccctcaatatcacaggttttgttcaccgccctgttatattgttcataatatccaagagtagagatgacataactcccaatgtcacatggaatttaccttctatgtgatattgttcatgatatccaaggtggcagatgatgttactttcaatgtcgcaggaggtgtacaccctaactcataatgttcgtaatatctaagggcggagatcatattactcccagagtcgcaggggatgtacaacctctgtgatactgtttttcatatccaagggggaagatgatattactcccaagatcgtaaacaccctgtgtatgcactctctgtgatattgttcataatatccaaggagggagatgattttactcccagtatcgcagggggtgtacaccctgtgtgaaattgtttctaatatcccaagggtagatgacgcttctcccagtatcacagaaggtatacatcctctgtgatattgttcgtaatatccaatgcgggagatgacgttgctcccagtatcgaagggcgtgtaccccctctctctgtattgttgttcatgatattcaaggggggagatgactttactcccagcatttcagggggtgtaccaccttttagatgttgttcgtaatatccaaggagggagatgacgttacccccagtatcgcagaaagtgtgccccctctgtaatattgttcataatatcccatgtggtagatgacgttacttcgagtattgcagcaggagtaccctgtgatattatttgtaatatctaaggggaaagatgacgttactcccagtatctcagagagtgtaccctctctctgatattgttcataatatccacggggtgagatgacgttactcccaggattgcagggggtgtaccccctctgcgatattgtttgtaatatcaaaggtggacgatgatactactctcagtgtcgcaggtggtgtacaccctctgtgatattgttcataatactcaaggggggagatgatactacacccaatgtcgcagggggtgtacactctctgtgctattgtttgtactatacaaggggaaaatgatactactcacaatgttgccggaggtgcacaccctctgtgatattgtacgtattatctaaacggggagatgacacaaatcccaatgtcacagttgttggacaccctctgtgatgctgttcgtaataatcaagggggacgatgatactacccccgatgttgcaggaggtgtacaacctctgcgatattgtgtgtgatacccaagatgggagataatactactcccagtgtcgcagggggtgtacaccttctgtgatattgttcgtagcatccaagggagagatgatactacttccaatgtcgcagggggtgtacaccctctgtgttattgttcataatatccaaggggtgagatggtactacttccaaagtcataggggatgtacttcctctgtgatattgatttgtgatatccaagggaaaagataatattactcccaatgtcgcattgggtgtacaccctctgtgatattgtttgtaatatccatggggggagataatattactcccaatgtcgcaaggggtgtataccttctgtgttattgttcataatatttaagaggggggaatgatattactcccaatgtcccatgggtgtacattccaagggtggatataatattactcccaatgctgcagggggtgtacaccctctctgttattgtttgtattatccaaggggggagatgatactacttccaatgtctcaggggatgtacatcctctgtgatattgtttgtacaaaatcacagaggatgtacaccctttctgttattgttcttaatatccaaggggggaatgatgttacaatgtcgcagggggtgtacaccctctgtgatattggtcttaatatccaaggtgggagatgatataactcccaatgtcgcatggggtgtacaccctctgtgatattgtttgtaatatccaagttgggagatgatataactgtcaatgttgcctggggtgtacaccctttgcgatatttttggtaatatccaagggggatgatgatgttactcccagtattgcaggaggtgtaccccctctgtgatattcttcataatatccaaggagggagatgtcataacacccattatcgcaggggatgtacccctctatatcatttgcaatatgcaatggaggagatgacattactcccagtatcgcagcaggtgtacccccttgtgatattgttcataatattgaaggaaggatatgatactactccccatatcataacaccgtgtgtatacactctctgtaatattgtttgtaatatccaagggggggagatgatactacttccaatgttacagggggtgtacaccctctgtgataatgttcttaatatccaaggggggaaatgatactactcccaatgtcgcagagcatgtacatcctctgtgatattgtttgtaatatctaaaaggggagataatactacctccaaatgtcacagggggtggacaccctctgtgatattgtttgtaatatccaaggagggagatgatactacacccaatgtcgcagggggtgtacaccctctgtgacattgttcataatatccaaggggggagatgatactactcccaatgttgcagagggtgtacaccctctgtgatactgtttgtaatatccaagggggaggtaatactactccaaatttcgcagcggatgaacaccctctgtgatattgttcacaatatccaaggtgggagactatactattcccaatgtctcaggggatatacaccttttgtgatattgtttgtaatatccaaggggggggggatgatactacttccaatgtcacaggtgtgtataccctctatgatattgtttgtaatattcaaggggggagatgatactactcccagtgtcacagggggtgtacaccctctgtctattgttcataatatccaagaggggagatgatactaccttccttgtcacaggggatgtacatcctctgtgatattgtttgtaatatccaaggggaaagatgatattactcttaatgtcacaaggggtttataccctctgtgatattgctcataatatttaaggggggaataatattactcccaatgtcgcatgggtgtacactttctgtgttattatttgtaatatccaaggggagatatgatattactcccaatgtcgcagctggtgtacaccttctgtgatgttgtttgttatatccaaggggggagatgatattatgccctgtgtcgcagggggtgtataccgtctgtgatattgtttataatatccaagaagttagatgatattactcacaatgtcgcaggggtgtacaccc

SEQ ID NO: 1882907 - DNA, 4001 bp, Homo sapiens
accaccactaactgttttctctctcgcaggagaggggtctgccctgggtcgaaaccatccttccagaggggtctcccttagaaactccgaggccaagattagccatgaggataaaacccagagatcagacacagagaccctgggtcaggcctttggccacatggcctggcagcctcaccttgccgagtcacagagaggcagagccccaagcgagcctggggagtcctgaaccggcctgggttccggccctgccccatccccattgcttctcaccacctctccccaccactctcccctccctggcccagggggtccctgggagtccgggaaagcgccctggatcatccagctcctcccagggctgggatgcccactgccgagagagcactcagaagccgcccgttggctttgaggacttttatcgcccaaggtcccgaggtctgggtgggaccgcaaggggttgcccctgtccccagagctgcgcccggccatcccggtgggagggctcggctggaagaagttgaccaccttgtggagcgactgcactcgtgcgctgtgggcctcccagtccgagaagctgcggaagtcgccactctccaccacgtacatgcggccgtggtagttgggctcctcatacaggacccacctggaggccaggggagtggggatcaggggctgccaggaagtcccccgggactccggagagaaaagcctgcacagcctggccacccagcaacccctcccggtcgagcggccccttcactctgggctacacgaaggcacccacggtgccttccccagtgccctgtggggtccatgctggggtgtgacatgtgtggggacaggcccagtaatgtccacattttaaaactgaccagtcctggccgggcatgggggctcacgcctgtaatctcagaattttgggaggccgaggcaggcagatctcttgtagtcaggagtttgagagcagcccggccaacgtggtgaaaccccgtctctactaaaaatacaaaaattagctgggtgtggtggtgggcacctgtaatcccagctacttgggagactgaggcaagataattgcttgaaccagggaggcggaggttgcagtgagccgagattgcgccactgcatttcagccatccttggcaaggatgcactcccgccatcactgcacgccccacacactcctgttccctgataaggaccaccttgcacagacagtacccccagcacctggtggggggcctggcacagagggcaccgttcattcagtgaatgccagcaggttcccacatgtgtgcccaacactgtgtcaggtaccagaggtgccatggtcacacaacacggttcctgccccctcctgccctcacggggcctcccctgcagaggaaatgggctgtgggggtgcagttgcatggaggagcctgcagggcacagaggagggttggggagtcccaagcagggccccttcctgtcctcctccccttctgcacaccactggggcagccaccaacaacccagagagcagaaacagtcaggacaagtctttacagagcctggaggacctcgggctggtgggggcaggagagaacacagctcttcatcacccaggaagctgtgggcccggcccagaaaagcaggaaggtgcggtggggagggaacgggggaccaggaggaagggactggaggtccaggatagtggcctttgcctggaaaggggcatgtggtccaaggaagacacctcaggacagctcggagcaggggctggcccaaccctgtccttccctcaccatctctgagacgagtgaggcttgtcatgcctggtgcctggcacagtctgctgcctcaagggttggggccaggaaggaagagagagaggcagagggtgtgagccagcctggagcacctgctgggggactcagggcaggcctggtccagcctggaccccaccctcatggcccccgtatccatgcccctccacacctacagctttccaaccccacacctgtgccacagctggggcctcagaggcacctcagagagtcagctggtcctttcctaccctgtggtgggcaagaaatgccccaagccatgtcctgggccacatgagggttctcacatggacacccccaaaaggagggggcggggaaccacccatcctgctgtcccctgtcctggctgtggctactgggaggaggcagacagaggaaagggcaggggcctgtcctgcccacatcagcaccgtgcccttccccaggtgagggtaggtggaggcagaacgccagtgcatttccctccgagagcccaccaggacacgggtctgaggggatgggtcatgcctgggctgatgtgggacccagagggaaggagtcttggcagtgggaggtggtggagggaccctgccttgcccactcccccgaccccaggaaaggcctcctagcagtgtcccctccggatcgaggggacctgggggcgttacctccttgacaagggcttacatttgtgtaagagtaagagtcttaggcggcaaaggctgagctcctgggtcccccacctggggtcccgatggctggctcctctcagggacagtggggattgtgtgcccctcagtcagagaaatgttagcctccaccttccccaccttcgttctcaacaagcccctgagcgttgggggtgggccggggggattgtgtctagggcctcaggacatcctccacgcaaaggcatgacttgggccttacaagacacaatttagccagcaagttttccagggcaaattcttgttttggaatgccacccctgggctccaggtgccaccaatttagggcaaaatgcaatttcgtaaaacggaatcctggagccagctagagtgacagaaacagcaggaagggggccaacatcaggccaccggggaaaggtgggatgtacacagtccctccctatccctgggaactggttccaggacctcccttggatatcaaaatccgaggatgctcaagttcctgatataaaatggcactgtatttgcatataacccatgtgtatcctcccatatatagtaagtcctcacttaacaccgtcagtaagttcttgggaaccgtggctttaagcacatgatatataacaaagccatttctcccctcatcaattttataatgaatccacattgaacaagatgacatatttgaggacctgccatacattgtttcacttaaagtcacagtttccaagaacctatccacaatgttaagtgaggacttactggactcgaaatcatctccagattacttatgatacctaatccaacataaacgctatgtaaatagttgtacagtatctttcagggaataatgtacatattcagcatagacacaattgtggggggatattttcgctgtgcggttggagcccatggacatggggtaccacctgtgcccagctctgcctcggcccagtctctgtctccctgcagtccctctgccccctgcatcccctccgaagctccctggccttgaacctctgtagtatagacggcaaattgttcctcaattgcttcgataggcgccagaaccatgcacagccagctggaacctgtgtgaggggctcttggcctgaggggaggggactgaggcctgggaaagcggctagctctggaacagggacagacacaggcttggctgcagtctcagctgtgccactcccacggggcggccgggcagtcagccttctgagtctcagcttgccctttgtagaacgggggcgataatatctacctgacctagaggtgtgggctggacaatgaaaatacatggccaacttgaaggtgctcagaggatagttgcaaaaggggagtgtgcgggagggcaggagggggcacacaggctgcccttggttgaccaggaggaaacccaagtgtggggcagacaaacccatctgggcctgggcaaaattcccccagctactttctgtccaggagtgagccaccccgaagtccatctcct

SEQ ID NO: 1882908 - DNA, 4001 bp, Homo sapiens
gagataattactaactccacggactggccttagaagactcttcctctgacatcatccaattcattctgccacttaaaaaaagaaaaaaaatccaggtaccgtggaaagccactggaagctttaagcaagagagtgtcctgatttacaattaaaaaatttctaattaggccgggcatggtggcccacgcctgtaatcccagcactttgggaggctgaggcaggcggatcacttgaggtcaggggctcgagaccagcctggccaacatggctaaactccatctttacttaaaaatactaaaattaggcgggtgtggtggtgcgtggctgtaatcccagctacttgggaggctgaggcaggagaatcacttgaacctaggcggcagaaatagcagtgagccaagatcgcatcattgcactccagcatgggtgacagagtgagatttgtctcaaaataaaataaaataaattctaattttggtaaaacatacataacatgaaatttaccatcttaacaatttatatgtgcatatatcagtagcgttaagtatatacacatttttgggcaacagaactgttttcatcatgcagatctgaagctctgtacccattaaacaataactccccctacctgctgtcaacgccccccactattcttctttctctgtctctagaatttgactactctacatacctcatttaagtgaaatcatacagtaattgtccttttgtgactggtttatttcacttagaatatcgtcctcaaagttcattcaagttgtagcatgtgttaggatttccttccttttgaaggctgaataataatccattgtatgtttacatcttaggctggtgcaaaaataattgctgtttttgccattgaaagtaatggcaaaaaacagaaattacttttgcaccaacttaatgtatcctcttttgtttattcatctgttgatgggtacttgggttgcttctacctactgactattgcaaatagtgctactatgagcatgagtgtgcaaatatctgttcaagtccctgttttcatttctgttttgttttgttttgttttttgagacagagtctcgctctgttgcccaggctggagtgcagtggcacagtctcagctcactgcagcctctgcctcctgggttcatgccattctcctgcctcagcctcccgagtacctgggattacaggtgcccaccaccacacctggctaatttttgtatttttagtggagatggggtttcactatgttgggcaggctggtcttgaactcctgacctcaagtgatctgcccaccttggcctcccaaagtgctgggatgacaagcgtgagccaccacccctggtccctgctttcatttctttggggtttatgcccagaagtaaaattcctggatcctgtggtaattctatgtttaactttttgcagaaccgccatactgttttccataggggttgcagcattttgcattcccatcagccgtgcacaaggtaccactttctccacatcctcgccaacacttgttattttgttttcttgacagtagccattttaatgggtgtgaggtggtatctcattgtggtttatgtcacatttttgagtatacgttttaccctgctgggtatatgttattacactaggtgctggcttacagaggcaataagacccactttctgccatgagagaggaaactcacaatctgttggaggagacgggcatctaaacggaaaattataatacagcttatcaagtgctatgatagagacaggtcttaagagagcagagagtggatgcaatcgaggaagacttcctggtcttcatagccccacctctaggaagtcttccttggttgcacccactctgtgctccgttaagacctgtctctggagtagcagtagagttcctactcaacttctcattttctggttccttctaccaagttaagcatactcattagaaggaaccagaaaatgagaagttaaatctgaagtccaagtggttggtgagtattggttagagcactatttttagaatagaacaatgcttatgagtgaagcattttttttttcttttcatttgtgcatttctctggctctgggagattgtaaaggttacttcattgggatgcttagatcacagtttctggttattagaaagaggccacactgagacctttgggagaaaaggggcacagcaggtgggtaggtgggacgtgcctcattgagcctgattcaggggtcttgtgtgttttccatttcatccaattctgggaagtctgaaggctccgggtcagaggggagtttgttgcatgggggcagttgtctggaaagcttagtgacaaagtagcaaataggagcaaggaaacaaagtatataaagacctgctatttaggaatggcactattcttgtcgtggtgactcacatttgtcaagccttgaaggatatttgcagaggaagaaagaagcattggattgcagctcggtgggagcagatcctggctgccagtgccgggaccaaggcagggtgtgatctcacccgtgttgccaagggtcatcccacacccagactgttcggtttccattctcattccttggcattgccttttatagaactgctttcaaaagaggcattggggctgatgtcacaggatcactatgtgtttctcaggagtagggagggaatgaataggatttttcgaacattctataccaaattcactgccctccctccatttgatttaggacttacatcttcagcatcctctctttgttaggctcctctggaattgtctgtccccctggctagatcaagagcccctctgtatccccagaaccttgcagcttcaggcactttgcacgagataaataaacatggatgcaatgagaaaagggatgtgacaggtattggggaagacaagccagcaactgctctgggctctgctttggaagtgcctttcatttctctttagtttttttttttttttttgaaacagagtcaagctctgttgcccaggctggagtgcagtggcacgatctcagctcactgcaacctctgccttttgggttcaacggatttcttatggctcagcctcccaagtagctgcattacaggcaagcaccattacgcctgggtaatttttgtatgtttagtagagacggggtttcaccatgttggccatactggtctcgaactcctgacctcaggtgatctgcccacctcggcctcccaaagtgttgggattacagatgtgagccactgcgcccagctcatttctttttactctctatccaccacttgtcctagctcaaatccttttgagtctgacttggacagctgatgtcaccctctacctagtcttttttcccttcagtgccatttttccaactcttgtcagtcatttttatgctgtcattgcatccagacctgatcatttcttttctctttcctactcaaaacctttcttggttcactgtgactcagtgaataaatccatgacccttggcagtctaattcctgtttgtctttccagccttgccatcctgcccagctacctgcctcccatctcattccctgctaaatttgcttcttccttatgtgagttgaggcacacgctttcccttctgctgggaaggagtttccacccctctgagaccacatccaaatgttatctccttgaggaagccatgcatgctccctgccgagaccaaggagagaaaaccatgccttcgtctgggttcgcataacttttgtctacacttttgtcgtgtcatttactgcaaaagttgtcccccaagctatccttttatttacatttgcttattaatttcaagaattatttgagatagtattcaagttacatactagaggaatattcctatgaatataggatattataatgataataagagttatgttaaggaattcccataataaagggtggagggagagtggggatgaatttggggtcatgtaaatacaaactgcatatgctgtga

SEQ ID NO: 1882909 - DNA, 4001 bp, Homo sapiens
cattataatatcctatattcataggaatattcctctagtatgtaacttgaatactatctcaaataattcttgaaattaataagcaaatgtaaataaaaggatagcttgggggacaacttttgcagtaaatgacacgacaaaagtgtagacaaaagttatgcgaacccagacgaaggcatggttttctctccttggtctcggcagggagcatgcatggcttcctcaaggagataacatttggatgtggtctcagaggggtggaaactccttcccagcagaagggaaagcgtgtgcctcaactcacataaggaagaagcaaatttagcagggaatgagatgggaggcaggtagctgggcaggatggcaaggctggaaagacaaacaggaattagactgccaagggtcatggatttattcactgagtcacagtgaaccaagaaaggttttgagtaggaaagagaaaagaaatgatcaggtctggatgcaatgacagcataaaaatgactgacaagagttggaaaaatggcactgaagggaaaaaagactaggtagagggtgacatcagctgtccaagtcagactcaaaaggatttgagctaggacaagtggtggatagagagtaaaaagaaatgagctgggcgcagtggctcacatctgtaatcccaacactttgggaggccgaggtgggcagatcacctgaggtcaggagttcgagaccagtatggccaacatggtgaaaccccgtctctactaaacatacaaaaattacccaggcgtaatggtgcttgcctgtaatgcagctacttgggaggctgagccataagaaatccgttgaacccaaaaggcagaggttgcagtgagctgagatcgtgccactgcactccagcctgggcaacagagcttgactctgtttcaaaaaaaaaaaaaaaaactaaagagaaatgaaaggcacttccaaagcagagcccagagcagttgctggcttgtcttccccaatacctgtcacatcccttttctcattgcatccatgtttatttatctcgtgcaaagtgcctgaagctgcaaggttctggggatacagaggggctcttgatctagccagggggacagacaattccagaggagcctaacaaagagaggatgctgaagatgtaagtcctaaatcaaatggagggagggcagtgaatttggtatagaatgttcgaaaaatcctattcattccctccctactcctgagaaacacatagtgatcctgtgacatcagccccaatgcctcttttgaaagcagttctataaaaggcaatgccaaggaatgagaatggaaaccgaacagtctgggtgtgggatgacccttggcaacacgggtgagatcacaccctgccttggtcccggcactggcagccaggatctgctcccaccgagctgcaatccaatgcttctttcttcctctgcaaatatccttcaaggcttgacaaatgtgagtcaccacgacaagaatagtgccattcctaaatagcaggtctttatatactttgtttccttgctcctatttgctactttgtcactaagctttccagacaactgcccccatgcaacaaactcccctctgacccggagccttcagacttcccagaattggatgaaatggaaaacacacaagacccctgaatcaggctcaatgaggcacgtcccacctacccacctgctgtgccccttttctcccaaaggtctcagtgtggcctctttctaataaccagaaactgtgatctaagcatcccaatgaagtaacctttacaatctcccagagccagagaaatgcacaaatgaaaagaaaaaaaaaatgcttcactcataagcattgttctattctaaaaatagtgctctaaccaatactcaccaaccacttggacttcagatttaacttctcattttctggttccttctaatgagtatgcttaacttggtagaaggaaccagaaaatgagaagttgagtaggaactctactgctactccagagacaggtcttaacggagcacagagtgggtgcaaccaaggaagacttcctagaggtggggctatgaagaccaggaagtcttcctcgattgcatccactctctgctctcttaagacctgtctctatcatagcacttgataagctgtattataattttccgtttagatgcccgtctcctccaacagattgtgagtttcctctctcatggcagaaagtgggtcttattgcctctgtaagccagcacctagtgtaataacatatacccagcagggtaaaacgtatactcaaaaatgtgacataaaccacaatgagataccacctcacacccattaaaatggctactgtcaagaaaacaaaataacaagtgttggcgaggatgtggagaaagtggtaccttgtgcacggctgatgggaatgcaaaatgctgcaacccctatggaaaacagtatggcggttctgcaaaaagttaaacatagaattaccacaggatccaggaattttacttctgggcataaaccccaaagaaatgaaagcagggaccaggggtggtggctcacgcttgtcatcccagcactttgggaggccaaggtgggcagatcacttgaggtcaggagttcaagaccagcctgcccaacatagtgaaaccccatctccactaaaaatacaaaaattagccaggtgtggtggtgggcacctgtaatcccaggtactcgggaggctgaggcaggagaatggcatgaacccaggaggcagaggctgcagtgagctgagactgtgccactgcactccagcctgggcaacagagcgagactctgtctcaaaaaacaaaacaaaacaaaacagaaatgaaaacagggacttgaacagatatttgcacactcatgctcatagtagcactatttgcaatagtcagtaggtagaagcaacccaagtacccatcaacagatgaataaacaaaagaggatacattaagttggtgcaaaagtaatttctgttttttgccattactttcaatggcaaaaacagcaattatttttgcaccagcctaagatgtaaacatacaatggattattattcagccttcaaaaggaaggaaatcctaacacatgctacaacttgaatgaactttgaggacgatattctaagtgaaataaaccagtcacaaaaggacaattactgtatgatttcacttaaatgaggtatgtagagtagtcaaattctagagacagagaaagaagaatagtggggggcgttgacagcaggtagggggagttattgtttaatgggtacagagcttcagatctgcatgatgaaaacagttctgttgcccaaaaatgtgtatatacttaacgctactgatatatgcacatataaattgttaagatggtaaatttcatgttatgtatgttttaccaaaattagaatttattttattttattttgagacaaatctcactctgtcacccatgctggagtgcaatgatgcgatcttggctcactgctatttctgccgcctaggttcaagtgattctcctgcctcagcctcccaagtagctgggattacagccacgcaccaccacacccgcctaattttagtatttttaagtaaagatggagtttagccatgttggccaggctggtctcgagcccctgacctcaagtgatccgcctgcctcagcctcccaaagtgctgggattacaggcgtgggccaccatgcccggcctaattagaaattttttaattgtaaatcaggacactctcttgcttaaagcttccagtggctttccacggtacctggattttttttctttttttaagtggcagaatgaattggatgatgtcagaggaagagtcttctaaggccagtccgtggagttagtaattatctctcttcgaatccaaaaggttcattgagatatggaaacttctctggctctgggtgacatcaggtcgccaacctagtaagtcctttactgctgaccccgc

SEQ ID NO: 1882910 - DNA, 4001 bp, Homo sapiens
taagccttctccagctcccaaactcacagtcaagctcatatccacaggaagaagtctggaggcttctctgaagaaaacaaccagctcagggggaaacgcctacagatatgaagacccgagggcccccggaatgaagtgagctccaccaattgatagactaaatctcattcctaaatgtgaccacagagccaaggaccaccagatagttgaagaaagcttctaacaggaaatatagagaccaaaacaaacaggcaggtaaaaagaacttgaaagaaacagagatattaaggaacagaagaaaactaacaaaaacaacaacaacaaagcaatattgtacccttataagagagagctcatccatgaaacaggaatatgagtctataaaaaagaataaagagcaatataatgctctgaaaaattaaatacttctatccaacatattttaaaaaaccatttgaaactttagttctggattgttacgattttattaatttatgcctcttattattaggacttttttgttcacagttgtattcccaaaatacatagtttcaaaatacattttggcttacctgtgagattactgctttcaatgcttataactgtctcacgtatgtactatctttcacttgtatttgttctgtattctgatgggttttaatgagtggtataggtccttgaacattttttttcccagaaattatgcattaacagaatatttcctaagtattttcacatctcaaagtatatttcatttgtagctatacaaatactagtttgtctacacaaaggaatccaggttcacaatcttggtgaatcttgctcctttgtcatcaggcaattagtgtggtaaatgagctgtttgatgacactttaggttgatctctcccatcttttttttagtttagagatctatagaatttatgtctttactcatgaaattagaacatattattaggatatgtatatgtatgtgtctttttcaatatcttgtatgggtttgggagaaattttcaccagcaacctcaaatctttctttagcctaggtaaattttctcttatatatctttaaatattatcccttctccatctgttccaattagagtgaagagaataaacatatgttggatacactaaatctatcctctcagtcacttctatcttgtaattcctatttatattttcattctatgttctgtgaaaacccctcaagttagtttctaaatccctaattcaatttttagcaatgtttatttggtatttgttgccaatatcagtggggctccttcagcaatcacattttaaatttcctttttcaaagcagcctacttttttggcacaatatcccccacaactctccttgagattgctaattgagatgttcttcaatttttattttaaaaattaattctgttttatgcattttcccaaacacttcacatcttcccccaacccatctgatctgctgcttttcttaaagtgtcttcagttaaaatccttcattgtctgtccatgtttatcaaagaaaagtgtaaatcaatcatttttacaaggtttactaagtactttctgtgccccaggcagaatactaaagaatggaaactctaagtcaaggaaaccccaaaaataatcttatgagatcatgttatcctccctgagtgtcacctggggaagaaaaggtgtagccagctgcacccagttgggaattttttccaaattactgagatctttctgcctcttggctccactcacttctccagcctctgtcttgggaccacgggaccatctctgcagtcagggctgtaggtgccaggagaagtcaggaaagggcacatgaactgatttttctgtttctttttttcttgtatttgctgtgcaagcccggagttagctggaggcctgtccaggtaggagccagccgtggcccaccccccactttacttagcaagttgtccacgccaagtgaagcctgggggctaggccgcagctgccgtctgtgtgggggggcgctgataaagatgctgaagtccttcatcacccgctccctggcccatggaccttcccagccacagctgttctgagccaagaatgtggcaggtgtcaacttgggactcctatcttctctggatgccctgctgtgcctgtactgggcggaggatcacaaagcactgactggtttctttgccattgtgacgccatctttaaaatgctgatccaggcctgatgcagtggctcatgcctgtaatcccagcactttgggaggccaaggcaggtggatcacttgaggtcaggagttcaaaacaagcctggccagaatggtgaaaccccatctttactgaaaatacaaaaattagccaggcatgatggcaggtgcctataatcccagctactcaggaggctgaggcataagaatcacttgaacccaggaagcagaggttgcaccgagctgacattgcaccactgcactcctgtctgggtggcagagtgagactcaatctaaaataaaataaaataaaatgaaataaaatgctggttcagtgacggtagccttccaatgttaaagcaaatctaactgaaatcaattggtcagaggaatacacagtgttatagacagcgtaactaaaagctttcttagaaagttaagtaaccttggttcaaatcctggtttcacaaattactatgtgaacttcagcaagttattttacttctctatttccttttctgtaaaatagtgaaaataatagggttattgggcagaacaatgaagtaagacacttaaaacaattcagcacagtgcctgatttgcagtaagtacaataaatgttagttatcatcatttttaaccataagatatattgcactgcaagaagatatcatgagataatattagacaaacccaaaataagggacattctatgaaatagaattgcattgcattcagcaatgccaaaagatatctatgaccactacagtaattcaaaattgtttgagttttactttttttgatgaaaaaagaagtaaaaatagtagaaaattaaaagtaaaatcatcattatttgcaaatcatgcaatatataaagtctaaataaaccctattgtatgagtgtgttaatgtataaaatatgtctgaaaaaaattttgaagaatatatctgtaaatatttttattttaacttttaatttttgaataattttaggcttatagaaaagttgcaaaaatagggcagagttaccatttatcttccaccaagcatcctcttaagttaatatctaatcttacatcatcatgatacatttgtcaaaattaagtattggtacagtactataaactactgacatttgcatgttttaccaacatcacttttctgttccaagattcaatccaagatcccacattatactgttatgtctccttgctctcctctaatccatgagaattcctcagcctttccttgtctctcaggatgtggacatttcaaaaaattctggacagttattttgtagcatgacccttattttgggtttatctaatattctctcatgattagactgaggttgtgtgttctggataagaatacacagaagtgatgtgtctttctcagtgcatcatatctggaggtgatatcgatatgtcaacatgatgacaatatgttttattactggtgataattgactttgatcacatggttaagggggtcgctgctctaacctcattattttttctttgtaatcaatacgtatttaagggggagatacattgatactatgcaaatattgtatttctcctaaaactttttagcttctaattttagcattcatctgtggattttatttgccacaattattacaggggtgttctgatggtaattttgtatttccttaatttcttctatgtttatcaattggaattcttctgtagggaagaactgtccctacatttttgagactcatttactttcagggctgaagaagacattggagtcttctgagatttcagtttgc

SEQ ID NO: 1882911 - DNA, 4001 bp, Homo sapiens
acgatatgcatgtttaagggccaagtgccccaatgtctgccactgactttgaaatgcatggaaatttggaattggcaggtagatggggagctagatagatggataggtagggatcagaaaaagcagagagcagaatgcgggcagtgagcacgtgagtgttcactgtataattctttccactttttaaaaaatagagatgaggtctcactgtgttgccctggctggtctcaaactcctggcctcaagtgatcctcacacctcagcctctgcctcccaaagtgctgggattacagggtgagctgccacctcctggccgccttcttcttttttttttttttagatggagtcttgctctgtcacccaggctggagtgcagtggtgcgatctcggttcactgtaacctccgcctcctgggttcaagcgattctccttcctcagcctcctgaatagctgtgattgtaggtgcatgccaccacacctggctaatttttgtgtttttagtagagacggggttttgccatgttggccaagctggtctcgaactcctgacctcaggtgttccacccacctcggcctcccaaagcactgggattacaggtgcgagccactgcacccggccctttttttaaaaatagagatggggttcttgctatgtaatctagactagtcttaagctcctggccccaagcgatcctcccgcctcagcttcccaaaatgctaagattataggtgtgagccaccatgctcagcttccactgttttttatgtttaaaaatttcatagtaaggtgaggcaggaggattgcttgaggccaggagttcgagaccagcctgggcaacatactgagacccttatctctaaaaaatttttaaaaattatctgggcatggtggtccactcctgtagtcccagctactcaggcagctgaggtgagaggattgcttgagcccaggaggcggaggctgcagtaagctgtgatcccaccactgcacaccagcctgggagacaaagcaagaccccatctctttaaaataaaacataataaaatgtgtggggggaggagaggccgggcacagtggctcagcctgtaatcccagcgctttgggaggccaaggcaggtggatcacctgaggtcgggagttccagaccagtctagcccatatggtgaaaccccgcctctactaaaaatacaaaaatcagcagggtgtggtggcgggtgcctgtaatcccagctacttgggagcatgaggcaggagagtcacttgaacccgggaggcagaggttgctgtgagccgagatcatacctctttactccagcctgagtggcagagcaagactccgtctcaaaaaaaaaaaaaaaaagttgggggaaggagagaaaaatagagagcccagtggggcaaccccccacccagcccttgccacctgccactgctccagccgggctgttccaggccaggaagctatgccatctgcttctggcagagatcaaacttaattcgttcccagcttgttaacttaaagcccattagaatctttcccgtcaatccgtacacgcagtggagatcagacagagatggggtgaagggccctgctcgggacacggttccctggggaggcagaaggagagggggctggctggctgggctttgaggggacgagagcctcccacctccttagtctccctgggtgcagggagtggctttcatagaagtcagctcctctcattcgcacagggacctgggtaccagtgaaccaccttttgcagaccagggagccagctggtgagtggtgaggcaggggtcccactgaggaatggtgggtctgatagcatgacaccagacatcatcatggtgacacattactgcatttctgctctcagcaattccaagacagggtcaggactgggccaccttatggtgggcccaaggaccaaggctggcaagcctgaccatggacagaaacaccccttgcaaactcgctgagccccaggatcagagtccctgggccgttctgtgtcagccccatgtctgcctttgccgggacaggacaccacctgcttcccctgcattcaggcaccatggagtcaaacttgcaagagaaaacgagacccacggccaggcgtggtggctcatgcttgtaatctcaggactttgggaggccgaggtgggtggatcacctgaggtcaggagtttgagaccagcctggccaacgtggcgaaaccccatccctaccaaaaatacaaaaattagccaggcatggtggtgcgtgcctgtaatcccaggtacttgggaggctgaggcaggagaatcgcttgtacacaggaggcggaggttgcagtgagccgagatcatgccactgcacttcagcctaggtgatggagcaagactccgtctccaaaaaaaagaaagaaaaaaagaaaatgagacccaaccatctggtccaaacaagcaaattcaatcaacaaattaagccccatgatcctctctggagagggcaaggcagcctgtgtgcgctgaacggcagggctctgcaggaacagggaggggctggcgctcaccgcaccagctatgcaccaggctctgggctaagagtgtcctctgctcagaacctcacagtgactacaggaggggagacatcccagacagatgggaagcccaggctcagagaggtagaggagctcacccaagtcacacagtgaggccaggcagattctggttcctccccaggccccggtccctccccagcccgtggtcccatcagccctgcccggttaagctgccccactggacgcccccactctcattccaggcccctcttcctgaagaccagagaggtgcgccccaggccaggcttctgggactggggccccaagccataggtggcctcctggagcttcatcccccaggacaccccaggccggagaggtgcggtaaagtctttctgggactgtgggcagcagctggaggcaggcccaggacaggaggagcctcctggcccagctccaggagctgtcggctggaaggagcacttcattatcagctgggctgctgtgaaggaggttatggggaagggaggcccaagggacccgaggtcagcctggagtcccctttccagccggctccaaacccctccatgcagctgggcaccccaggccctgcctgagcctatgaggtgcctccccacccaacccccactggaagcaccagccatacccaatcatgcccatgcatctgtaaggtgtaaggactagtgttgcctcctccaggaagccttccctgactgctgcatggtaggagtgactctgagcaccctgagcacacatcatctcatggaatcctccctgtgacctctgtgggaggctcaagggaatgaggcccagagaagtgaaggcagctgcccaaggccacccagtgtggaagcttgaatcagctcctctctgggcctcgtgacagggctgggtaccgaggaggacctgataagtgttgttgaaagaattctgtcaaaagggctgggtgaagggactactgttggggacggaggggcagggatgctgcccagggtgcagccgccaccctgttgaccccagatgaaggcaggaaggatggctagattcccacagattcatccagtccctgagcacctacataatagctcctgttttacgcctttggcattaacgtgcccatttcacagatgagaaaactgatgccagagggcctgaggccagtgcaagattcccagccgggctccaagggagcacagagccaagacctgaaccaggtctgcctgggccccgagccactgtccttcccacgaccccaggtcagccaaggatcctggccttacctgggccttacctagttcttacctgggactttcctatgctccttctaaggcctctccccgtggcatcagcgtctgcccggcatacacactactcggaggagcctttgtactctctatttacaagaggaggctgtgagcaaattagcagggtaa

SEQ ID NO: 1882912 - DNA, 4001 bp, Homo sapiens
acgatatgcatgtttaagggccaagtgccccaatgtctgccactgactttgaaatgcatggaaatttggaattggcaggtagatggggagctagatagatgtataggtagggatcagaaaaaccagagagcagaatgcgggcagtgagcacgtgagtgttcactgtataattctttccactttttaaaaaatagagatgaggtctcactgtgttgccctggctggtctcaaactcctggcctcaagtgatcctcacacctcagcctctccctcccaaagtgctgggattacagggtgagctgccacctcctggccgccttcttctttttttttttttagatggagtcttgctctgtcacccaggctggagtgcagtggtgcgatctcggttcactgtaacctccgcctcctgggttcaagcgattctccttcctcagcctcctgaatagctgtgattgtaggtgcatgccaccacacctggctaatttttgtgtttttagtagagacggggttttgccatgttggccaagctggtctcgaactcctgacctcaggtgttccacccacctcggcctcccaaagcactgggattacaggtgcgagccactgcacccggcccttttttaaaaaatagagatggggttcttgctatgtaatctagactagtcttaagctcctggccccaagcgatcctcccgcctcagcttcccaaaatgctaagattataggtgtgagccaccatgctcagcttccactgttttttatgtttaaaaatttcatagtaaggtgaggcaggaggattgcttgaggccaggagttcgagaccagcctgggcaacatactgagacccttatctctaaaaaatttttaaaaattatctgggcatggtggtccactcctgtagtcccagctactcaggcagctgaggtgagaggattgcttgagcccaggaggcggaggctgcagtaagctgtgatcccaccactgcacaccagcctgggagacaaagcaagaccccatctctttaaaataaaacataataaaatgtgtggggggaggagaggccgggcacagtggctcagcctgtaatcccagcgctttgggaggccaaggcaggtggatcacctgaggtcgggagttccagaccagtctagcccataatatggtgaaaccccgcctctactaaaaatacaaaaatcagcagggtgtggtggcgggtgcctgtaatcccagctacttgggagcatgaggcaggagagtcacttgaacccgggaggcagaggttgctgtgagccgagatcatacctctttactccagcctgagtggcagagcaagactccgtctcaaaaaaaaaaaaaaaagttgggggaaggagagaaaaatagagagcccagtggggcaaccccccacccagcccttgccacctgccactgctccagccgggctgttccaggccaggaagctatgccatctgcttctggcagagatcaaacttaattcgttcccagcttgttaacttaaagcccattagaatctttcccgtcaatccgtacacgcagtggagatcagacagagatggggtgaagggccctgctcaggacacggttccctggggaggcagaaggagagggggctggctggctgggctttcaggggacgagagcctcccacctccttagtctccctgggtgcagggagtggctttcatagaagtcagctcctctcattcgcacagggacctgggtaccagtgaaccaccttttgcagaccagggagccagctggtgagtggtgaggcaggggtcccactgaggaatggtgggtctgatagcatgacaccagacatcatcatggtgacacattactgcatttctgctctcagcaattccaagacagggtcaggactgggccaccttatggtgggcccaaggaccaaggctggcaagcctgaccatggacagaaacaccccttgcaaactcgctgagccccaggatcagagtccctgggccgttctgtgtcagccccatgtctgcctttgccgggacaggacaccacctgcttcccctgcattcaggcaccatggagtcaaacttgcaagagaaaacgagacccacggccaggcgtggtggctcatgcttgtaatctcaggactttgggaggccgaggtgggtggatcacctgaggtcaggagtttgagaccagcctggccaacgtggcgaaaccccatccctaccaaaaatacaaaaattagccaggcatggtggtgcgtgcctgtaatcccaggtacttgggaggctgaggcaggagaatcgcttgtacacaggaggcggaggttgcagtgagccgagatcatgccactgcacttcagcccaggtgatggagcaagactccgtctccaaaaaaaagaaagaaaaaaagaaaacgagacccaaccatctgggccaaacaagcaaattcaatcaacaaattaagccccatgatcctctctggagagggcaaggcagcctgtgtgcgctgaacggcagggctctgcaggaacagggaggggctggcgctcaccgcaccagctatgcgccaggctctgggctaagagtgtcctctgctcagaacctcacagtgactacaggaggggagacatcccagacagatgggaagcccaggctcagagaggtagaggagctcacccaagtcacacagtgaggccaggcagattctggttcctccccaggccccggtccctccccagcccgcggtcccatcagccctgcccggttaagctgccccactggacgcccccactctcattccaggcccctcttcctgaagaccagagaggtgcgccccaggccaggcttctgggactggggccccaagccataggtggcctcctggagcttcatcccccaggacaccccaggccggagaggtgcggtaaagtctttctgggactgtgggcagcagctggaggcaggcccaggacaggaggagcctcctggcccagctccaggagctgtcggctagaaggagcacttcattatcagctgggctgctgtgaaggaggttatggggaagggaggcccaagggacccgaggtcagcctggagtcccctttccagccggctccaaacccctccatgcagctgggcaccccaggccctgcctgagcctatgaggtgcctccccacccaacccccactggaagcaccagccatacccaatcatgcccatgcatctgtaaggtgtaaggactagtgttgcctcctccaggaagccttccctgactgctgcatggtaggagtgactctgagcaccctgagcacacatcatctcatggaatcctccctgtgacctctgtgggaggctcaagggaatgaggcccagagaagtgaaggcagctgcccaaggccacccggtgtggaagcttgaatcagctcctctctgggcctcgtgacagggctgggtactgaggaggacctgataagtgttgttgaaagaattctgtcaaaagggctgggtgaagggactactgttggggacggaggggcagggatgctgcccagggtgcagccgccaccctgttgaccccagatgaaggcaggaaggatggctagattcccacagattcatccagtccctgagcacctacataatagctcctgttttacgcctttggcattaacgtgcccatttcacagatgagaaaactgatgccagagggcctgaggccagtgcaagattcccagccgggctccaagggagcacagagccaagacctgaaccaggtctgcctgggccccgagccactgtccttcccacgaccccaggtcagccaaggatcctggccttacctgggccttacctagttcttacctgggactttcctatgctccttctaaggcctctccccgtggcatcagcgtctgcccggcatacacactactcggaggagcctttgtactctctatttacaagaggaggctgtgagcaaattagcagggta

SEQ ID NO: 1882913 - DNA, 4001 bp, Homo sapiens; identical to SEQ ID NO: 1882911

SEQ ID NO: 1882914 - DNA, 4001 bp, Homo sapiens; identical to SEQ ID NO: 1882912

SEQ ID NO: 1882915 - DNA, 4001 bp, Homo sapiens
tggcagtggggctctgccatcccgcgtccttatcagtttattccgtgtccaatgagaactgattccttatctgagtgaatctggaggacatctctagaatgctgccaccaggctctagcttggatgtggatgagggtgcaggggcgacagagccaggagccatcagaatcccacaaactgaaataagcatcagaacaaatgaagaaatgaaacaggaagaaggtccttcactcgaaccccaaatccactccacagacagtggttgggaagggcttggggcttttcttgacaggaaatgctacatgatcacttatctgattcctggctgtattactagaggtagatcatatagaaagagggaggggatgggccagatctttggcattgcccagaccacagtcagcagcagattcagtttgtgtgctgtatgacaggagacagaggcacagtggaacaactcttgggcaggggctgtaatttggggtccctgggaaggatctgaaagggaaggaatacttaaaaagaaaaatctagggaggatgtggatgccgccttcaaatctatagcaggggtaccccagggagagggcacccacaggttctttatggcctggaaccaaaccacagggaagagaaggactctaacagttggggctgcccgagatgggcagagctgtctggggaagctagtgagctcactgtcacaggaggtttgcaagctgaggctggcagctgaagccagggggacttttcaggtcccttagggcctgagagttttcagccatggctccaataggaatgtgaatggcgtgtggaagaacaaggtgcgagatactgatttgggggggcagggaggcttctggaaggaggtggcatcgaggaagaagggaatgtcaccttcatggaatcagcatcccgggcaaagggatgtgcctgggggaagttgggggcagagggtggattgtagggccaggaaccagttgtaggtgtgggggagtggggtctgatcccaggggagggcagcaggataaagagcagagctgggggtgaaaattcccaagaacgaagaagtagaaggacgtggggaggaaaggcccacttcgcccatcccctctaggttttgcttggagctgtggctggtttgaccatgcctcagaggtcaggccctcagccccccgactggctttggggccaatctcaatgccacctccagggtagacttgacctgcgtgcccccatctaccctggccctgatctccctttccccagccctaccctcatagacggagggtccagaggaggatgcgggcatctctcctcccagcccttctgttagagaagcttcctggtccagccttcagccttctgggaaggtagcaggtcagagctggccggatgcctggagaagatctgccctcattacacagatgggcaagctgaggtcaagagaggcaccagacaggtgccaggggtctctgagggcaggacaggggttcggtggggctggcagtgacgctcgtctctggccacggaaaaggagctggataattctccatccaccctttgtcatctaccctgatcctctgagcaccagggcagagagggcaggacactgaatggcaggagctcctggggccacttcccaacctggcagcctgcccaggaggaggaactgggctcctcctggcagtgctctgcctcagtttccctagggagggctcctctgactcaactcctaggcctgtcacggtctaaaagcgtgaaaacggctcctggattttctgtgtctgtagggagcttggtgggggagggggtaccacctggtgacagccccaggcactcggtggggagtgggaacgaggatttattttagctgctggggaggtggtacgatatcttaaagagaggaggcccctctgagccgcctctatcaaagctcctaactaccccctctccccatgagtccccactttgatggggtgatgtgagcccctcacagaacatgctcaggccgggcatggtggcggctcacacctatactcccagcactttgggaagccaaggtgggaagatcacttgagcccaagagtttgagaccagactgggcaacatagtttgaccctgtcgctacaaaaaaaaaaaaaaaatcaaaaagtagctgggtgtggtggcatgcatctgatgcatctgtagtcccagctgcttgggaggctgaagtgaaaggatggcttgagcccgggaggttgaggctacagggagttatgattgtgccactgcactccagcctgggtgacagagcgagaccctgtctcaatcaatcaatcagtccatccatcaatcaaacaaacatacctgccctgcttccccactttttctcagccctccctccatgcagccaggtgtcactgtccccatttcacagaagagtaaatagagccagaggggttaaggcccagcctgatgagtcccatcagttctctcagcccctcaacctccacctgcctccgtcctgacgcgagagcaccgaggtggggtcagtgctgagctagtcagtggccactcccgtgaggcactcagaaatgaggtgggaacaagatcagatgtggtggttcacgcctgtaatcccagtactttgggaggccgaggcgggtggatcacctgaggtcaggagttcgagaccggcctggccaacatagtgaaacctgtctctactaaaaatacaaaaattagctgggcatggtggcatgcacctgtaatcccagctactcgggaggctgaggcaggagaattgcttgaacccaggaggtggaggttgcagtgagccaagatcacaccactgcactccagcctaggtgacagtgcgagactctctcaaaaaataaaaaaataaaaataaaagaggtgggaacaagccctgagccccaggctgagagacctcagtccctgccccagggtggccaccccggatatccttgccttggctgcagagagagacctggccttgccagcagcgtgggctgaccctggccaactggcggtatgaggcagacagtaataattgtgcgcagcatgctgggaagtcagaagtatgattacccctgccccacgatgggggtggcttttgtacagctggtcctgggacagtggagtggggcttgtaactgtggctgaggcctaaggcaggacccaagccaagtggcaacatgactgtccccttgtgcctgctgggcccaggtctggggactggaaggaggcagaccgaggtccaatggcaagaccgacagggaggccaagtgcagtggctcacacctacaatcccagtgctttggaaggctgaggcaggaggatcgcttgaggccaggagttcaagaccagcctgggtaacacagtgagacccccgtctctacaaaaataaaaattaaatttaaaaactgttttaaaaaaagactcacaggagattcctaagagatctgatccgtgccacctcgggactggggtttagtggtgcccagggctgggacacagtaggcaggtctccccttatagggcccactctggaaagggagcttgggacctctgggctccacctgaattaaaaccactggagccaggcatggttgtggaaacctataattccagctactcgggatgctgagttgggaggatcgcttgagcccaggtgtttaaggctgcagtgagctgtgattgcacccctgcactccagcctgggtgacacagcaagacctcaactctacagatgtgtgtatgtgtttgtgtgtgtgtgtgtaaaccacagggccaggagagtagagaatgcactttccaggcagctgtcctaggggcctaggggacccagagggcccagacagagcggccggccccaggctcgcttgcctccccagccacagggagggggcaggcagataggtgagggaggaagtccctggcccagaggctgagacttggccttgacaccagtgtatcaggcaaggttcctctctc

SEQ ID NO: 1882916 - DNA, 4001 bp, Homo sapiens
acagagatgggggacagggccctgggggaggctctcgcaggtgggtctcaggtggccctcactggagtgggagtggaacttagagaggaatcttccaagggcatggcaggtgtggccaggtcctaggcagggactggcctgggaggcactgggaggttgggactgccctgacctctcctacctaaccctgcaggccacccaggagcctgtgggcctgatgcctggcacagaagccctcagtaggtccagccccggatgcagaggaagcaggttgagcagctagaggtataagtctccaaacagcagtgccagcagggaggcccccacctggctacagatggagagagggaggcccggacatggttctctgtagaggggaggctgcaagacacagggaagggggcctggctgtggcaggggcaggagtgcactgtccccacccatctttgggaccagaactggggaggagaccccatgtagggagcttggctgacctgggctcaagacgtgaccccgtgggtgctccctgagtgagtgacactgaccacactcccaacctctgagcccactcttctcactttctgaccactcactggcaagatggcacaggaggtggtgtctgcaatgttataacccatgtgcaggcatgggcagggcgggagctcctccaaccttggtgctgccaaggttggtgtttcaagccctctctagggactttgctcttccgactattcaacatctcccctccctttagaccgtgcaaaaccctctcttctggctggatgtggtggctcaagcctgtaatcccagcactttgggaggccgaggcaggtagatcacttgagctcaggagttcgagagcagcctgggcaacatggtgaaaccccgtctctactaaaaatacaaaaattaggcaggtgtggtggcacacgcctgtagtcccaggtacttgggggactgaggcaggaggactttaacccagaaagttgaggctgcagtgagctgagattgcacgactgcactccagcctgggcaacagagcgagactctgtctcaaaaaaccaaaccgaaacaaaaccttctcttctcccaggaaaacttccctatactgctctccccctctgatctccaagaccctatggtctttaactctcttggtggtcagctctcctcctatggtcccaaggtgtccaaacagaccagctgagttggtgccaggcagtgctggactgggctctgggagatctggactctatcctgggccgggccctgtgtctcttggtgcctccacttccctatcagtaaaatgggattgctggagctgtgtgtggcttctaggggctcctgattttgatgcagaagtgatggccttggacattgaagactgggctgtcattccattgggactagggacaggtagggggttgcctctccccctcacaggctgcttctctgaggactggcgttggagacaaaggaagcccagccagggccccctgtggtgctggccctcctcggagcactgggcgggtagaccaccctccccccatccattacacccccccacctccggtttttctaggctcagctgggctgtctgccttctcctcctgaaaaaatgtgttttttttttccccatctctgatgggatgggggcttcagagtggtttttggtgctgggggatggagcgaggagggcaggggaagtctaatggagtccctgctcatcgcctttccaggccacggcctctcctaaccccacgaccagcaacccagacaagagaccccagccaccagcccggctagacagtaggtccagccggcatgggggagggggcggcggctttccggcggtaaaaatagcgctgacaattggaggaccaaaaaaaaaaaaaaaaaaaaaaagccggtcttcagcccccgcccgcgcagcaattccgcaccccagggccgggtcattccttaaaatatttatgagtcggactcgccgccccgcctaatgggcccgcgaccaatcgatgcgcggcacagtgggcggtggccctgggggcggggagaggcaggagccccgcccacctccagctggcaccccccacctcctccccagcaccatcccagccacaggaggccaggagcaccgggaagaggagggatggtcagtggtcccacaggtcaaactagctatgcagcacctcaaaaggctgcgccccactgccaagagacccccccttcctcctgcaccctcacttagctccgtcctcagagcagcagtcagagaaccaagtgcatgaagggggagacggtcagaactaagggttctctcctatgtcctggggtgggcagtgccacctaccccccaatgaaccattcgctatggggaaactgaggccttttctttttagacaaagtctcactctgtggcccaggctggggtgcagtgcactgcactttgaacatagctcactgcagccttgaactcctgggcccaagcaattctcctgcctcagcctcccaagtggctgggactacaggcacaagacgccatggccaggtaattttttttttttttttttgagacggagtcttgctctgttgccgaggctggagtgcaatggcgtgatcttggctcactgcaacttccgcctcctgggttcaagcgattctcctgcctcagcctcccgagtagctgggactataggtgcgtcctaccaagcccggctaatttttgtatttttaggagaggcagggtttcaccatcttggccaggctggtctcgaacttccgacctcaggtgatccgcccacctcagcttcccaaagggctgggattatagatgtgagccagtgcacccggtcccaggtaattttttgatattttggtagagatgggggtctcactatgttgcccaggctggtctcatgcagcctcttcttggggtacctccttgcctgacacaagagacaaggcctcactctgctcacctccaccatcctcagaaaacctgcccagccatgccttctcatgtccactgcccttaggggtcctcaggaccttagcagcactggcctggcccactcagcctcactctggacaacataggctccttcaatcctgctgttcctcaagcaccctcctggcctcggtggggcagtcccttccacccctgcagcctcctctctgcacccctccctgggcaggacacagatgctctttgggcaggtcatccctccggcctggagtgactcccacccgctgactaggtatgagtctctctctcccctgcagattcaggaacacagcacacagcgcagtctctgcttcactgctgaatacgtgggcgttggttttcaagcccgtgttactgctcacctccgcagagaccacatccccacaaggtaggctctgaaccagggcctcctgccagatgtggctggaattccccaactctcccctcccagaatatctgagctcactccaccaccccggcagaaggcaaagtaggcatggcttctggtcttaacttaacccttgaacttgctgtgactttgctgcagagtggatgggtgggggccttctggctggcgatggggacaggtgtggattcagagcccttgggacttgtatgcctctgtatgggtgattaggtactagtggtcttggctgttctgagcattagtttccctagctgctcttccgtgcagataactttctagtccaaggctcggcctgagcagcatcgcttggaggcagctattgcaacagccctgcacccaggacaaccccaggcctctcatgccacgctcagcctttgccaccgccacgggagggtgggagcccttctgctgagccccccggcttttgcagacatcccaagcttgacaagccctgctggcaccggcgtctgcagaccctcagtcccaggggttcccacagttgcctttgacagttgttccccagcaaagggagccccactgcctgggcatctccctatggccacctct

SEQ ID NO: 1882917 - DNA, 4001 bp, Homo sapiens
atagcgggagagacctggatgtggacttgagcagcggtgacttcgcaagcaaatggattgtcaggcttgatgcaggcagatgacctgtttcaggggcgtccggctggcagggatgaattcattctggaccaaagatccggggtccaggggctgctgcgggggctgtgctgagccggagagaagtgtgcaaacccatgagctcccaagagtctctgctctagaagcctcaactcctgggcctgcctgtcagtcaaagcaggaacacttcttcctgcataactcgaaacacctttccacaggcttcttgtccacagtagagtttaataaaaatattcactgaaagacccccccccacccccatcggcccaaagctgaataagttagttagctgtgtccctggtcctttgcgatggtgtgaggctacatcctcccccagatggctacgatgttggagtccgtcagggcggtgaggtaggtgaaggaggcattggccaccactgtgttcaccatggtcttggtcaccacctggccaagggcccagggctggggccacttcaggatctggtggggagagaggggagggctgggctgggctcctgctgaccaaaggcagggcccctgatgccttgccagcccaagcctgggcagggtgagccgggcagtacctgtgtgggggcctgcagggctgccggcagcaggggtggctgcttcaggatgttgctgacgtcgtagagccacacgttgccctcctcatccccacagagcacaatccccttatctgccgggacagaggtggagtctgagtgggggcagagctcccggaagcccgcgggatggggcgggcaggggggcaggctcaccagggcaggcgctgagcgagaagtaggccaactcggtggacgaccattgcagccgcgccaggaccaccactgccaccgtggactggctgccccggcccccccacgtctgcctccagctccacaggcagatggtgcccaggccgctccccttggaggctgtgggggagaagggagagctgtgcagggtggcccctcccagacaccttctcccactagagatcctcagaagcctagcccagggacaagcggtccatctgtgtgcccggaggccaggctgtcccacaagctgagctcactcacccacgatgtcctcattcacaaatgccagcccatccactctccgtccagatgcctcggagccctcagagaagacgaattccacttcacacaccctgtggggcagcacgagatgctagttggccattccttgcagatagagagctgcccactcacccaggcatctgcagcgcacctgctggggaccctgccctgtgtgaaggctgcacagaagatgccaccaaagagatacattcttggccccaggaaggttcagtttgccctggaagggggagccagcacctgagtgtcccgagtcacagtagtgacccagaggcacgaggggtggctcttccaggacggggctaggccagggggttggataaggctctgaagcgagccagtgcctctgggaccgagtgtgagatgaacaggggcctcctggcagccaagtagagcaggtgtttccaggccatggcccagggggctgttgggggcatctgctctgactcaaaagacgggggaatggggggccatggcccagggggctgttgggggcatctgctctgactcaaaagacgggggaatgggggaatgagggaatggctgctgcatggttcagagctgagagtgtgtgggagtgtctgcttggagaagtgtcccggcagctacctgactctcggaggctagcctggagccaggagagtggcccagcagctaaccatgggccaggcctgagccagttgggcagagggtaagagaagaagcatcttagacacagggaccagacatacgggcagggagggaggcggcggcccaggggctgctggtgagaaagagaagcccataactaccgccgccaccacctctgccgccaaggcccctgctgctcctttcaacacagcagctgctgtgtcgaagctcctcctgggctgtttgttgtaggtaagctaaaaatccaaatcttggcccagggcagtggctcacacctgtaatcccagcactttgggaggctgaggtgggtggatcacctgaagtcaggagctcgagaccagcctggccaacacggtgaaaccccgtctctattaaaaagacaaaagtcagctgggtgcaatggctcacatctgtaatcctggcactttgggaggctgaggcgggtggatcacctgaggtcaggagttcgagaccagcctggccaacatggtgaaaccccatctctattaaaatacaaaaataagccaggcgtgttggcgtgcacctgtaattccagctacttgggaggctgaggcagaagaattgcttgaacccggtgggggggtggaaattgcagtgagccgagatcgtgtcattgcactccagcctgggcaacaagagtgaaactccatctcaaagaaaagaaaattagccgggcatggtggcgtgcgcctgtaatcccagctactcgggaggctgaggcaggaggatcacttggaacctggcggcagaggttgcagtgagccgagatcgagccactgtactccagcctgggtgacaagagggagactctatctcaaataaaaagtaaataaatagaaatgcaaagcttaccgtggctgacgaagcccggcgtgccccgcccaggcacccttgccaccttgttctgggctgggtccacccagctgtggccacatggtggagcaggccagctggctcccctgccactgacctttgcacgtaccatttcctccatgcaagcacctccccaccctccgcccgctgactccctcaccaggctcccagggaggaaagcgtgagccccagaatatccatctgccgctggtcacctcagcagagtcccctgaggcccccacgctagtgtccctctgcccgttactctttttccgtctccttcgtagctggcatcacactgtgggattttgattggccacctttgctgagcatctgtcttccccagtaggctgggggccccaagaggacagggaccccttgccaagccctgtctcagaggccttccaggtgggacagatgagccagaaagcctcaacgtggcacttccaaagcctgcctgcccagacaccacctcacctgccctccgctagccatcggcccctctttacagatgaggacattatgccagcacagaggaccatcacactgctgatgagtggcaggagtgggctggatcacgtgggcacagcatggtgctgaagccccaggtgaaggggaggtcatcatggcccagtcccacagctgaacccagggtgagagcagggtcagagtcctttcctccagagcctggcagaaaggtgggacaagccagctctgcgaagaggcctctaaaaacaacccttatggttacccgggtgtgcccaggctgctgtgagcccatctgggccaacagccaccctctgcagaggcctggcttccaaggcgccccctgcccagcctcacctcctcttttggggctggtccagccgcacgtcccagcagcagcagccgccctcgcagccggccagcaggcgggcgtccgggcaggaggcgacagggcagaggcgcagggggatagaggtggtgtccagtgtgagcagctggctgccagtgggcaagggggaacagagcatcagacccagaccgaggtgtccctgccccagcagctggccactccccagcctcacccgaagcatcacctggcctggaattcgtagtcctggttgggcaccccgatgtcccagaggatgatccgcttgtcataggaggccgctgaagagggggtggggtaggggagaagtggccctgagatgaccctgctccctcctgctggctgcatcccaggctgagcccacggtcccaaggccagcccctccg

SEQ ID NO: 1882918 - DNA, 4001 bp, Homo sapiens
ctctagtcattgtgcagaacaagaaaaataagaaagtgagttaatctatctgagaacagaagttgtaaccatgtgtgactcagatcatagtcacatctcactcagggcttaatgtgttctggggggggttccaatagcttttaaattttatttatctccacgccctgaaagtccctgttgcagacatctcttattttgcctgcttcttggggcaacgtatttctggtgattgaggcaggattgtagttccttatgattcctttctccttagtgctgctcttgttccactcgctcctaccctcttgcctttccatccccctcccactgtctctctcattcctctcttgcttcttctctgcacagggatgagtttatgtctcaggcccttccattcagtctgccccaggccatcaccattggttccagcatgatgcatgttggccagtcagagttcttcccaggattacttccttgacagagctattaccaaagactctcactctcttctgggttcctaatctgagtgaaggagagtgttgctgagagctatcttgcctgctttcatgcctgctgtctggagacagctagtccaacggggtgaaaacagtcacaagttgtaaacacactgcttgagccctagttctagctgcttacagccactttacccctgcacttctttgtttccagttctgtgacaaagtgaattcactatttctgcttaaactagtctgaattgcatttctattactaggaactaataacatcctgatggaaaaatcgctatgtggaagtggggcataacaagtgaatactcctgaaagttagaattgactgagttaatttgggtgaagcataatgggaaacacagtcctcactgggagtctggatatcttttccactattttataacaattcatattttttccaaatatgagcaaatattttaattaaacatgaagagaaaaaaacagacttttaaaagtatgcagaaaaggataattaacattggatcccttgtaaaaatggaacctcagggagtctaacaaaaatgcaactttggctaacttttgctttttaaaattccttgtttgacttcacctcccactgcacaggaaatgacagcttctgggagacgggtggagttgcaggagtccccaggagcatcaaagggttcaggggttgtattctagcagtttctttcttttcttttttcttttttttgagttggagtttcactcttgttgcccaaactggagtgcaatggcgtgatctcggctcactgcaacctccacctcctgggttcaagcgattctcctgcctcagcctcccgattagctgggattacaggcatgtgccaccatgcccagctatttgtttgtatttttagtagaaacggggtttcaccatgttagccaggctggtctcgaacccctgacctcagatgatccgcctgcctcggcctcccaaagtgttgggattacaagtgagccaccgcaaccggctctagcagtttcttgatcttctctttcctggtctcactttcatctcgcactatcaccaaggagtgtgagtagcctatggagacctgctttgaaaagatgccattcagagtcttcacctcttgggctgcagtggaagacttgggctcatggtccctgtatcccaattacctaaaggttggttatggccctcagctgatggtgttctcattggcggccacaatgttgctgctcttcccacaagccaggctctggattctgcagccgcagaggtcctgcactgctttcaggtacatggaagattcatgggagatattgggctcccccagaaaaagagactaccaacttcacagacagcaaaggaccaggtgtaaccaacatggatctgggatgccccacacccaaggaagtcagactccaacctcaccaagcggggaccatctcatccttctgctctgagtggcccagtcaaccatagccaccaaagccccaggagaagactcatttcttggagtccagaatcaatgtgtggttagcattacaggtcacgtcttacacaaccgttattggctggtgggttcttgacccttagtaaatagaaatagaccaagaatctgagatgggcttgagcaaggcagtttattggagctctcagcttgagcagaaggggaggtagcagcaggaagagacctgcagctagctccctgactgcaggttagtttggggtttcatttgctttggagctcctccatgtgacatcattgcatgtttggggtggtttggcagttgcacctatgcagtctctggacatgcttcttcatgtgatgcatgtctcattagcatcttaaatctccacccaggggtgtgctttttactactgaaatgaagcaaaggccaggttaggacaggctaggacattactgggcaagtgcattggggagcatcttttgcaaagtgcccactgttagccaagatgcttgtgctcagaatactctgtctcagatttgattggtctattttgtgaaaggaaacgtttgtggttgtgtggctgcaaggttgaatgtagcttcagtcagcacagcatgtaagggaaatggggaggggtccctgccttgctctgggggtctcacaaccacctttggtacaggcagaatctacccatctttcattctcagtgaaggtgggccactcatcgtggcaccagcaccagctcacagccttaactattcactgtgcctgggtcccagctgaccacattgagggcacacgaaggaacagaggtctcctttgtcgcccattatacggaattcatttccactggccattctagtaattggctgcccgttgtccatgatctgtgcggtgctggggatgctcctgcgtggttgctgaggctcagctgccccatcttgttctccccaaaggcaaacgcagagcccgtttccgtcaaggccaaggtgaggttccgcccacaggctgcctacatactcacttcccggcagagacccgcaatgagtctgggggcttccattctcttggtgtcaccaggtcccagctgcgccttcttattttgaccccagctccgcagcttccatcgtgtcgtgatgaggatactgtgcgcagtgcgcaaacccgagaccgctgtccgcaccaggaccccgccaggcacccacatctatggggcccccacaaattctgaccgagattgaggtaagcagcttgctgtttaggcacttcttttccacccatcgagtcctagttggttgaccccgaaatcaaaaactgcccctttgcacttcgacccttgaagtctgatgcgctccttggtgtgctcagactccgcgacgaccgcggccccgccgctcaccttgttcacatatgcagccagccacgctgtgcccttgcctccgccagggccccatggagctgccacagcgctcggcctcttgggctttctgcccgcacgctgggacctccacgcttcccgggccgcctggggcccctgtggttaccgaagcccggttcttcccaggctactgcccagtcttcatcctgggcttgtctctgctggttggagttatgagaaaccagacagaaaaaggaagagaagtaactgttaaaaaaagacggatagaagggcttccccctacacccctgtcccttcctctcctccccagcaccccccagcactccccaccagaccaaggctccagcccattcaccagattcacttaaagtgtaacttatattttggaacttggaccatgtgtctgccaaggctcaggctttggtgctgggttagaagattgtgctggatgcttcctgtggccttcggtgaagtccttcataaaggaaccaagttttggttcaagcctggagtgcagaaggcaacgagggaagagaatgtggccttattaagaaagtctgatctgctttgagctgaatcaggcaagcacgtgctgtgcaaaaggagaattttgccccaagctaggcagttagtac

SEQ ID NO: 1882919 - DNA, 4001 bp, Homo sapiens
ctgctctccaggactcttcccaccacccctgagcggggtcggggcctggggccacatcacaggagagggaggtgcagcattaccagctgtggggcggccggacccacggcctgcctggcttggagtctgagcgcctccccagcccaccagcatggctgctggaccttgggcatcagctgctccgtgcctcagtttccccacctgcaaagtgaggcgatgatgtggactctgtgagctcgtggcaggagtgaagttggataaggaggccccaggcccggtcacaggagtcactgtccctcctgcaggggctgggctccccagtggccagaccaggccagagccttggggttgtgcttttggctgggacctagagcccccagcatcctagacctgttcctcctggaagcacagggctcacgctccagcgaccaccctgaccctgggtgggccgcacctgtagtcaccagcaggcagctatagtgacgccaggtttcgttccaaaatagttgtctctaagcgtttcctatctacctgctccatgcggtgcacccaaggccaagcctccccttcacctgtgtgcctctcctgaccctggctgccctggggcttaggccccacctccagccaagaccaggacccccaggattgctgcaaagagcacctttattcacagcaaaaggacgtcaccatagcaacaacacttcaattccctgagaacttttcccttatcattcgctttcctagctatgtctttgcaaagagaaaaacaacaagaaacacagcccacgggacaggtgagccatgctgggcccagcggggaggtggcagctacacaggaggagggcagggatgggaggttccagatgctggaacgcataaatacacagagtgccagacagtcccacttcagctttaaaaacaaagatgaccccgagtttggcttctgttttttctgatccacagaaaagataagataaaataagaccctcccccacccccaccctcccaagcaaaaaacaagaacaccctactttttacccatcccctttcaaaaaaaacagcacagtaaaaaaatactgtcacaatatttacagacacgcccactgtgggcgacttgctctctactttggagaggagattaaatgctgagctctgactcaccctgtcctggggaggcaaagggaagacctctgaggaggcctggaagactccccactcagaagagctgggaggggtgccactgtttgcccagctggacagccagccactgggggcttcgtggggccactggaactgggcggtggctgctgttactcttaagccacagcgtccaggccaggaggaaggggattgggtcacgcacccccagacccagcctcccctgcaatgagcatggctcagtgagtcgtacttggggctatgacacaggggccaggacttcagggcacaggtacccccagcacagagcttgtggtcagcaggaagagaaaggcacctacgcatcgcatccctgcaaagtagcccggagccccgtagctgtagaaagatccaaaaatcctaacagaattgccctcggagtggcctccgacacacaaatccttcctccaagcaggccctgcagcccactggccctcggagcagaggcacataagtggcgctggtgcccgcccctccacagagcagaactgcccagcagcctgctacccgggtgggcatgcagtacacacacacacacacgcacacgcacacgcacaggcacggccctaggggagcctcgaatgccgaggccagggcagcgcaacagggtccctgggccctttggataccaggggcgcccagggattgggtctcagccatggccactagaagatggcagtgcggggacaccagggtgtgtccgggtacaggtggcagtggatggagcggaacctgtgggaacagagcaggggctggtctgcgtgggtggcaggcaggtgctgagctcccatttgcagtcccacaacactggcggccccaccccgagcaagcaggactccgggggacacctctatgtagagtcatgccgcttagagagaccctgctgcagctccacgaggccccctgacgcccctaggccaccctacgcaagcccatctgggccggggtttccttacctggatgggtcggcctccaccgagaagggccccttcacgtggacggcgttccgcttgttttcaaacataccgtagctcagcgtcacctgtggggagcgggcggagtgatgccgggaggggcccgacatccctgggccccgccccaggctggccacacagccctgagtgaggcaacggccctgccctggcctcccttggacctggaaggacacctgccctgcacaccccaggaataaggtcccaaactggggaccagctggggctggctgcattgccagcgtggacaaaatacgcacagtaggcgcatcacagtgaagagaagagacggcaggaaaacaacccgccataaacagctttgagctcatggcaggagtgaccccccctggctgacagtggagtgctgcctggcctccctgtttagaacagtgccccaccccactgcgcccctctcggcagccacacgtcccttcctgtgctctcggagtcctggcggggcccggaggatggtgcacctgctcgtggagctccgaggtgggcacctgctgcaggttctccaggtgggagtggaagaggccgctgcggatgaggggcacacccagcagggcctccacgatgtagccgatggtgcagtcatcaggcagccggatccgctcagccgtattcatgaagtgacccccgctgcgggagggaagggcccagaccagtgagcagaggcgggagccatctgctgggagctggggaggccccaccaggcaaaggcgctgcactcctcagggagaggagccctgaggagagctctgggctgcagctccctctgcctcccctggccacagccagggcacactccctgcacagctcctgtgctccgtggctctctgtggagggaatctgggtgcagggaagagtcctgccggatggtgcctggggtgctcatcgcccccctggctgctctgagcaggtcaggcttgggggcagccgccgtaaacacagctgccctctgaaacccagagggaagtggaatataggaagtaagtgggcagtgccacacaggaggctggggacaccccatggctgggaagatgaactaagccaggccccacagtggcgaggagcctgggaccgggctggcctaacctgtgcagggcactcacctggcccacgggctcatcttcagagccagcccacggctgatgcagaagccagcgccgcccgtggcaaaccagaagtggacaggacgctgggagaagggagaaggtgtcctgagacccaggcgctgctgcccctcacggtcccacccccactccgggtgtgcgctccgcgtgggcgtgggggactgggaggggcaggcactcaccaccttgttctcgctgacccgctccatggcctggatgggcctgtccaggctgggcttgccgacgtagacgtcccgcgtgtgcgggtagctggccagcagccgcagcagggcccgcaggttgacgtagttgtcatcgtccacgtggcagaaccacctgaggacaaggcagggccatcgggggagggcatgccggggcgggcgctgccaggctcgggcagggagatgggggtcccccggggccacactcacttcctgccggactcgatgaagcggtcatactccacggccatcttgcaggacagcgcctggcggctgtgggcggccgagcagtttgtgatgaccacgttgcctgtggacaggggagcggctgtgagtaggtctgagccggctcccagagaggggcctggcctgggggacgccacagggcccaggggctcgagaaaagccccctagttcaagctgggcccggcggccgtagcctcccccaccctagc

SEQ ID NO: 1882920 - DNA, 4001 bp, Homo sapiens
gggcttggcagcctccgcggtagggctcggtcaaggtgaggtgtgcggaggcgaaggagatggcaagccaccggaagatggcgtggtctggagtctcctgggcctcggagacctcgtcctcatcctccccccgggctgctgccatggctgcggccagcagctgctcctgggtaggcgtgcgggccatatcgtaggggtaggatactagccgctcgccgccgttcagatttgctcccagcacgaaggggttcttctccatccaggcaatgatggcccggacctccgtggatacctggagtggccagcacgtgtgaggccagggctgcagctccggccactatccccaacctagcccgatcaccctccatgaagcttcacaccagtactcgcacgatcccctgtcccccaacccccagagcctcagcgtctggagttcaggcaccgtcagccccacccccaagcccagaacaccaggaccccagggtccagctgctccctcctgccctttcagccaggctgtagcctcaccgtggcatctggcgaaaggtagcgttcagggatgggcaagttattgttggggacccggtaggggacccatttcctctcctcagctccccagagcacagagttgagatccgggaaatcttcaaagatgtcaaagccctcctcagtccacagtcccagcgcccagttcccaaactctgagccctgtggggagccagcagggtaggcatcggctacccacacccccacaacccccagctgcctggaccctggccagcctcacccttcaacccaccatctgcgctgccacctcgtagccatcagggttcagtgagggcaccaggtggatgcgtgtgtcctgcaccaggctgcgcacacgtgggttcccatcgcggtactctcggcacaggtactgcatgagcagcagcaacagctctcggcccagcacctcgttgccatggatcccagcagtgtagcggaactcgggctcccctgcaagggcgggagcctcagtgagcactcagtctcccgaggcccagggcagctgaggaaggacccagacccacctcatacccgagggtctgggggacagctggggctcctagggccctgtaagacaagccagaatccccagagaggctccggaacaggcgggaggcagtgagctctgcacatcagcagcagaggccagctgctggcccccacagaccctcacccagttcatgctccccagggttgtctgagatctccatggcatagatcttgaggcctcgtgagctcttgcccaggctgtaagtgcgggtgatggtggggcactcctcgttcaccaccttcatgagctggggcagagggggaggacgtggaatcaatcatgcaatccgtcccccgctgaccatgccccttccacttccagggcctgctctatggcgagggacgggcatgaccccttcacgcagcccccaggtactggcctccttcctaaggtgagggacagccagcatccctggaaccagtagggactgggcccagtgacagaagcaccaggcacacactcccgtcagccacagacaggtcccacccccagccccaggatatatgctcccaacctggcgcatgtccttgtagctgtggtgccggaaatccaggtcatcggtggccaccacctcattctgtgcgtagtagctgtagacagctgcaagggaggcggggttgtctttagctgggtgccggctggcccaccctagcaccccacctccactcagagcccctgccagccctccacactcacgggccacagagcaccccagcacctccaggcgcatgcacaggctgccattccaggtgagtgggtagatgcggatgaaacgagccaccaccggctctgggagctcactcagcacgggtgtgtccttgtccacgttcccatgaaaggtctggggagaggcaggcctcagagcagtactgccagcccctctgagagcccacccctcgcccagacaatgggagcagagccaagagcctgggcatggtgcccaccatttcctcatagccgttggtgtacatcacccatgtctggctgtcattgctgaagcccacgaagaaggtggtcacaaaatcgtcactgtggagtggacagtggtcagagcaagggtcttccccctcccaggccctcaggtggcctgagcctccctcttccgagccccaagaatttaagagctagcagggtggtgctgcacggcccaggtgttgagcctgggtcctatgcccgtcacatagccatgggcaggtgatctgtccctaaactcatgtgctatcaggacacaggggctgactgaccaggctgaggagtggggatgggcagggtgagtccctcactgatctttttggccttctttggctgggccaaagaagggcccactggaatctccttaatgggacacagagccatgcctatgtagccactcccctctgccaactatccatgagcctggccacgcactggatgctggagtctctgccctgggtgatgacgcctgtgaaccgggtagtcctcctggtgtccacctctatccactgggtcctggcatcgtcctcggcacaccacgcaccatcatagtagtcgtcctcagtggcaccggtctgtccagggggcaggggaggctgagcatgggcggaggagtcccttatcccagttgggagatgggcccatcccaatgcccacctgcatgttgagccggccgcgctgtgcccccaggccgtggcgcagcatggaggaggctcggatctggttgtcctcaatacggtgtgactccatcccaatggggggacactctgaggacgcgtaccccagaatggtggctcactagctccatccttccctccaccaaacccagaaccaaggagcccagagcccactcccggcacatcgggggcacagtcagagggcagctctggtcagctggtggctccctggtgccctgcaccagcccacctggaatcgactcaaagccaggccaggagctgtttccaatcccagcctgtgcttcccctccctgggcctcagctgccccatctggagaacgggctgaccatgcccagctctcaggggacacacgtgaaatcacaggtagagctcccccagggcgcagccacagatgtcatccagatggggaccgtctgcacaatggccctgcagggatacctgtgaaggtacctgaggtcctcactccccaccaaggccccaggtcctccccctaccacgcccagccactaggggccctggggagctgccaccctcctgaagcaggccagcctggggtccagggctggggcagccaagcgaggctatcctgggctcccggggcccctcccttctgggtcccaagaatctgagtaggaaagggttccggggacctgggtcctgtttgtgacattgggccagtcacttgtcccagcacccccatcctgtggcccccaccctcacccccttgtgccccccacttactgactttctccgtaggcgtccactcctcctccaactcctcgccctttcggggctctagggacaatgaagggaggacatggcaccaagggcccgggaggcaatcaggagtccagatgctgccccacagggacccaggccccaagccccagccacacacctttgtggtccttgcccttctccactgcccacttgtcggtctcctccttggggctgctgtcctcctttttgggtttctctggaaggtgcaaggtaggaggggccagtcagcctggctctgggctttgaggaccatgtggggtggatcaggcaggccccaggtggccttcagggcaggcctggtgtgggaagtccttggtcccactcactcagctcctccttctcttcgtctgtctggcgctcagcatcgggcttctggggcggaggaggcccaaagtaatagtccactatggggagggagagccagctgaggctgccctgaccctgctgcggggcc

SEQ ID NO: 1882921 - DNA, 4001 bp, Homo sapiens
ctgaggccaggaatttaagaccagcctggccaacatggcaaaaccccatctccactaaaaatacaaaaattaggcaggtgtggtggtgcgtgcctgtagaaccagctacttgggaggctgaggtaggagagttgcttgaacccgggaggtggaggttgtggtgagccaagatcatgcccctgcactccagcctgggtgacagagcaagactcttgtctttaaaaaaaaaaaaaagaaaacaaaagaaaaattaagaatacaaacagctttgtaagtcagattctacttcgaggtaagtatgtctcccaacttagaaaagcaacctttttgttattagagctttttggatttttaaattgtggttaagaggttgttggattggtgataagtgggaggcacaggggagccagatgcagaacggtgcgctgtgctggctttttaatccatccatcacactggagccacgtgactttcatcagcactgatctgactgtgtcactggctacataaaacttcagtaagccaaacctaaccctggcaggacatgagacctggctgcaggcatccccgaattccatttgccatgttagaaccatgggggatagtttgtgattcctttatcctgctgcatctcacagctgcaggcctttgcatttcttctttggacatccgtggaaatgatctcattctcttcctgatgaactctgtgtccttcagagatcagctttgactttgaccttgttacgtcttttgtatgattttgccaagcaaaatcaactcactcctccatttatacccattacattttccccaccttagtcatggcgctgcgtggtgggactctcatccatcttctgttccctccagaatgtaaatattaagggctgagcctcttggcctcagtgtgcagttcatagtaatccctgaataaatgttgaatgaagtgcataagcccctgaaaagaattaagttcagaatttcttcctgaggacttgttgttttggcttctcttaggactttgcagtcagaatctgcatttcacagatcatccgtattctcttggatttttcatttatggaataccgtttgttacatgtaaccgctgtgacttgaacactgagccacactgtggattttgccatcatggtgcagagttaggagaaaggctctggagtcatctctggacttgaatctccttgacgcttactgtttttcttttctttctttctttctttttctttttctttctttttttttttgatgtggagtcttgctctgttgcccaggctggagtacagtggcgcaatcttggctcatgcagcctccgcctcctgggtttaagtgatttttgtgcctcagcctcctgagtagctgggattacaggcgtgcgccaccatgcctggctaatttttgtattttttagtagagatggggtttcaccatgttggccaggctggtctcaaactcctgtcctcaggtgatcctcctgtctcagcctcccaaagtgttgggattacaggcatgagccactgtgcccggcatgatgcttattctttatagatccttgcacacgttacttaaccttttgaacctcagcttcatcgtctctaaaatgggcataagtagcaactgcgtggtcgttttattgtgaggattcagtgaactgatcaagaagggtaaagcacacagcagagtgtgccagctcgctgagtggtaaataattctctccttctctttcaccctcctcccctcttcctcctgagctatttggcttgatctgacagcctcagattgtcttagagatttaggttttaatatcattgcttgtttgggtcactctgcttattttttttatcccaaggaggagcttcaaagtcactgtttacttgaatttcttacaaacataaatctctctccttttttttcctgcagatatgtcaggcctcattctaccttctgagccttggaaggtagaaagaggcctgataatctctacagaaaggcaacatgggagagggatttttatgttcatcagcacatttttatatatgataattcttcactcagagatttaaaattaagatgaagggtccttacagtactcagatcaagaatcctggggcatttgtacagaggattgggcttaaggttgtctatcttaaatattgtctgtttttgggagagcagaggatatcctttttaattactcccagcagtgctgttgagattctcagatacaggaattattatgatgattttgatgatgtaagactcttttgctttttgggaacatttgttatctctgtatagaatagagacagataactgactctactgggagcctcattatctcttctgggtgaatagagaccagtgtgaggcagaaataagatccctaaagctcagaaaatatctccaaaagtctctttgctaattttgagccccttagaaatgagctctgtaattcctggggaccttttcctcttctccattcttcctctgctccttgacaagagatctgtagacttccttgagtgcagcatctcagacatctggtattgactagaattccttattggacttccttgagtgtagcatctcagacatctagtattggctagaattccttattggtagtgtcagtgtccagggcttcctattttgtaaatgatagaggtttgtaaaaggagtatggcctttggaatgtgctgttcataatcttaagtagttatggaagcatactgaaaaggtcagggcagttctcattttgcatcaggaagcttttgacaaagtcctgttagttatcagatgatgatagccagcagtaaccattaagacagtcctttttttttttttttttttaaatagaagtccagttaaggaagcatagcttgtcttttattaaagaggcactcagcaaaggggtgatgagacagaatgctgttattactgatgcttttgttttacattttcagtaattaacgtgctttgctcagtagtggcacattacctgaactttgaaggatccccttagtatatcggtattgcagaggcattaaagcaatgagagcctgccaggatcttaatcacctctgtcctacatttggtcagagcctctccactttcaacagaagtgaacagaagtctagacacttgtgatttttctatatatcactaagccacatcattgcaagcatctgtttggcctatattcccttaaaaattctgtctgctgaaatcaacaatatctcctaaaaagtagctttaatatctgcctgtgtggctggataaaaagaaaaacaggattcttgctcttcaagatcttacactcaaagattgataaggctgctactgatacatatataaagcacataaaccattataaagtggtgaattgtatggcatgtgagtgatattttcattttttaaaaatgcatggactttgaaacaaaaaatgcacaaaacttctaggtggaaatgtggaataaattgtggaatccttatagaaaaagaatattgggagaatttgatcagaagatgattaagggggaatttgttttttctagttctaaatttactgaagagattgaattatgagacctatttgaagagagaaggggagaggctttagaaaaagtacagtctaagccaggcacagtggctcacgcctgtaatcccagcactttgggaggccaaggtgtgtggatcacctgaggtcaggagttcaagaccagcctggccaacatagtgaaaccccttctctactaaaaatacaaaaattagccggatgtggcacggtacacttgtaatcccagctacttaggagactgaggcaggagaatcacttgaacccggaggcagaggttgcagtgagctgagattgcaccactgtactctagcctgggtggcagagggagaatccatctcaaaaaaaaaaaaagaaaagaaaagaaaagaaaaaaagtatagtctaggtttaatgtagaacttgcaagaaatct

SEQ ID NO: 1882922 - DNA, 4001 bp, Homo sapiens
ccgaggcaggcagatcacctgaggccaagagtttaagaccagcctggccaacatggcgaaaccccatctccactaaaaatacaaaaattaggcaggtgtggtggtgcgtgcctgtagaaccagctacttgggaggctgaggtaggagaattgcttgaacccgggaggtggaggttgtggtgagccgagatcacgcccctgcactccagcctgggtgacagagcaagactctgtctttaaaaaaaaaaaagaaaagaaaaattaagaatacaaacagctttgtaagtcagattctactttgaggtaagtatgtctcccaacttagaaaagcaacctttcggttattagagctttttggatttttaaattgtggttaagaggttgttggattggtgataagtgggaggcacaggggagccagatgcagaacggtgcactgtgctggctttttaatccgtccatcacactggagccacgtgactttcatcagcactgatctgactgtgtcactggctacataaaacttcagtaagccaaacctaaccctggcaggacatgagacctggctgcaggcatcccccaattccatttgccatgttagagccatggggggatagtttgtgattcctttatcctgctgcatctcacagctgcgggcctttgcatttcttctttggacatccctggaaatgatctcattctcttcctgatgaactctgtgtccttcagagatcagctttgactttgaccttgttacgtcttttgtatgattttgccaagcaaaatcaactcactcctccatttatacccattacattttccccaccttagtcatggcgctgcgtggtgggactctcatccatcttctgttccctccagaatgtaaatattaagggctgagcctcttggcctcagtgtccagttcgtagtaatccctgaataaatgttgaatgaagtgcataagcccctgaagagaattaagttcagaatttcttcctgaggacttgttgttttggcttctcttaggactttgcagtcagaatctgcatttcacagatcatccgtattctcttggatttttcatttatggaatactgtttgttacatgtaaccgctgtgacttgaacactgagccacactgtggattttgccatcatggtgcagggttaggagaaaggctctgggttcatctctggacttgaatctccttgatgcttactgtttttcttttctttctttctttctttttttttttttttgagatggagtcttgctctgttgcccaggctggagtacagtggcgtgatctcggctcactgcagcctccgcctcctgggtttaagtgatttttgtgcctcagcctcctgagtagctgggattacaggcatgcgccaccatgcctggctaatttttgtattttttagtagagatggggtttcaccatgttggccaggctggtctcgaactcctgacctcaggtgatcctcctgcctcagcctcccaaagtgttgggattacaggcatgagccactgtgcccggcctgatgcttattctttatagatccttgcacatgttacttaaccttttgaacctcagcttcatcgtctctaaaatgggcataagtagcaactacatggtcattttattgtgaggattcagtgaactgatcaagaagggtaaagcacacggcagagtgtgccagctcggtgagtggtaaataattctctccttctctttcaccctcctcctctcttcctcctgagctatttggcttgttctgacagccccagattgtcttagagatttaggttttaatatcattgcttgtttgggtcactctgcttatttttttttatcccaaggaggagcttcaaagtcactgtttacttgaatttcttacaaacataaatctctctccttttttttcctgcagatatgtcaggcctcattctaccttctgagccttggaaggtagaaagaggcctgataatctctacagaaaggcaacatgggagagggatttttatgttcatcagcacatttttatatatgataattcttcactcagagatttaaaattaagatgaagggtccttacagtactcacatcaagaatcctggggcatttgtacagaggattgggcttaaggttgtctatcttaaatattgtctttttttgggagagcagaggatatcctttttaattactcccagcagtgctgtgagattctcagatacaggaattattatggtgattttgatgatgtaagacttttttgctttttgggaacatttgttatcctgtatagaatagagacagataagtgactctactgggagcctcattatctcttctgggtgaatagagaccagtgtgaggcagaaataagatccctaaagctcagaaaacatctccaaaagtctctttgctaattttgagccccttagaaatgagctctgtaattcctggggaccttttcctcttctccattcttcctctgctccttgacgagagatctgtagacttccttgagtgcagcatctcagacatctggtattgactagaattccttattggacttccttgggtgtagcatctcagacatctagtataggctagaattccttagtagtagtatcagtgtccaggccttcctattttgtaaatgatagaggtttgtaaaaggagtatggcctttggaatgtactgttcataatcttaagtagttatggaagcatagtgaaaaggtcagggcagttctcattttgcatcaggaagcttttgacaaagtcctgttagttatcagatgatgatagccagcagtaaccattaagacagtccttttttttttttttttttttttttttttttaagtagaaatccagttaaggaagcatagcttgtcttttattaaagaggcactcagcaaaggggtgatgagacagaatgctgttattactgatgcttttgttttacattttcagtaattaacgtgctttgctcagtagtgacacattacctgaacttcaaaggatccccttagtacatcggtattgcagaggcattaaagcaatgagagcctgccaggatcttaatcacctctgtcctacatttggtcagagcctctccacttttaacagaagtgaacagaagtctagacacttgtgatttttctatatatcactaagccacatcattgcaagcatctgtttggcctatattcccttaaaaattctgtctgctgaaatcaacaatatctcctaaaaagtagctttaatatctgcctgtgtggctggataaaaagaaaaacaggattcttgctcttcaagatcttacactcaaagattgataaggctgctactgatacgtatataaagcacataaaccattttaaagtggtgaattgtatggaatgtgaatgatattttcattttttaaaaatgcatggactttgaaacaaaaaatgcataaaacttctaggtggaaatgtggaataaattgtggaatccttatagaaaaagaatattgggagaatttgatcagaagatgattaagggggaatttgttttttctagttctaaatttactgaagagattgaattatgagacctatttgaagagagaaggggagaggctttagaaaaagtacagtctaggccaggcacagtggctcacgcctgtaatcccagcactttgggaggccaaggtgcgtggatcacctgaggtcaggagttcaagaccagcctgatcaacatagtgaaaccccttctctactaaaaatacaaaaattagccggatgtggcagggtacacctgtaatcccagctacttaggagactgaggcaggagagtcacttgagcctggaggcagaggttgcagtgagctgagattgcaccactgtactctagcctggatggcagagggagactccatctcaaaaaaaaaaaaaaaaagaaaagaaaaagtatagtctaggtttaatgtataacttgcaagaaat

SEQ ID NO: 1882923 - DNA, 4001 bp, Homo sapiens; identical to SEQ ID NO: 1882921

SEQ ID NO: 1882924 - DNA, 4001 bp, Homo sapiens; identical to SEQ ID NO: 1882922

SEQ ID NO: 1882925 - DNA, 4001 bp, Homo sapiens
tacttgggaggctgaggagggaggattgcttgaatcctggaggttgaggctgcagtgagctatgattgcgccactgcactccagcctgcacgacagagtgagacctgtctcacaaaaaaaaaaaagttacttaaaagctaaattatttttaacttgaaatgttccatggacttcacgagtaaatgttctggatttgccaagcagttttgatttcaattggcctgtctcctaatcatacacagacttacctaacacagattctgattttcaaggggttaagggtggatcaacccagagttaaccaacagcaggtcctaaaattcaggtatgtctggcagcaaacatcctctgtggcatttataaactcctactacccaggacgatccacacctgatttacattggctgcggtcaatgctgctgttttcaggaatatccctgggttgtttcatttcaaatctacctattatttcttcaagtgctagacctgaagaattttggaaaattaagatcactcctaagtttccacaccaccacgcaactggcagctagcatcccattctctgaaatgcggatgttgtacaaatactttttataataagctatctgctcagcgaaagtttccaacattagatggcatgaaggtcataagtagctcaaaaaccactctcttaaaaggaaaataagaactcctaaaacagccctcctcccaaaaaaaaggaagtggacctttctgggttccctggtttactaactgggcctttggagctgttctcctgaccaagccaaccccataaccactcaaaagggatttccgtaggtagaacttgcaaatggttaatgaatcaatgccttctccataaagcaagacccaaggaattacagcagtgaacaacggtggggatactggatcccccagagggttccataaacgttctgcttacaaggaggattaaagttctcgatgccactctctgggaccctgtcttgatcctcagaatctcaaccctgtggggagagcagggtggctgtcttactaccagacccactgatcagaaaacggaggctccaggaggtatcttgcttgccaagaatcaaaccagggccacccagtccagtcctgtctccttttgtgctggcatcattctccagcttggccaagctcagaggcaaggcaaggcaaggctgcagctttaagggtttaagagaggagacagccactttcattgaaacagccccaaactccttattagtggtcaccagtttacacaagggtaactcgttttgaaaaacaatacgcagaaagtcgaagtcaatcaagctcactgaaacctctactctcctccccctggcgcccaagagaccttgaactcttacccaattgctcccccgatctaagggtgtcccggctcccccaggagatccgggtacctgtgttgtgggggccgccgagacacctgactgcgaggggcactgccctcagggatgcaggccgggctggggggctcccgtgatccatcgactcagcccacctgatgctgcagggttagattcgggtcccatgagcatgcatcgagcgcctctcacgttaggtacccccagaattcgctgcctcccgaggcccattcatcgtacagatggggaaactgaggctcggagagttaaagtggcttagcccgtggggggcggcggcgcggggactggaccccgagccctgagataccgagccctaaccctcagccgagggcctgccgggctctctcggcccaagctgtggaaaagtcgaccctcaggccgccgcgggagatcagctctaggggaagggcgacgcggaggagggccggggtgggagccatgccttccgcccgagcgtcgggccagacgcgcagtgcccaggcccgagggcccaccccgacgcagagagccaggcggccgcggtgaactgaggcgcccggcaaaccccgagtcttggggcccgacctcacccaccccgccgtcgccgcgaaagatagcactcaccgctggcagcccggctgctctctgcgggcacctgggcagggctcaggcccacaccactgaggcgctaccaccgccttcgccggccgcgggggtgggggcgtggccattgggccgccgccccgcccactcgagccgcgcgtgcattcccggagccccgcgcttccccctgcaaatttgcgctcttggtacggcccggcccggccacgccccctcgcggctcggctgggtcgcccggcagagaaatgaaagtgcgtggttccgggggtggcggagtcgcctggagacggcggctgcggcttctacagctcggaccctgcaggtcaccgggccggctgcccaccttcccggggatcactgcagaactgtggctgtgcgcccgccggtctagcctcctccttcgggccgccgcttgcttgtgatcgccacattgtctcctccacggccctgtttcctcacctgaaattggcgaggcttcaggcccaagtcgtctccctgggttccctccatccagcctgacggcggagggcgcgcgtttgtttttagagacagggtctcgttctgtcgcccaggctggattgcagtggtgcagtcacagctcactgcagccttcaactcctgtgctcaggcgattctcccacttcagcctcccagtagctgggactacaggcgcgccaccacacctagctaattttattttattttatttgcagagatgcggtctcgctatgatgcccaggttggtctcgaactggtctcaagtgatcctccctcctcggcctctcaaagcgctgcgattacaggcgtgaggtcccacacgctgcctagagctcgcttttgaaggccggcctgttgggggtgggaagtgaccaagcaggaggcaagccctggatggaagaggagtggggggatacagagagcttctggggtttgaaaagtctggcagccttggttggggagtgaagcccacctctgcctcctgctatggtttctactttacagggtcatgaagattaagtggtataacctttgttcctaaaggatttagagcacggcattactaagtgttctcatcgccattgttattattactactactactattattactagctgtgctgtgaattccttttgcaacactgtgcaactcacttctctcagagccccttctccatcttttaaaaatagcccaggcacggtggctcacgcctgtaatcccagaactttggtaggctgaggtgggcggatcacctgaggtcaggagttcgagaccagcctgaccaacatggcaaaaccccgtctctactaaaaatacaaaaattagctgggcatggtggcgggtgcctgtaatcccacctactggggagactgaggcaggagacccacttgaaccccggaggcagaggttgcagtgagcccagttcacaccactgcactccagtgtggccgacagagtgacactccgtctcacaaaaaaaaaaaagttaatttataaaataatacataaatataacatttatatattatataaatgttatatttgttatatttatatattatataaataatatatattatataataacatatatgttacttattttttgaaacagggtctccctttgtcgctgaggctgggatgcagcctcgacctcctgggctcaggtgatcctcctgcctcagcctccctagtagctggaattacaggcatgcgccaccacaactggctaatttttgtatttttatttttcattttaaagaaagttgattgaaatttttttgtagagatggtgttttgccatgtttcccaggctggtctcaaactccagacctcaagcagtcctcccaccttggcctcccaaagtgctgagattacaggtgtgagcactgcacctagcctaatttttaaattttttgtagagacagagtctcgctatgttgcccaacctggtcttgaactcctggcctcaagggatcccttgcctc

SEQ ID NO: 1882926 - DNA, 4001 bp, Homo sapiens
gtaaaaaaaattactgaataaagcaaatattgaaatgtcacacccattggaaacatagcactactatgtcataatgataaatcttttccataccttcactggatgattcaattcgattatttaagacaataattcaacatcagaaaattaaagaaagaaccaaagtgatgacagtaaatgcttggtaatgattagtgactccttgccagcacacagatttcatcacccgcgtaattcttatttagcatggaccctcttccaagttattaggattcctcagtgatattcaaattgagtaacaaaagaaattggctcagtttatcctctgtttttatcactgcaagcctagacatagtgattaatccagaaatagcaattatttcctattttccctaaaaataacacttagaagctgggcaactcagctctgagactcagattgtgcagtttgacatctgatgattataatgtctgctgacctcaaactgtattgtatgaattacataataaccatgcatacaaaagaaagcagaaatcatgaggaatattatagtataaaatcattaatgttattttcttaatttctgcagaagtatctatgaaccttaactctgcttataatatttttgccataaagtagaatttcttttcattccatacaatacctcaatcttttcctttatagctttcttgttatcactcataggaagttattttgctgaaaaactatgtaacattcatgaataatttatcttaatttttttcagtctctaatatttaattcagctataattttgttataaggtatgtaacttagttatcaaaaatatttttccctggcaaataattcctcagttgtcttttgaaatggcaacgccaaaattgctatcaccattttacagatgagtgacagttactcacagggctaaagtgatagacagtggtgtgggcaccagctcaaacctgctctcaagaggcaattgcaggtagcatttctgaactccatattcaacaaattggatatgatggaaatacaccatgaaaatcagcaaatactacaagctttcaactttcctccctcccttcctccctctctccatctttccctcactcccttcctctctctccctctctctctattcccccctcccttcctccctccctccttcccttcttttccttccttccatccttccttcctccttttctttctctttctttctctctctccccatttctccccatttcttccttctttttctttctctttcttttggttccctccctccctttctttgttccttccttctttcattcctctctctcctcattcccttcctcccttattccctgttctcctcctctccttccctccttttcctaggtttaagggctttgcaagttctctttagtgcacctgggttgacctgattttgttgttctctactatgtggtttgggatgtggtttcaaaactcataccaccgcaacttattcattcataaagatctctatttcatttgagtaatcattatgacttattgtagcactggaggactgaggagtgctttggggccagaggttgggtaatacttaagaggaggtgttgtcagctgtttgttagaagagagacttgctgtctgaaactcagtgagttgttgcctacaggtcagtagcaaggccaggaacatgaccttggatttaagattttctgtcttttcaatggaaacaatatgctgaccatttctttcacttcgtaatccttcatcacatagtctcccttcagaaggtcttctcaaccaccactgacattgattgcaaagatttttaaaattctcatcactttttctctctggtctgacactaggggactgcttgtttggccttactcagcctagttgagcttatattgaggtttatactctattagatgaggggatgggttaacagaacaaaatagttctggttagttagttctattaaccagtcccctcgtccaatagagtcaaacgattctgaatcactgttggccattatcactctcatcactactccagtctgaccaacttttgcatagttatatatatagtatgtaacttagttatctaaagtattatatatataatattatatatatgcatatatagatagatagatagagagagagagagagagtctttctcagttgtccaggagtacagtggtgtgatcatggctcactgaggcttggatgtccaggctcaagcgatcctcccacctcagcctccttcctgggtagctgggattacagatgtgtgccatcacacctagctaatttttagtaaagacagtctatgttgcccaggttggtcatcaagttctgagctcaagggatattcccaccttgatctcccaaatgctatgattacaacaggcctgagccactgcacctggccgcaaagcaatctgtaattgttacagcttaccctgtgaggtgtaaagttgaattggaggtggggaagaagcatctctgacaataccccacagctttgtgtaatcccacagcttcttgcacaagagcttgcatatagctggagttcaagaaatatttgtggattggatggatgtacaaatgaatgacagtaaagaggctacatctgacaagggaggaggaagctgggcaatgaggatccaggggacaccagtagggaggtacggataaatctttgagatgggagaaaggagaggctgaaagcgataaggatataggaagcccgatgcaggcagaggacagaatccaaagagttgcacacaatgcaggtgtgtaaatgtggacatttaacagggatggcatatttaaagtggtatattttgagattttcacttgttttcttttcactaccaacaaagctgagtgtaatgattaattcttgaagatgtctaagccaggaaagggaaaagaaagtattcataactgtcaaacaatgaataatggacatttatttgacagttcttgaacattaaaattgagctaagttctacattataatatgaagtagttataataggcatataatatgtttccaaacattatatgccattactatgatgtgaaaataataccaaagatcagtactttcaacacctgaatcactttgtggttgcagtgcggcaattctatgtactgattgtctctgagtttttaacagtgtaagatggtataaaagtcatccatgatatctgtagtattatccaactgtgtgtctcaccagctgtgtaacttcaggttagtcctcactacctctctgggtttaaatttcctaatcttaaaatgaggtccaagctggaaaatccatcaagttcctttctggtctagcattcattgattctaggatgtaagattatgccgcgtaaatatggacaagactttctttttcattcccctctttccatgaagacaggctccttctctcttcataaaccatggacttatcctaggtcaaggcttcctggtccacaggagacccctggcggccaccctggcgaattctcttgatagatgttacctcccgcagttccgaaatctttagagggtttttgatgccctagaaagcttcctatctttgaactcttaacacctacaattgggttgatactactttgagtaatcttttttcacatatgcacaaacctttccttttctcttacaacccttaccccaagaaaatattttttcttttccctttactctttaatttcccttcctgttttatttctgaaataaaattgggtgattcttctttcattatttaaatgatttcatttctaaaaaatgtaataacttcttttctgattacgcaaggagaagcatgcttgttgtggaaaatttgataagtaataagaaaataaattagacacaatacaggcatacctcagaggtattagtgggttggttccagacaaatgcaacaaagtgaatattgcaataaagcaagtctcatgaggtttttggtttccaaagtg

SEQ ID NO: 1882927 - DNA, 4001 bp, Homo sapiens
aacagatgcagttttagagttaaatgtgtcccaaacactgcatgcaacacatttatccctaaaatgatttgttgtgtatctggaattctcatttaactgcgtgctctccgtttcttcccaaggctggcaggatccccttggcctcccgatgatgccagcagccctgccttccttcacagagcccaaggccagcaaagtccagaaatgcttttacttttatttcagaagaaaggacataaaggcagacacttccccctccccctccccacccctcccagctcctgcctcacccagaactggagtgaaaggccagggccaggaccagggtcccataaagcttgcccttcccccaacccttccttccctcaaagtggcaaggttagaaaaaaattaactatgttgttcctccctggcactggataaaggccccactgcagccaaggagaaagaggggggtccaggctcccctcccaggcagagaagctgcctggctggctagggggagggtggaggtaggttatgggacagagaggacaagaagtgccctgaacaccttttccctttaacctgacatatttatatatttacagttattagggagggaaggacatctggggtgacatcagttctgcaaaggcagggaataaaagccaaatagcacccccatctgggtcacattttcctgcctcctagcttctaaaaccttcagtgggaaaaggggaaagtggaggtagggggtggagggagggaatgtttgaagggcctgagcccacagctcactccgaaaggtgaggcagcagaggaggggcagccgagtcccaccaagaacagggccctgggcagaggagaagcagccgttcccgccacgctgccaggaccccatcgccacaccccggcccagcaggggctatgccaaacccatctcctccagcacactccgtggcgactcatcctcctaaggcagagacagacagagggtgacgcagagacaccaggagaggccgacagggtgggcaagacagcagtcacgaggaagagtcagacgggggaggcacagacacgggggagggggagagaagccaatgtgagcccaaggccggaccagtgagcccttcatggggcacccaccagcctcccagggccagccccagagccagccaacagtggcagggggggtccaggttgagtccgtcaccacccagagaacccaaagccaggaccttggtaagcaggggccccgccttgacacctgggggtaaagggagtgaagccgggacaaggaggtgggggatctttctggggccctggggggtacagctgactgggtcctgtttttcagagtggggaaaaggcagagggaggtgagtgccaggtccctgagggaaggtgaaccaggctgcagggagatgcgtcattagggtctgagcgcaacactggtgacacgatgggtgtgtgtgccagggcatgtgtgtgtgtgtgtgtgtgtgcgcgccagggtgtgtgtgtgtgcgtgtgtgggaaggtgaagctcgaccagtgaggtggcaagttcagttctgccctctctcccactgcaaagatgagccctccctcgccccccatctctccccctcctcagagccagctcaggccgggctcgctcatcactgcagattccggtgactcatctccctgcaccagggctcggtgatggcacagcagagagggggcaggcagtaatggggtgagggcgggggcgctggggagcagggagaaccaacatccaggtgccctctgccagcccccaaatccccatagccttttcctcctgagacgcagaggctttggagtatgtgtgtgttaaaaaaaaaaaaaagaaaaaaaaaagagaggtgggggaagaaatcagggaagaaaagaatgacctaccaggtgccccttctccaattctccaagcaacccttaactccagagcaaacccttaaccctttggtgttaagccttgctcagagaattggacaaaggagactgggtggccacgagacatctgggggcttgggagaaggacagagcttggaatgaggggtgcacaggtgggctatctgccaccctacctcccaccccatggggtcagggcttgagagtaagctggagagctgggcgtggtgggggtcagataccacagggagggggggctccttggcgacggtgggcagggcaggccgggtgtccaggggagggaggaccctgtccgccactgtgcgcttcctcctcctcctcactgtccctggcccgtacctcttgcagtaggtcagcctgctcgatggctttcagcacactcttcttggaggtgtcctggacatccccccccatcaaaaactcatccaggatgaagtaggccttctcaaagttgaagatgatgtccagctcgcacacctgggagggcggggagaggctaagttgagcatggaggggcaactggagccacttccttttcaagaccgtgcctcccaccttgggttctgcccccaacctccaagccttagtcattggtcagctttttcagtttttttgtttcgttattttgttagagacagggtctcttgctctgtcgtccaggctgcagtgcagtggcatgatcacagctcactgcagcctcaaactcctgggctcaagtgatcctcctgcctcagcttcctgagtagctgggactacaggtgcatgctatcacgcccacctcatttttaaaatattttgtagagatagggtcttgccatgttggccaggctggtctcgaacttctggcctcaagtgacccacctgcctcagcttcccaaaatgctgggatcacaggcgtgagccaccgcgccttgccttggatcagtttttttccctcttcctcttgcatctttcctcctgatcatgaaacattagttgccttatctacctttgtctatggttccccttgccttccccccaaaatctgtgacgttcttcccaccaaaggctgtggtagccccgcttcctggacactgtggggcagggaaagagggaattctggaccatggggtggaagacttgagttccaagcagggctctgccactaaccatctagctaaacaagtcatgaaacatctctaagtctcagttttctggcctcaaaaatggggataccaacacctactgctaggatgggataaggagcaaacgagaggacgcaaaagcactttataacacaaattatggagttactactacgccccatctaagatctgagctgtccctcagataagttaattcagaatctctgggagtggaacctggacattgccattcaaaaaaattctccagaaaactccaatgcaaatccaagatcagcaaccagtgataaaaatctgaatatggggctgggtacagtggctcacgcctataatcccagactttgggaggctgaggtgggaggatcacttgagccccagagttagagacccagcctgggcaacatagcaagacctcatctcttaaaaaaaaaaatacaaaaattagctgggcatagtggtgtgcacctgcagtcccacctcctcaggggactgaggcaggaggatggcttgagcccagaggttaaggctgcagtgagctacgattgtgccactgcactccagccataggcggcattcctccaggtgatagggtgagactgtgtctctaaaaaaataaaaatttgaactaatcaaaacatctgaacttggtctctgtgtgaaaagtccgagctaagctctaagtggagattaagtgcctgatcctgcccccagtttccccactcagggacgattatgggacatggttaataggcttaaagcttaaaaagggaaattaattactgttcttactgctccaacttcacctctcccctgaaacttccagggcagagactggaggggcctcaaagtttggtggattaccaaaggggattgctgggaatggaaactggtgggcagaggagacttacactgccaaagtat

SEQ ID NO: 1882928 - DNA, 4001 bp, Homo sapiens
cagatttcacttttcacagacacccttcccacctgtgctcccgctccgtgtggccgcagcccccgtggccctgtggaaacccagcagctccctgcggctccggccctggaggcctgaggtggccttgcctccaggagcccggcctcagccgtcacagccgggcttggccctgcacttaggatccaaagggcaactcttggcagctggaaaggttctcccagtccacaggccgccagaatcccttccggcgcatgcctgcctgagctgccacaatgccgcgtgctcactggccccccaggcctgtcccaggcgagctgagtaactgcagccacctgagccccggcgagggacagacagctatgcttcttcaggtccccgagggaggccttcgtccttcgtccatcgctgggcccatcatttactgagtagctactgcctgcagctgcagaggcctccacctcccactcctcacctgggcccctgcaaggcagccgaggcccagggcacggtcaggctgtgtcctggaggggagggtgggcagggcctctgagtgctgcacagctgcgtcccacatgtcagcccctcgcccagctggccctccctgtggctcagcacacgggctgccttgcggctggttcccggatggggagggtacactgcctggagctcaggggctggctggggtgagtccgaggccgggctccagcacagccttcaagtgaggcccacagtggggctgctggtactgaaatggcatcctggcttcccagtagcacattccttgagtgtgtcagtccctctggggaccatctggaggacgggggctagagagcagccctggtcattctccaccaagaccacacatgaggccccgatggcacagtgccgggatcctgtgtaattagggtctgggtgccctcgttgccctactcctctgaaagcgagccaggttcaccttgaaccctgcagaatgatgctctttctggcgtctttctctgtcttcctgggccttacaggttcttcggcagtaaatcaactaaacggtaacactcttccctccatcttccacattcaggcaaagctggccccggggagctcctgcgcagacgtccctcacggccagggaggccgcaatgaaggctgaacctggggaaggggcccaggtgcggtgtagacctcctctgtcatccagcccctcctgagggggcttgatgggcgtccacaagtgggcagcttttccgcgcttccccgtgtctgactgtgctgagggcctcctgaagtgcaattggttagtcacggtttagtgttctttactgcaatgctattttaagatgcaattaaaacgtctcattgccaaagtgcgtgcttcctcctgggggcctccttcctaacacgaaggagtcagaaaccaaggccgggaggagacctgagctgaagactcacttctggagtgggcacactttgtcccagctccgtcttcctggagcacccaggagagcccgctgcaagaagaagccccacggcaggccacgtggaggcgaattcacctcctacccagacagcgtgggcaatgctgaaacgagcgtgagctccgaatgattttagtgaggttcaaacctcccctcggctgtcagcctctgaatctcttccacttcagccacggccactccatggctaggggcggggaggggacactcagaagtttggtttcttctgaggggcctgagcacacactcaggatgtgagtggggccgggaagggcagcaagtggagcctatgcaggaacacttgtgcaaggctgcacggtttcactaccaccagaaggcaactaaaaatccccacaactccaggtgtgtcctggctggtgtcacggagcctcacacacggctgaaccgcttaactcacatccagccacagaacggcctgccaggggctccccggggacctgacgagggtcaacactttcccacgaccctctgccatccccggtgtgcccttggggagaagtgtggtggtcccacaggcccccctgccaaaacctcatgcttgaggaagcactcccagtggacagggagccccagctgctgctgctggacaggtaggggcccaggggcacaaggggccacctccaggctggggggagacctggggagagacgccggttgggtgctccactgcagaccctgacacgcgaggtgtgggacatggacggcattcgaggtcccaccccgctgaaggagcttgacacggagccctgcagggggcagaggcggcccagggagaggcgcaggcaggggacgcagcttgggacgggcctacagctggcccaggaaggtgctccccgaggctgccacgtgcccagcacctccccttggtgaccatccccccaaagctggggggagtccagggcccagcactcctttctccaggcttcccccaggacatcctgctgtggcttggcacaggccgggcactgacagaggggacccgtctggttgcatccgatccttcgatgctcctgcaggggtggaggggcgcgtgggtacagtcagcagggctgtggccgtaccgtgcaagccactccagcacctgagcgtgtcctcctctgcgagtgggacaggaaagcctgcctcgcacagctgctgccaggacggagacagtatgctgctggtcagtgagtgggcacagccagggtcactgtcccgccatcagaaggaggacaggggtgcggggaggaggggcctgagcccgaggctcctggactcacagtgggcacagggtctgtgcagccaaggccccacctggcgggcgcgggaggcaggccctgactgcagcggggagagcagagcgaaggggtctcctcttccctcctagcaatgctgtgtggctgatacgctgaccagctacttgacacctggcacagcctgctgggctcagggtggggagacgcatgattcctatcttgtctgtagctttcctgaggctgacgcagggcccagcgctccggagggagacttgatcacacacaggcagtgcacagaatgtcaatgtgggagaggccggcggctctgaccttggtgtgttacagcccttgccacctccctccgctgccctgcatggggactcaaaccacaaacagcagctcggaaacaagcagacacgcgtcggactctggttcacggggaagagcgctgtttaggagatggacgtgctccacgcagagacgcgtcgggctctgattcatggggaagagctctgtttaggagatggacgtgctccacgcagacacgcgtccggctctggttcacggggaagagcgctgtttaggagacggacgtgctccacgcagacatgcgtccggctctggttcacggggaagagcgctgtttaggagacggacgtgctccacgcagacacgcgtcccgctctggttcacggggaagagcgctgtttaggagatggacacgctccacgcagacacgcgtcgggttccggctcacggggaggagcgcgctgtttaggagatggacacgctccacaccacctctggcgtcctctctgccctcaggctcttgggcattcagagccaggagctgtttctggggaggcagagatccctccaagccccaggaaaggcctcctgctgcctcggggacaaagctgtgtcaggctcttctctccacgctccccaagggaggggaggtgctcagaaacagaccaagagactcagttggtgccaggatggtgcccgtgaccagggagatgtgcacatgcgttcagcgtcactggggaagggacagccacacaggcagtctcaggctgtagctgaaaccccaggcatttccctaaagcaccagcgtccagaactgaagaagggaccagccccatccggccccagaccacagtggggaaccttccagggccagtctccccctgctgcccttcccgcagggccaggggctggtcagcagcacaggccgcccccggcgctgcagtcctgg

SEQ ID NO: 1882929 - DNA, 4001 bp, Homo sapiens
ggtgttttggagagggggctgtgacacaagacggtgagtttgttctcacagcactggggcagggctgctgcctggtaggatccctcccccgggagccctgcctggtgccttgggcacttgggtgccatttgccttttttttttcttttgagatggagtctcattcctgtcacctaggctggagtgcagtggcgcaatctcagctcactgcaacccccgcctcctgggttcaagcgattctcctgcgtcagccacctgagtagttgagattacaggcacccaccaccatgtccagctaatttttggtatttttagtagagatggggtttcgacatgttggccaggctggtctcgaactcctgacctcagatgatcctcctgccttgacctcccaaagtgctgggattacaggcatgagccaccgcacccggcctggtgccatttgcttttgaagtgtcttttgcagcctcgcctcgctgtaaggtcttttcaactgaggtggggaatcctctttctggagaaaaaccaggacagtggaaaattattgacctgttggtacgaaagtagatacaggctgggggcagtggctcacacctgtaatcccagcacctcgggaggccaaggcaggaggatcttgaggccaggagttcaagaccagcctgggcaacacagggagacctcttgtctacaaaaagtaaacagcctcacatggtggtgtgtgcctgtagtctcagctgctcaggaggctgaggtgggaggatcacttgagcctgggaggttgaggttgcagtgagctatgattgcaccactgcactccagcctgggcgacagagcaagaccctgtctcaaaaaaataaaaagcgggaggaggcaaaggtagaagccctcctggggactgcaggtctgggacagctgtggggccctagctggctcctccctctgccgcctgctccacagctccgagccgtgtccgaaccgctgtgctgtgcccacagttcctggcctggaacagcccacccctcacctccgagtttgtggcgctcctcccggccctggtggacgctggcacagccctggagatgctgcacgcgctgctggacctgccctgcttgacggcggtgctggacctgcagctcaggtgggcccctcaccctctgccagcgctgcgtctcccagccagctggttccacacactgggccccctcctcgctgctcctgacccctacaccggggaccctccttcttccccccccaacacctgaccagtcctcccctgcaaagccacctctaggacagggtgtgtctgtcacccttggccacttgccaagggcagcccctgcaccctggagtgcctcacccgtcttcacgcccaggcctggagcctcccatgccaagcccttcctggcacccgaggtgctgtgatattagggacacctgccgtgtgtctccctgacgggggtgcccttgagtgcaggggccgcatcccagcctggccttgggcgtctgtccacgcaggtcagcaccggctgcatccgagaggccactctgggacacctctctcagggcccccagctgcctggaggccttccgggacccgcagttccagggtcttttccaatacctgctgcgccccaaggccagtggcgccactgagaggtacggggccctagggccagggggccaccagtggctcagagagcccggccacagccactggggtggggctcactgctcagccctaggctgaggccagggtgctttgtgtcccacacaaggctgcgtccccgtcatcaccattatagaggccctgcttctgcaccacgggtctgccgggggcggggcctggtctcagctctctctgctgcccacatcaaccctcataagcttggaggttggccctgtgggtgctccattttgcagatggacaaaccgagcctgagcccaggaagcaggaggcctgggaccggccacaggcctcctgccctcagcccacgccagcctttgtcccgatggctttactgtcccgggtgtgctgacgccaggggtctccccaaacccaggggagcaggaggtcccgagaggcgatgagtgaggatgggagcgggctcagctgtgcgagagggagcagtggcgacgtggccccggcctgcagtcaccaggtcggggagcgggcagcactcacggccacactgtgtcctcaggttggcgccactccaccagctgctgcagcccatggccggctgtgcccgcgtggcccagtgtgcccaggccgtgcccacgctgctgcaggcattcttctcagcagtgacccaggtgagctcgctgcctggggccccccattcccacaggcctcacaactgaggggcaggccagagccagcactggggggccctcttgagctctgcagaaggctgctcccgccacacccaccatccacggtccctgtgagggtcagggaggcacatgccacagccccggcaggccccgtcccttgtcccatcccctttattccagcaggccccgttccccagtccccgtcccatccccttcatcccggcaggccacgtcccccaatccccgtcccatccccttcatcccggcaggtcctgtctcccatcccagcaggctccatccaactgccccagcaggccctgtcttccgtccccaggacagggcaagtgagtggcctgggctctggccacacagctggggccggagcagtttgtccccctgctgcccctgataattcagcatccccatctgaggccaaaataaaggctcccacaggctggtgccccccatctcccccattgctgcttcccacctcggggagctctacaagccagtgcaggagagcctgggaggtggggaggccggcagggggctgggcgttgcttgggcgcacccttggccaaacaagacgtgtgcctggccttgcagagcgggagttggcagaggagccgtggaacagaagcgacacctctgccgggggcacttgggccagcccagggcttccctccctgtgcccggatgctgccagctgagtctctgtgtccctgggtgttggggaaggcagtggacgaggagtctccagcccctcacctgccccccagccctcaccatggcttcacccccaaccttagggcctgcagtgggggtggggctgagcctgtttcccactcctgacccccaggtggctgacgggtccctgatcaaccagctggcgctgctgctcctgggcaggagcgactcgctctacccggccccagggtacgctgccggtgtgcacaggtaggtccctcctgcgctcctgccacagccctgggcgggtgcctcctggactcctccccctctcccctcccccctccccttcagtggcttcggcaccacccctagctgggccctcagcagcctcagaccctgccacccccacccacagccccacacccagccccaggcacttctctctgcttctcaagaacattcccgtccttctttctgccgagcctgtcctcttcagggttagctcaggtccctcttccccgtcttgtcccctggggtccttctctccaaaggcctgatgcatgcaggcccatcctggttccactctgagcctgggcctgaggccagcgctggtgccagccttctccccagtgagaacagtttctctgaggctggcagtcttctgtgttcctctatcggagggtgcagcatacacctaccactcagacgcttcccgggtttctccaggcccttggcctggatggggatggggtcataggtctgcacagagcaggcgtagacccggctttctgggcagtgtgctgagttctcagttcctggccctgtgtacgctgaaaccctccctggtggtggagctggcaagagacctgctggagttcctgggcagcgtgaatggtctctgcagcagggcgagcctcgtcaccagcgtggtaaggcgggcgctggcctcccacagccgctcctgacccaggaggcctg

SEQ ID NO: 1882930 - DNA, 4001 bp, Homo sapiens
agaaactatgatccacatcacacaaagatttcatgtatttcatgatcaaaaagtgctttatctttgagaaatgtcagggttacaatggaaatatacaatgtaaagtcacttgatattttttcaagtgaagtacaaagtagaaaaggagcaaaaagatggaggctctgctctctgaacaggccttatgcatgtgacttttagggtgtacgaaattaaagttgttttaagaattaaaaatagtgggactttacaccactatattctaaaacctgagattggacatcaaaacagtcaactttgttattcatcagagcaattctgatacttcctaaaaatataagataactcaactgaattaactccagggtcaaaaacattaactttccccaatcaaaaaggagaccgatcactatataccaagagtgctgcagaaagacaaactctcagcaaatgagtcatttctacataagcaaaaaagtcacttttctccttccctttctcactgatcaaggccacactattttcaaatgaatatctactgagagatcagttgtgcattggataaagtaccataattgggttaaaaatgaaaacaaaatttacagtgaagaatacttatgtgcatggcttacacactccagcttctcaatttcatccacctcaagagcaagatagatgcaaagtcaccttgtgtagattacattctacacccctgtaaagccagtcaaggtcacatttaacaaagcatcttcagcaactacagtgcctgaagtgtgcagccgtttacagaccactcaatatgagggcattattataaccagcctcttttgcccacaaccctgcatcttcagataagacaggataattgttttgttttgagaaaactgaagcttaaatctcttaaaagacctgcaatttactgcaaagtaatccagaggtaacaaaggaagcaggaggttaacggctgcctgcaccaaaagcctctcaatcattttgcagtaaataattatggaaagtgatgtgacaagtagccatgtgtgtatcacagctacagtcatttataccacgtatatgcctccgatagttacatagggtgtttgggtttttggtttggttttcactttgatttttggtgccatacagatttatattttgttcttgtgcagcatatgcactgaaaaacttgctgctgttccacttgctgaaatgatagggacaatagaaaccaaaaccaaaacatagaaggaagagtagtaggatctcttcacagatttttattcttttgattctgttcctaaaatttggcttttcacctttgtaactatggtagtttgggaaacaaaccttctaacaattatatgaaaagaagttttagtttcctacttctcaggaatatgactattttgattagctgggatgtttgccaagcttaaaaaaaaaggctcaaaatcattcatagcaacaactgaaaaacaaaaaaattggttgtttcccatgtctgtacaatgccattatctgactggaattaacaaagaccatttcctttaataagctattaataatatttacgaatgaatctgtgttttgcaggtttctattgtccctagtgactggagtgaagatcagtgaaatgctacaattaatccacagccttctgcaatcttcctgcagtgggaagagaggccatgaaccatcccttgcaggagaaacaaaccttagagattggttaagacttaaaaacccaccactatgacattaccacttaatcttacataggcaggtcaaaattttaatataaattacttttgccaacacatagcttatgcattctttgctcctttttttggaggattttcaaattgatatctaaagatttacatatgatatattactgttacatggtctaatgactaagaaaatttctctggtaaccaaagctgatgccatatatggtagtgttcttggcatatactctatatgcctcagaccacttccacattctttctattcagctaattatagcttagtagccactggtgaaggattgtgaagaccctgtcatttctacagaatagaaaggcaaggctagttactgcaattcagccaaacaaaaagaaaaaagaataaaccaaccccttaaaaaggagaggtactgcacctttgcaaaattgaactggctcactgcagctgagcaacagaaccaccactgaagcaagaaaacaagttggtctatacaagaattgtacatggtttgaaaatgaaaaagttacagcaatcaactaatagctgcaacttaaattttcattgctgcctcagagttgaaacttaaatagtttctgcaaacctaatgctagcttctcagctcctttactaaaactatttaggaatttgttctccgcagcaaagaaatagacactcaaaacacgtaggtaaatacagcaggacattattgaaaaacagctgccttgtagtacaaaatacagtacaagtatacggatgtcattaaaacatcaaaaatactattgctcccatacaatttaggaaacattctttgcaacggagaaaaatttaaaagaaaagctttaaaaaaatctgtttaaaaattctactgtggatgatgagagtagagaaatagtctgaaaagggcaccaatgtttgtggctcttccactttttaatctaagatcaacaatattctgcatcataatctatttttttaaaaaagcctaattttatgtacacaattatttcccgccctctcagccacaaatacatgaaaacctttttgtatattactcatttcccaataaatacaaaaagattgtatagattgaataataccaaaataagataataaaaaggatatgcaataaattaaaaaggcagctcaaataaggggcaggcatgcagtttaaaaaaaatactaagattgtggaggcggggttacttgcctcctggttgagaaggtgtcacacaaagaatacctgaaaactttggaaagaacgttagctcccattcaattcaaagttacctaggtctatgacatttctaggaataccttttgatggggtgggattaacttgattagtaaaaatcatttctactgaaaatccatttaaaatatagaagaggcgatccttgaaaaccccaacttttattcttgaaagacagctggattaactggcaaaagccagtttgttgaaatttcaagatggtataaaaatgcttccaggatatagtcagcatattcacgttcacttcagttccattcacagatggatttcagcttccaccgggtgcactgcttgaatcactcatccatcatttgccaactctgattgtgaggtactgatacaatggatcaagttcttaaaaattttaaaagaataaatgatgctggaattctggacctgaggatctttagtatttgaacaaatccacagattaaactgaaggtaaattaagacttcagttttggttatttccaacttttctgtgaggatgtatatccattaaagctcaggcttatagccacactgttacttttgtaggtaatcttcaagttttatggtttaaaatccagccaaccagtggctgtaacagccgaattagccataattcactggctcacacagtggagatctggctctcattcataccaaagcatttcttggtaatgacctccatatttagagatcaggggaacaactttagtgagcagcaaccaatccactcaaacagtctgccttgtgctttatgcctgactttttcttgtgcctacctcagcaacccccaatgtaaaactgcttttatctttgaaaattttttgtcaactttgaaactattttagtaacggattctactccaagcattgctatctgaatccactggcatcctggaaaacaattctgcgaagaaaagacatttgccttggtccaggttccatgcaaaaccatttttttaaaaaaatggatccaatttggttctgtattcttagatggc

SEQ ID NO: 1882931 - DNA, 4001 bp, Homo sapiens
ggaaagaactcaacgggaatgaggaagagactttgtaaactcagaaccagggtaaagggccggggacaagggagctctgggaacccttgccctggcctaggggtggggccagccccccccacaggaactcggggaatactggtggcttagtcccagccatgcccgcccacttcacagcttcttcccccatccctcatcagcagacacaagacaggcagctctgccaggcctcttcacccccgtctgggaggcatcccaggggaggcacagcccgggagcagggatcccctctgggggcgttgggtctctggagtgtaagagggaacagagctggcacggtgctacttgacgggttccaccaccaggaccttgcactcgcgcttggcaatcttgtccagagacaacacagccttgtccgggggcaggtagagggggcggccaacaggagaggccacagggggcgtgatggctctgcgctccatcacactgcccgacctgggggaaggcagaggctgtgggcgctggtcagacccggcaccctcgctgctcccatcctctacccggtcccatgccacgccccctggttctgtacctcatgaggtggcttcgggaaggctgctggtgggagaaggactgggagcggcccaggctagcctgatgcctctccaccaagtcccggacagcagggctgctggggctgctcttgcgggagaggggccgggcctcgggtggagggtgggacacgctggcggtgaactgcagcttcagtttcatgtgctggcttagctggggggagacacaggtcagcatgccagctcggcttccaggacccaggcctccttccaaatggtcttccccatgtgacagactgatgtcaaatctaaatcccaccttccctctgcccagctttttatttcatccccaaaatctaagggtcctgcctccgtccaccccagcattctgcatcactcagcactcagcccagaccctccccagcccacctcgaagagccccgtcctcagagcctggaaggccacactgaaggtgagcgcgctgcccttccgggaaaagccaaggttgttgaggggcgtgtggcagacgacggagtccagggcagcctgcatggcccggcgctcctcctcacacagctgctttcctgggggcagaaacagggaccagcaaacactacagcgttcctcattcccacagggccttcgccagcacagtctcatctgattctcaaagccactctgtggagtaaactgagcaaacgttatcttttgtgcatgttgtagataacaacagctaatacgtactgtgtgcaaggcacgtcacgtatattaactcagtatctgcatgacagccccatcagatatgagttgctctattttaaaggtgaggactctgaggcccagagaggttaagtaacttattcaaggtcacacagctagtaaaggagagaagtagagttcacaccagcgagtgcagctccagtgtctatgccctgaaagtcactctgccccactgcctctctaaactctccatctaggacactggggagaccacccaggtacagggcggaagccacctgccacaagtcgcctcctgtgatggggctggcaccaaatttggctgttttcactgtcctgcctccctgactttttcctttctcttcccctccctggggaccaaattcctacctggcagctgacctaccagcctgtgcatgctctggggtccacacgagcctcacagcaaggaagtcttggagattgttaagcagcgtgtaggtgacagtgaaacgctcgtaggtccgaacaggggacttacaagaagcggtcatcacaaaacacgggcggtccaagcggacactgggcaggctaggagtggtgagagagggatgctggctgtgtgtgtcaggccacaaaggcgaacgccacgattcctccaggatccacactcaccggtagtgggtgtagatgctctgagtgaagggcagctttggggtagaccactgaaccacagcaatcaggggaacttccaggccctgcaggagggacaaagggggttggcacaggtattaagagtgcccctcccatcttgagtcagctgcctggtctttccctcccactgccttatcacttttctttgaacacaccagccccttatgctcacctccttggcccctggagggggctgctcaccccctctcagctgaaacaggaagttgtgttcctccagggcattcagcgggcaggggaagcagccagaggtcccgggtaggcggcagaaggagcccatggagacttccccagactggtgactagctcagaaaagaggacaaggcatggtctccccatgccagagctcagcccctgaagccatccccaccacttcacagcctcgcccctcccaggacctcaccagacattgtccaccagcagcacagagccatcgggcatgacaggtagataactggcgttgaagttggggaggattcggatatcccagatggagatttcctcctgagaggagctgttcagcactgtgggagaggaccagcttggctcagaatagctggacccctcaggccccacctttacccagaaaaaaccggacctaccccaccagcctgcccagaggaactgcatccaatcagttcccttgttgctcccggaggctggagccggcagccctgcttacccttgagcacggtcaagtgttttccagccacagtgaactgccggcatctcagaaccggagggggcagcagagtcagcagcgtgctcactgcgggagggggtgggggcaagaagtgatggtctggaggctgacctcacctccaacccagaattctcaccttcctcttctcagagcccattagccactttccagtgtgacccctcccctctgtcccccaattcccagactctagccctttgcctctgcgctgccctgcccaccttgggccttgaaagcgctctgctcgccccggaatgtctccccaggagatcgggtctgcagcaatcgcaggtagccttgatctctgacctctggtgcctcaatctcccgcttccacacagtcactacaatctgtcaagaggaaagacagatggctgagcccggaaaaggtgtctgaattaggacaatagctccactcttgctcatcttaccttggccttaggtgtccctgggggcagtctatccagtgaaacggtgagtgggaagatgacctcatctgtggacacaatcggttcctccacaggcagctggggttgggaaaggggtgaagaggtcaggagcaagtcagaggcagcctgcagcctttccctttaagaccggcagttcatctgcctcctgcctcaggcccccagcaaaccgcccctccgtcctgtgccaggtcccccaaagctcctcaccgtggtcgctccccctgaggtagcagggcccgggccgtgggtgagaagggggctgcagcctcggaacaaacccccacccccaggatcccctccccctgggggctccgaatcctggtcgccggcgccgccgccccccggcatcccgcctccggcgctgaccgaggccagggcggccagggcggttgccagttctgcccaggctcctctggagcccaagcccgggccgcccccggtgccggaccccgcaccgccccggcagcgcaacaccagcagaaaacggacagtctcccccaagtacagatggttgcgccggggcagcgcccggtaccggcccggatcccctgccagctccgcgcgcggcggcagcggcacggccgggaagtacatcgagtagtcgcactgggactccatggggcggcgaggacggcgcgactgggagcccggaccggaggccgaccgccggcggggcccgctagggtgggtccagagggtcccgacacctccggctgctgcgcccggctggggcggccggagagaccggcccggtcccggcaccggggcaacgaacccgaaccgagaccc

SEQ ID NO: 1882932 - DNA, 4001 bp, Homo sapiens
ccaacactataaaatatatttctgatacttgaaattatgaacaataaagaatcatcagtcataaaattcttagatattcctaatggaattggaacacgatttgcaaaatttttaaaaaagagtaatttgaagggattccatgttgaggtttctttttttagtttattactcaacttttgtatgaatatgtgtgttttaaaaattcaattacatattaggcaaccatcaaaacaagaatggatcatgatgccttcacaatagagatattaattattggttcaacttatacatttattttagattcttcttttgtggctctaaaatcttcagttaatatgagaatgatcatttgatgtattattaatttctggaccattttctcaccatcttcaaatcgaattagaagatggaacatgatgtcatatataaatcttatctgtcacttgtattagatatgctaaacactgggaagtattttgtttaaatctggctttcttcccaaaagtaacattctgaattctctttttatatggctgacaaccaaccaagagattttcttgctctagttggaaattcatggaaaccataggcaaatagtatgtccgaggataacaagtagaaaaccctatgcttgtattttcaattatatttttatttgctttaatgcagttttaacatcagtaacagtggaaatacgacaatctgtatacgagtagttataattcatgctgatgaaagtagcttccatcttatcattcttgcaatattgaaacaaactccagtgaacttgtttgaagctggttcagtagagattgtttcaacactgaaggaatgaaaaattagaacctctgttgtcagatgagcagtaataatctgcatcagttcctggtctggttcatatttgagcactgaagatggaattttcccaacagtagatgaatgtctcagtggccttcttcctaaaataacatacccattggggcattacgtttatacatacagtcatcccttggtatactcaggggattggttgcaggacctcctgtggataccaaaatctgaggatgcttaggtacttcatataaaatggtgtagtatttgcatatgtggataccaaaatctgaggatgcttaggtccttcatataaaatggtgtagtatttgcatataacctatgtacatcctcctgtattatttaaatcatccccagattatttatacctagtacaatgtaaatatgatgtaaatagttgttatactgtattatttaggaaataataaaaagaaaaatagtctgtatgtttacaatacaattttttcctgaatattttctatccaagattggttcaatctatggatgtacaacccatggatacagagggctgactgtatagatagatagatagatagatagatagatagatagatagatagatagacagacagatagatagatataaacatataaatatatgtatatgtatgattttatgtatattatatatatataattacaatcatggaattactactgcttaaaaataacacatatacaaatttcataaagtttattaaatgttaaacttttgctgataattttatacaaataagaattgctgggaaggtggtatcattttcagcaatacagagacaaaataaaaccagtagtgattggatgaaactaccaaacaatgtaagagacttcaaatatcctacttattataagtgttatgtctatactacttatttcagggggttaaataaaaatatgattatatgttcacattcagatagaaatgagatattaagggcatattgtttttctgaataaacatcagttttcaaagctttgcatataaaccatcttacatgatttttcaacatacaaacaaacaaaactcttaattgttgtcccatgtagcagtttagctgccgtatatgtgatgtcactcctaaaggttcaagtaaatggcgtcacacatacgaccaccaagctgccaccaacagcagtagtcagcagcccaaacatcatcagtttttttcagtcgacaaatactttgagtgcctctcacatgtcaggcactcttctaggttctggaaattcagcagtgaaccaaactggcaagccacctgctctcatagagcttacattcttgattttatccacactaatcatggaatccacaggaaaggaatctgatttgaaatggtcatatgcttatgcaattcctactgtgatgtaggacagtcagtttgcttttgggttacaggcagtttctagaagtacagagacagttacagagctgttcttcatggaactttgagaaatggtccatctctgcaatagttcaagcccactgagtgtatggacccaagctgctgtgctgaagggagagcttcctattgattgccacatgcaaaactactctaaaaagtatgtaaacctagaatccacaaactgatgcaaccaatgagattttcatgtcaccatccttaatgttgataatgtatataattatttttgcttttcagttacttacacatttcaaaataagaaaggacaaagcacactgttgtaaaaagtgttagccctggttttcccaggtaagatcagatgcctggctggtgtactgtgtaattctacttacattatataaacaacgaaactgcatatatcataaattcaaagcaaataggtgaacatagataagtaaacaagtaacaataacacctgctctgaagaacctaatttttatgtctttgttattaccattggctttgttgtcatcagcatcgtcactggcatctttttctgagagctcactgtataccaactgctgctctaagcttactgtatacctcgcaggagggagaggaattgagtgggtggttatggttaatggaaagaggctaattgaaggtggtgacccaaactgagactttaaaacctatatggaaatcgagttgatagagttcaatagttagtgtattttcacaacaatctattgtctaaaaagtaatatttcggattaattaggaacattgtcattaaaattttttttctctgagaagtgtcagtgtgaacataataaacgttttgaagaaaatggacatatcaaattttgttttatggacaaatcctccaaatcaaatatataatccaaatacagagagagaagcaaatttctctctgtcacagcaaagagagcacaaacccatttaagtgccctgttcagttatgcttgctggtcaagaggtgcccacaagccataaaatgtttctgtccatggctcatgcaaagatgtgcatttttttcaatatttaaattatagactacattagtaaaagttttgaataaaaatgacctacgttgctttttgaacacactacaaattttctaaagcctttgtaataaaaaaggtaattagataatcttcaaacaattttgttagtatttagttctttctttagtttttcttctgtcatgttcaatataattatttatgaagcatgattattcaaaaatattcacatataccagatcacttaggatttcatttgagctatgaaaaataacaatatcaataatatatagcaatatttttacatccatagaagaccacataaggcctgggtatttactggcaaattaaaatattctattagtttccatagtagtcttgtttagtgtttttattatatttccagtgacataaagaaacctgcatttccaaatactaattacttttagaaaattttactgtaatttatctaaagaaatatttaataggataaaatgataagacaaactgacaataaaataagttatactcattatccaaataggtgcaaaagggttgcattaatagtcattcccatacaccatttatttgatgtacaatattacaaaataaaaattgccttacaaattaaattaacatttatgaaatactagcaatatttttttcttgaataatataaagacaaacagtttagacagac

SEQ ID NO: 1882933 - DNA, 4001 bp, Homo sapiens
aaattagaaatttgtaagacaatttgaaataacaacaaaagcaacaaacatctagcacttcagattttaaaaattaaaattattatacaaaaaagaacaacccaaactataattttcaaccaatattaatatttgtgttgaacatttgattttgctatcatcacagtactgtacacttataaacatatctcatttaatcttacaaagcactataatgtaaatatactcactctaaattacaaatacagaagtgtagtgagttaaagtccctctcacaacatgtgtgaaactgtcagaattcaaacctaagctccttgattctaaacccgtgctctttttcacctggtcttagccaaaagactgaaaagcagcaagcctgtgctcccttaatgttaaccaggctatattttaaacatttagatgagactaaagcagttgtcagaaacaaattcatagctataaatgttcccaatattaaagaagaagtatcaaaattttataatgcagaagaaactaagctttaaactcaagaaattattttaaaaagggaaacaaaaacctctacagaattaaaaagaagtaactacaaaagtaagataagtaataaattataaaaatcaaaagccacaaaactctggcaaaaaagcatgagaaaaacatttaatattgggaaaaagaaaggaaagataaatttggagaataattattttaacagaatcatatgcacaattatttgataaatactacaagcatttttcttaaatagataatggtagccatctataatttaacaaaattaatgagtagagatatagaaaatgtgaataggcaagtgacttagaaaaatgttataataatttttaaaactgttgtaaaaaatgatttgagctttttaccagaagttttccaggaagggccattcaaacatttagagaattgatcatcgttctatgtaaaattttcaacagtataaggatgaaggggaagctaccaattggttttatataatcaagtgattatgaaataaatttcagccaaagataactcaaaaattaaaaaaacaaacttttaactcagtttcacttgcaaatgtagatgcaaaatgctttagtaaaatggtagcaaatggaattcaatagtacattaaaagagtaacatatcatgacaattaaagccattggatttagaaatgtattagtatcaggaaaacaaataacatgtcacttcacatagtctgaataagaaaatatatatatatgataattccaatacaagaaaaataaaacatttgataaaggtcatctccttaatatcatgtacaacacctactttaaaccaaaccccaaggccatattactgttaaaacactagtagagttattaaaacatcacaagaatgactgtttcagcattattaattaacattataaaacatttagccaattaaagatataaataaaaatgagaaatattgtaaaacagaaggcgtattatttaagaataatatgctgatacaccaactttagaaatccaataaatttaaattttagaaaattgcagtcttaaatgctagatttgcctgttactaaaattcattctgtacataattaaaattcacaaacaaatattttacttatacttctatcatttctaatcagctttttaaaagagaaatcttttaatacttattttcatcctagtagtttacattgtgacaccagctctaacaatatccacaaaaataacaaatacttggatgctgaggtgtgaattttgttcccatttttgaaagcaggaagagtaagacttccttttgaaggagatttgcacatacactatagaagacacccatttagttcttgggaagatggagttggaagtgtccgctgcttgtgaacagctcaacagcatggagtcctccaggttggtgcatctctaaacttgacccacctggagatccatggtgtcgaacaatgaactttccaaaccagcaaggcctccataaagtgaagggagatcctcttcaccaccgttggttgaagaataaaaaacctacacctacactagcccaaatgagtttctgttgtttgtcttctgtgtcagaatttcattcattcatttcccatctctggcctattgtttaaagttgctggccataatgtatactttccagactccaggttaatcccaggctgagaagctttgtttgtttgataatgaaaaactgaacaaggaaacaagcaaaaacttgcaaataatgtgtaccttatcataaacatccaaagagtacaaaattctgtgctctgcagttgctgtataacaaacatattaaattgtacttgattgagcaaatatttacatcttactgtggaatttcaaagtttaatgtctacacgtcttattaaggttgttatctattattgtatggtggagaaaggatatctagctgatagtcatgtttaaaaactgacctgggtttgggactgcaaccaaattctaagggcctagctgtttatgatttgcccattccattcagggtcgtcctaatcccttctcaatctaagatgcttcattctcactatagtttgctcgagaaagaaagtggctgcttatggtatgagttcataagagtcatctaggattgtgtttaataccctatcccaccagcttctaatttttacgtgcatttaattggggctatatttgttagttttcaattagaaagagacagataaaaagtaaactgcacacattatcagaggatgctatagcttaccttctcacttattatgaatttgccacctaaattcaaactcttctgaaatttataccaattattaattctgaaagcaattctgattatcttaataactagcaactgactgcaaacatagaaggatagctaggtggatagatggatggatggatggatggatggatggatggatggatggatagatagatcgatagatagatagatgagtttaaaaggaagatcacagaatcaatgttagtagttaacaattatttttatattttgttttgagagtaggctttgatggagcctaatgaaagccatagaagaagctaaggggaggctggactgttataaacaacccttcacttatctaatacaatttaactaagcttatcatttttttttatagaaagagaaattgatcagaatctactgacagttcttcctgtctggctgtgtaatggattagcatagagacgagcagcacacctctgtcagaaaacctaaatttaagtcacatctcggggctctaacaatttaccaccaacagcgtctttggaggtcagcccctgagtccatgattcccctgtattattgggaaagaattaagaggttttgtgagttatgcatgagatgtgtgtgcaagttctttgtaagctgtaaatcttacacatttatgaaattatcaatgttgttattttgtaaatgcaactgatcaagaggctaggttcttacaacaaatggatcaaaaagcgtctgtatgttctcaaaaaataacaatggaaatgggggaaaaaaatgacatcagggaatggccaaactgggttgcttagggtccaaagatcattgctattcaaatcactgcactacaagatcgggtgagatctgctaatctgtttgggtcactataggtcagggcacagcacattatagatgctaaataaatgtgttttgtatgaataaatacacatttttcttttcctgtagtcaatatttagtgtgtctattttcaaatttgcctacgtggtaaagccacagtgacattgaaaacttgccctgcaagtgcctgtgaatctgaactgtctcaatctgtttctagctggaatgcagctagaactgcatgcaacccactatacctttctatttttccaagaaccaaaaaccgcaagtccacatatttaatttcacgtaattctcacatgcctggatcttggaaatggaatttttcctttcccagggcactc

SEQ ID NO: 1882934 - DNA, 4001 bp, Homo sapiens
cagctcctcagagatcatccgcacctgggtggggccaggccatcaggaagctgggcagagtcccaggtgcccccagccctgccgatgcatagtcagggggagcttatgcttccagagttggggaagggcctctccagccaacagggctgcccaccctgactcaccccactcccacagcccctcagcccttcatggccagggacctccaggcagctagagatacgagagccagtgactccctgcacattgggacagggacatacccgccactgggtgaactcgctgagggactcgggcccgtagcggacatccctgacagccgacttcacaaagtccgcctgggccttctcagcctcctcttcaggacccagtgtggccatgaacttctcccagtgagctgtgacctggtgcaagagggaccagatccaggcccggcccaccccagctcctccggacccagccctccatctcagggaatctcaatcccgccacctgctggaagcctcctggaatcacagcctcataaaacacacacacacacacacacacacacacacacacacacacacaccccacacacaccccagcaacaacccaggtgcctacacacacacacacacacaccccagcaacaacccaggtgcctacacacacacacacacacacacacaccagcaacaacccaggtgcctatagtcccagccactgggaggctgaggaagaagcatcgcttgaggccaggagttggagcctggggaacagagcaagatcccatctctacaaaaaattttaaaatgatccagacgtggtggcatgcgcctaaagccccagctattcagaaggctaaggcgggaagatcgcttgagcccaggagttggaggctgcagtgagatacgatcacaccactgcacttcaacatgggcagcagagcgagaccctgtctctaaaaaaaaaaaaaaaaaaaaaaaaaaaaaaaaaaaaaggtaaaaaagaaacaccccagaaaaagctacttagaagagtcaggccgggtgtggtgactcatacctgtaatcccgacactttgggaggccaaggcgggcagatcacctaaggccaggagtttgaggccagcctggccaacatggtgaaaccctgtctctactaaaaatacaaaaaaaattagctgggcatggtggcaggtgcttgtaatcctagttactcgggaggctgaggcaggaaaatcacttgaacctgggaggcagaggttgcaatgagccaagatcgcatcactgcactccagcctgggcgacggagtgagactccatctcaaaaaataaataaataaataaagtagcacatcaggctaggggctgttggggcaaagagcctctatcagtcaccctcctcaacatcctcctgatgtccaattctatcattctcccaatgcccccacagctcctaagcacacaataatcctctcatccccttaccctgctggtcagctcccgattcaggttctccacctgagagtaagttgaggacgcatccttgccattgaccttacggagcgtgggcaggagaaaggagactttcaggttgtcattgacctggggaagagagggtgaagagcagtggctcaggagatgctgagcctgagcccaacagagtcctggccccaggtatgaagctggtgggaggctcccacttaccgtcaggaaggggttgccctccaggctgagttcctcgagcttggggaactggcacaaggcagtaacatcccccagctggttgttggcgcagcggaggacacgcaggtgggacaggcccaggttgtccggcagcgtctccaggtggttgttagacaggtcaagctcctgcagctgcgtcaggcggcacaggagtttggggtccaggtgctcggaaagcagctccaatcctgacaggctggagttgggggcagaaggcttagggggcgggcaggctttgcaccctacaccaatctgccccgggtacctcagaaggctttttcacctgacatttctcgtacaagtgtagccgccccgcccatccccccgttactttatttttagagacggggtgtcactcagtcgcctaggcgcgatcatagctcacagctgcctccaactcctgggctgagggatcctcccgcctcagcctctcgagtagctgggactagaagcgcgcgccactactcccgactccacaccacttaacaaaaaaaaaaaaaaaaaaaaaaaaaaaaaaaaaaaagctgcaactactttaggactcgggggcatcctagccccctctaggatgctcttcctgatccttcgggggctcgtctgtgcttcccaggccctctaacgatagcggcaggctgtgcccctaactgtccgggctcccttcaggggatgaggcccctcggggctcccggcgagcgggtggggccacgatctcccaacaagaagacatttggaccactctgccgaacccagagggcgataacggggacaagcgggccgttggggagggtccccgctcttctccccgaccgcccggccccgaggacacagcctcacccgctgcccggctcttactccagactccggatcttccccagccggtcgctcttggggcgcccgcgctgcattagcagccgcgccgagagggggcccatggcgaggaggcgcagcccgcgctgacccagtcggccaccccggcgtgtggcgtcgccctgcgtctcctggagcccggcactggcgtccgcggtaactgagcccaggaggcggcgccgcgcgagcccgtgggcgttaacgaccggaaggaagcggaacccaggcctcgtgcccccgcccggcgcggactacaactcccagcggcccccacggccgcgcctgcgcactggccacgcggacggcgcgatggcggcggctgccgccgagacccccgaagtccttcgggaatgcggttgcaagggcatccggacctgtctgatctgcgagcggcagcgcggcagtgacccgccctgggagctgcccccagcggtaaggggtgggagaggggccgcgcccacaaacgtcgctctgcatctggggaaactgaggtccagcttggccatgataggggccgggatcgaagcctgtgagggacccttacggtaggggtgatgcagggtgaggagatgagggctttaaggagcgggcttgggagtggggaaggagctggaacgtgggtgggttcgattacaggtcacctcggggactctggggggatctgcctgtaaacctcgacgtagcctctcgggtctggcgctgggagcttcacgggcctgcagggagatgacacggaaagggtcgatcgagggtgctgaataccagtccaacggtgcctgaaggccgtggactgcaatgggcaaggagacagtgaattccagttaactaacgaaaaggaactcaaggatcgctgcaacccaggagctggaggctgcagtgagctatgatcgagccacctcacttcagcctgggcgacagagcgagactctgtctcacaaaaagaaaataaataaaaaaagaaaaagaactcagcgcctttgggctggcatggaaggactgtggttggttgcaagggcattccaacccagaaaactgcgtggggtaggaaggtggattggtgatgcctcaggtgagagagatgaggctggagaggttgtggggggggggaggtctgatcacagatgctccccggtgcatcagctgagcaggctggacttgtcccaaaggccctggagagctcttgaagggttttaaaggagtgatgaagtcaaatgtgaattttagaaagatcctgggaagggaacgggcagatatgaaggtgtggaggctggtaagccagtgaagactgccccaacgtccatggtaaaagtgcccaaggtcctatggaaacagcatggcatgcctcatgaattaaacatagaattacccatgatccgcaatcctgcttctgggtatatatccaaa

SEQ ID NO: 1882935 - DNA, 4001 bp, Homo sapiens
tgttaaattttctcttacaaaaacatttatggattcatcattaaacatacatgttttggaagcttagtatttatcacgtttgtatgataactcggtagtgagagcacagagggcagtcccagtgttcagagagtttatggcagatagtcgaaggagagaaatgaggaacaaggaagtataactgtgtgacaggagactatcatacaacttatgccctgggtgctactgaagcactgaggggagggacctagcatttggagtaagaaacagtcatcagggaaggtttcatcgaggaagtagggttcatatgttttgaaaatgttatctatttgaacactctgttatcaggtacagacatatttagaatttttctaacttgtagtgaattttaccttttttcattgtatactaaccttccttatctctcagagcgcctttttccttgtgttgtcttaaaatattttttgacacctcatttttctcagtatcagtgagttctctgtgcttcagagtgttattctatgctcaataatttcacgtgtatttactcagttcatcctcataataatactatgagatacaaaccattatttcctctattttagaggtaagaaaaaacatgatgcacaataacttaataacacaactggggcaataaataggatcaaattcagacaccagcaccttgaagcctgaacctctccacacagtaacactactgtatattacaaatgatctcaatacgtttatactatagcactaagattggtatatgattgtaaccatactaattttctttttcttaaaaaagttgtatttgccttagttacctttctcaattcttttactttcaaattttcttagttcctgtgtgttagacatgcttctcagaaatagtattttgctagatttaagaaaaaatcaatagttctgtcttttcagtatagtatttcttaatatatttctaccatcttattttgctttttctttttgattttcctttattccttcttctccccccccttttggttgatcaaatatttttaaaatatcgatttcccctacaattgctttgaaatgtatgtatgtcatatctagtattttagggattatccttattttttttcaaaaatacttattaaattccaacatagcttaagatcttgatctttctcctgaacataatcctaatcacagtatttgaaacttacttctaatcacaccctatcatgctatagtctactttttgtcctgagttttagttctcttttttaactttaatattagtcattatcacttttataattttagtttatgtagtcaatatagttttagattttaccacatttgcatatttcttctgttattatgtcatcttgtatttctctcttttctggacatagttccattctttgacacacatcctttagtttagatggcttttaatgggaatgtgttggtactaaggtgcttctatttttacatttttaatttaaaattttttcattttttgtttttctgaaaatatcttaattttaccatcttccctgtttatttagcttggtatacaagtctatgttgaaagtttagtttctctcagtactttgagtatattatcctactaaattctaccttttgttttcacttttcttaagaagcttcctgactgttttaaaattgttccttagggatactctctcttttctcccttgctacttttatgttccgtggtaatgtgctgttatagcatgctgtgtttagtgctagattacctttataaaaatgtttaattgggatgtattgtcctttctgaatctgaatttttaaatgttctggaaaattcttagatgttacgtattttaattgattctccatcattctcccttttctctcctctgaaattctattaatattgttccaaaagtaattacagtttttgtcattacttttaatggcaaaaaccactattacttttgcaccaacctaatacgttagaactcatttttatactgtatattgtagaatttatatttaatgtttctaagtttttttaaatttctgaatgacattgtcgatattcaatctacctttcagtttacaaactcactctgtagctttgtctcatctgcttaatgcaactaatgagaggtttttttctttaaaaaaatttaacttatattggtatataataggtctatatatttatgggctacataagaatgtctaataattatatcagggtaaatggggtatccatcacctaaagaattcatcgtatacacaacagagtactattcagccatataaaagaatgagatcttgtcatttgcaactacatagatagaactgaaggacattatgttaagtgaagtaaaccaggcacagaaagacaaactatgtgcgttctcactcatttgtgggagctaaaaattaaaataactgaactcctggagatagttgaatgatggttatcaaaggctgggaaggatagtgggtaaggtgggaaatggtgacagttaacggttacaaaaatacagttggatagaatgtgtaagatttaatgtttgatagtacaacaaggtaactaaagccaacaatattttattttacatttaaaaataactgaaagagtccagttagaatgttcataactaatgcgtttttaattccaataatatatttttaattcctggagtatccatttatttccttatcaacaatgactggtaatttttaagtattatttgatatggtttggctgtgttcccacccaaatctcatcttgaattgtagttcccataatccctacatgtcgtgggagggacccagtgagagataattgaatcatggcagcagttccccccatgctattctcacaatagtgagtgagttctcacgacatctgatggttataagggactttccctcacctttgctctgtacttcttgctgcctccatgtgaagaagggtgtgtttgcttccccttccgccatgattataagtttcctgaggcctccccagcactgcagaacagtgagtcaaacctctttcctttataaattaccagtcttgcctatgtctgtattagcagtatgagaacagcctattacagtatatcttattcttttcttgtatatttaattctcattttacttcaaataatttatgaatgttttatttctcaatccccaaatttagctgaaattgaattcatgggggccaaatattccatgcggtgtttctgctgaattctgttcattatacttgttttcttgagttttatatttttggattgtgagtttaaatttttcagggctttgtcattagtaatcctataattccagagtgaatccagagaggggttacactttatttcaaaagataccagcttggaaccattttttctattttaagttcttgatttgggggttatatccaatagtcagtgtaaattcaaaagctgtaatttaattcagcaagtttatggcttatgcattctcaagaatcatcattttttttggaaaaagataaaatacagacaaatttccttgtcatccctctttgctgactagttaatttttctccagtgtctgctttactgtgaatttagcatttttaggttttatgtggtggggctaggggcgtgagggagttcctattctttgcacaggtctattacttgatttctaattctgtttggccttgaaatccaaaattctgcattgtaaagattagtaaataccctctgactactatagcccaccatcagctaacaccctgaatttcagtgttctctttttttcttgatacccaaaagcttctcctattttactggatgctcagatatataacttaaaagatgtatgttacattttatttagcatttctaggtgtttgaaactggaaaattttcaggctcccatgttgcctcgtcctaggaaatgtaatccttagagattattgtttctgtttcctattatgtgatgtgacattacagaat

SEQ ID NO: 1882936 - DNA, 4001 bp, Homo sapiens
aacaggctatactggtgaaaaccagaataaactcctctttgaatgggattctatttcaaatgacttctccaaactcaagaaaaatcacctatgagaaaaccttaataaacactctaagctaaactccccagggagttacaggatgaaaaggacttggacattttagagccctgttaacctgtgggaaagtgctatagtatgacttcgtttatatgcctggtagagaagagagcccccaaagttgtcactttcctgccctgtgaagctttaacggatttgtttagagcttagcggtcttatttcagctttctgctccctgactcgataagcctcagttcatcatatccttttgaaacattccttattactttgctggtgtcctccactcactgtctgtttgcatgggaggtttgttttgatgatgcaagactgtgcactgacctcaagcctgcgtcttcataatgtggatgattcacaatgggccgaagtgcagagagcttaacacttgccatcgtgggcatggcacccgcaaacactgcatctggaaggcaagaggaatgtctcaggaagacactcagtgaaggcgagaaggtgtctccttcaagtgtaaatcaattatttcacaggtaacagagcggaagcccagcaggttcatgacttcaagattcaatggcagaactagcatgaagtcagatggctgataaagtagcagttggcagccaggcctgggtaaactattttccttggaaaacagagcttcatcatctcatcattaaagatttctttctttctttaaagaaaaaatcttagaaatctttcctgaatctaaaaaagaagtatcaaatggactaggaaagctttacagtaacaaggagttctggaagatgatttagtattcaatcatttgatactcagatgacaacaaagtctccctttccacacatgaataaaatgtcacattccatgagtttatttcaagaaggaatgtgaaggactaatattaaaaattcattaagaaaataagcacaggaaaaattattttaaatgtggcatttatgactgtgaataaattttgaaaaaattaaaatctataaaaaatggcagaataaattactaagaacatatgtataacatttcccctgcaaaccatttaaacaggattgatatctcctttgttttagatattctaaaagcaacattgcatagaaagagtgagatcagtggaagtaactagggtttaagagtttgcagtggtatataaaattgtgggaaaaacagctaaataatatgactttttttttcttttttttttttttacctggtttagtactatatttgatccattctataagttcttcttggggcaaattgctgaactcccctacaatattccactgggtttgcagatttgctgaaccttgtattgacattgctgctaatatagcaaacacaatagcaccaggatgtactttgcaaaagagccatccaaatagctgaaaccaaattaagaatacattggtaattgttagtataagtagtatgcatctgttatgcaaaacttcttcccagagaagaataaggcctctgctagagtcccaaataaaggattaattatcctaaagaaaaagccccaaaataataatctttgggatcaaaaggattctaccatcagcctcatataagtggaacacaatgtaggaagctcttttctcaacctgctttcactactcccagattcaagtaaagccacaaccaatttacaaggcccagtacaaaacaaaaatgtggggtctcttgttaaaaaattaagacgttcaaaacagcagcagcaaacattcaatcaagttcagggtcctgaatgtgaggtcctgtgtgaccagcaggaaccccacacttggaaaacctgccctgggtgacactttctattaggttggtgcaaaagtaattgcgggttttgctatttttaacgacaaaatccacaattacttttgcaccaacctatatcatcagtcatgctgtgggataagactcaagattaaaggcttccaaccagcctcctttcctgtgccagcctgaaggggtcagaaaggtagaaagtagtgcctttctaacataatacaacatactgattgggaacctcaaggctggctaattttttccacatccaaatagtccacactccataacaacactttgttctcttgatctttctccacatgtctacagagctagatttcaagtttcttgagggcttataaacactggcttttgacttttctgtctactactctctcctccatccctagagtgcgcagtgtaggtgcttagtgactatctgctacgtctaagggaggtgctgctgttgtacctaggctggttgactgatggaaaggtgacactatggagaagcataaatctgtgaatacagaacaaggaggcagctatccaggaaaaataagcagcaaaccaccaaggaaggcttaaactaaattttaaaaagcacaagtcaagaatgtgcacacaaattgcaccaactgaaaaaaaaataagtttgatactaaaaaaagaacatataattttcaagcacttataacctgaaattattagatttctttgtgatatgaatgtcaaaacaaaaaaagttattatttgtacaattaagctctgctttctatcagcacctgcagtaatcactcatgaactcagtctgtactaaatcggtattagttgtacaccaacaactattttaaatctttagaaagatagaaaatgatcagctttggcccttaccctttaagaaagataagtacaaaaccatgaagagctttaactataatcacttaaaagactttgtaattcattattttagggccactcaataataaaggctaaaattatcatagtagctatactccaacataacatgttacctgtcttgagcagatcagtgatgccataacacacatgtgtggtgtcaagaagagttttagtctcataattaaaataccaagggctgtatatgctaacaattgcaatgcatggtaaaccagctgaaagaaagaagaaaatgttttttactcctactgtttgtgaagtttaagaatactaaactggcaatatgcagaaaggggtacgttctccttagtaacaaaaaatactactaaggtttctgaaacttcgaaaacaattcttaaaattcactttcaaactgttccattttagtggaaggctaaaattataaagtcattaaggcaagtgtttctgtgattctcagagtcaaacctgtggttaataaagcccacattttttaatcaaccttgatgctaccatcagaccaagaaaagacagtggtaaaagaaatgactgctgcctcaagatctgagggctccaccttggaactgccctcaaaaccagactggacaactaggagatgggagcagtaaccaatcacatctctgaggcctcaagcaaggtgagcagagaggaaagtgatttccaatcatgcaatagacacctcatacatatgtctaaatgggctccagaaatcaactgccattagtgtaaagatgatcagagcagaacatatgagtttcctagttaattttaacaaatgaatagtcagtgaatctgcatatagcattctcataaaaacacataacaggctattttcaagatgattgctgacaattgccaacaaagttagaaactggaactagaaaggaaagtccaaatgcatgcaactttaagataagtaaaattatagtcatattaagtctttacctctccatgatcaaactggtgttttctggaacagaaaaaaatatattgccatcaattcattattgaagcacttacgtcatatatttgcattttcatcttgcaaacaggagttttacaacttctataacattctctcaggacacacacaggcaaatcaaaataactaaaagtcacatgccaaaactggtgctatactattttaagaaaatttatgaagaatg

SEQ ID NO: 1882937 - DNA, 4001 bp, Homo sapiens
tgtgttacgctgctttagaatcagtcatttggtggctgggcacagtggcctgtaatctcagcactttgggaggctgaggtgggaggatcctttcaggccaggaatttaaaaccagcctggacaacatagccagacctgtctctacaaaataaacataaaaattagccagatgtaatggcatgcacccatagtcccaagtactcaggagactgagacaggacgatctatcaagcccaggagttcaaggttgtagtgagctattgtgccactgcactccagcctaggcgacagagtaagaccttgtctcaaaacaaaaacaaaaaaactcagccatttggtaactatggttgggcttagggcttgaaaattccatggttctgaccctccggccattcattctgatgagctctgggcagtatccaaggccccggctgagcagatggtgagcgctgccctcagagtgtcctctgcactccctcctgtattgtctcctatattgtgctatgcatgagtggtgcctcagtcaactaaaagagttacttcgccatcggagacctatgtattgattacctgccctgcctctgggacagccttttaaagttaaaatggccctggggacccgggtagtgcctccgtcacccccagtggtgtgacttctagaactctcctactttgcctgagcaaaacctcccacagtctgcccagaccagagcgtgtctaaatgatgtgggttttgttgcagcaaaaattggatgcagagtttcagaaaagactggaaaagaataaaattgctgcagaggagcagaccgcaaagcgccggaagaagcggtaagcggcatggcctaactgtgatgacacttaagggccaggggtggtggctgggtgagctgtccttgcagtcagtagtagttcctctgcatgacctgtaggggtcatgaatgtagagcaatgacttctactacctgagcagagagcaagttccttatgaccctccaactggttacagattgtccagagcttgcaagtcaggacttcagtgatcacattgatttctgtgtctccttcaggtctgtatttttttttttttttgagacaaagtctcactgtgtcccccaggctgcagtgcagtggcacaatctcggctcactgcaacctccgcctcctgggttcaagcaattctcctgcctcagcctcctgagtagctgggattacaggtgcctgccaccatacccagctaatttttatatttttagtagagacgaggtttcaccatgttggtcaggctagtcttgaactcctcacctcaggtgatccgcctgcttcggcctcccaaagtgctgggattacaggcatgagccaccacacacggccgcatctgtattttaacaaggtgctgcaaccaaacttcccatttagcatgtttcttaaattacggtttatgactccctcaagtgactacatggtatataggctgtatgtttatatgtgtatctgtgtgtttacataagtggtctctcaacttttacaatgagagctgaggaggattctaacaacagcccctaaatatcttgaaatgaaaaagcatctttagggaccaggcatggtggctcacagttgtaatctcagcactttgggaagccaaggcaggaggatcgcttgagcccagggggctgaggctgcagtgagttatgatcgcaccactacactccagcctgggtgacaaagtgcaaccctgtctctacaataataataaaaaaaatttttttttaaaaagcacccctgttatttctgaggttgctttgcctcagggctccctgggatttgctcttgaatcctaatgaaagcagctgataaggacggactggcagagtcatgcaaaagttttggttggtgcaaaagtaactgcagttttggaccgtgaattttagatcattgtaactaggctcaaaccatgtttattgatcagaataggaaccattacaatcaacacattttcaccaatgagaaataagtttatttctataacgtaaaaatccatgctccgggatttgaagaagtcttggaaagcattttctgcatcccgctggttgtggaagtgctttccctgcaaaaagttgtcaaagtgcttgaagaagtggtagtcggttggcaagaagtcaggtgaatatggtggatgaggcaacacatcgcagcccaatttgttcaacctttgaagcattggttgtgtgactcgtggtcgggcattgtcctggggaagaattgggccccttctgttgatcagtgctggctgcaggcattggagttttcagtgcatctcatcgatttgctgcacatacttctccagtgtgctggtttcaccgggattcagaaagctgtagtggatcagtccagcagctgaccagcaaacagtgaccatgaccttttttggtgcgagtttggctttgggaagtgctttggagcggcttcttggtctaaccactgagctggttgtcgcaggtgtcatgtaaaatccacttttcatcacatgtcacaatctgatcgagaaatggttcattgttgttgcgtagagtaagagaagacggcacttcaaaataatgatttttttgattttcgctcagctcatgaggcacccacttaccgagctttctcacctttccagtttgcttcaaatgctgaatgactgtagaatggtcgattctgagttctttggccccttctcatgtagttgtaagaggatcagcttccatgattgctctcaatttgtcattgtccaatgactgatggctggccacgatgctcatcttcaaggctcttgtctcctttgcaaaacttcttgccccaccactgcactgtacattcattggcagttcctgggccaaatgcgttgttgatgttgtgagttgtctccactgctttacgacccattttgaatttgaataagaaaatcacttgaattggctttttgtctagcatcgttttcatagtctaaacataaacaagtaataagtcattagcaaaaaaaaaaaaaagccgattaaaatgatgtataacataatcacatctatttaagaatatataggccgggcgtggtggctcacacccgtaatcccagcactttgggaggccaaggcaggtggatcacgaggtaggagatcgagaccatcctggctaacacagagaaaccccatgtctattgaaaatacaaaaaattagctgggcgtggtggcgggtgcctgtagtcccaggctactcaggaggccgaggcaggagaatggtgtgaacccaggaggcagagcttgcagtgagctgagattgcgccactgcactccagcctgggtgacagagtgagagaatccgtctcaaaaaaaaaaaaaagaagatattccagtatcaaacagcaaattccagcaatgcaaaaacggcaattacttttgcactcacctaatatttttcttattttgttattgtaatgtttgtgttattccgcaggttttagagataccataaggaggtgtttattttctaaaatataccataatgtagttaaggaatcaatgtatatggttttacatttttagccagaagttaaaagagaagaaattactggcaaagaagatgaaacttgaacagaagaaacaagaaggtgagtggtgcccacttttcttggctgtagcttctttcttcttgttggtcacagtggctgaactgtcaggaaacacagggacggagagtttgggctggttggctggccactgaagaaataacagcttattcatattagctaggacccattgaattgcaagtatcagaaaaccaaactggcttaagcaaaaagatactggttcaagttaggttgaggacagacctcccttctggcatggctggtcagggagatcagtgacattattggttattgacatctccccctctgtcctgatgtcctgtcctcaggctcacactcatggttttgaggtgcctgcagcagctctcggggctacatc

SEQ ID NO: 1882938 - DNA, 4001 bp, Homo sapiens
tctggattcatttataacttgcaaattgatttctcagttttttgtaatatcctgaattagagactcatgtttccaaccacttaaagtatacttctatccagatgaaaatcctgtagccactcaaatttaacaggcctgaaaggaactcattatcatttcctaaaacttgttcttttcatctttaatactggttaaagacatcactatgtacccaggtcaattctatcagttctagcttagaaatctcaatcaaatctaacttttcttctccctcaccaatgccatgttttcaacataggcatcttctatcagttatattttaaaagaatcctaacttattctcctgctatcacactctcctccttaagaactgaatcctgatcagggttgctgcatacagcctgaagtctgcaccactagagaaggttgccatccatgtaaactacgagtgttaattgtgcccaatggcctaatcatgatactccccctgctttcaaacttcattagataaaacaaacctacagcactataaaatctttcaactggctccactttctatttttctagcttcaggttctcatcattcctctatgcaccctacaatccagacatatttaacttttcagtatgccctatcaaaacccacacttttgtggatttttctttagtctgtactgccctctctccgtacaacttctaaatccttcaaactacagttcaaacgtaccctcctctgtgaagcattttttgaccagcctagacaaagatacttcactaagtgttttgttaacagttctattacagaatttgttgcattgtataatgatcacatatatccatctctcaaattcaatggagagttgagcagtgcataaagaagctccatatttgtaccctcagtatctataatgtccagcccctaaaaggggttaagttcatgtttattaatgctatacttaaccatatgcattagtacaactttttaaaagtaaattaaaatgagtttaaaaaagaagttacatgttcagctgtcaatctatctataatccatgtggcagaaagaactgatgtgactattcttgattcctacacttcctggtgtttaaacctttgtataattccctccccttgcacgtgaactggacctatgacttgcttctaatgaatgaaatacagcaaaggcaatgggttgtatgtgattacatgtacacgattatgtaagaacatagcaccagttcacctttcctttgcttactttgaagaagcaagctgctctgaacctaacagacacaaggaaataaattcagccaataacccaaggaagtctgtgggcagacctttccccagttgagtcactagataacaaccctgccctgacctacactttgactgcagtcttaaagaggacacagctaagttgtgcccagcctcttgacccacagaaattgcaaggcaataaacgtgttgcttagaaccactaaatttgcagtcatttgtgaataagcagcttagaaaacgaataaaatcagaacctaaggtatttctgaaccctttgttcacaaaaaggcctatgttttgtccaatttcttaacaaataaatgtcatgtacatgcaaaattaaaacacagactaacatttcaaataacagttcttaagaatattcacataaaacttaggaagtaatttgctacataaagcagttcctacactctcttttaacacatttgccaatatacccaattatacataatactacatgtaataagtttaatattagggcaattctccttaaaacccaaataataataaatagtttaaaagttgatatctcattaatgatatttggtaatcagaagaacttagttactggtcaccaggcaaagcgatcaaattggaggagagcaagagacttgttggagatgtgcctgagggagtaagacactatcttacaacaacagggctcttactccctcaggcactgcaccagccagcaaagcatcaaaataccaggttcttaggtcacgctgctctcagatcaggtgatgccctgtgcaactcaccaatcctccccaccttgcagtcaagaataattccaaaaaattcccaaagcagaaacttccatgacacaggccacacttacacacagcaaaacatgtaacacgaaggtatgaaattacaagtgaggaacaataaccaccaaaattcttattacttcaggagtggcaggggttgtggttagaaggctcatttttcttagaaagaggcaaacattcctcttcggccactccccataaaagccttcaatggcacaaaataacattcaggaataggaaatagattaattacaatatcccaaattcaaacattttggcacttgatattggtaagaagtgataactgagaccgattccataatggttaattgatgaagataacctaacaccataaaacttcacatctgccttaaaaattaagagaaatcttcctagaaatacaggtcttattcaacatattcagttttaagagataacccacactccttcaatataagaaaacatgtttcacaagtagcaaggcacctgagttacaatcagactactgaaatactcatgagcaagccacacccaaaaaagctcaagaaaatcaggaggccaaaagcaacccagcaccactggttgtcttagattaagtcattttacattttcacttctggactcaaggatacattatagaagtccacacgatttctctggaaataatctccatgtattggtatatttctatagcccaattcatctaccccatccttgctgcatcattaaaggctatttgaccactcatattatgctcttatgaacaacagctacttgacagtggaaaaaaaaacgtagacgtaaattaaagccaaacaaaccctaaaataccatcaacatttttaaatattaggaaatacccttaagacctgttttaaaacaaaggtgatggacgacactagcagtagtcaagaaagcgtctgttcactttaacactcctcagtctgaaaagaataataaggacaagatttacttcacctaaaaactcctatataaatataatcacattctgatgtctggcaactcaattctaggaaatttctacacactgaaatatctggattaggcatttttcttccagttctctagagagaataagagtgtatatagccaaaacagatgtccaaatgacatcaaaacataaaaccaacacagaaaacttcctcgttcaatgtggcaattcattatgagagaactactaacaattccacttgctagactcttaagtgttaaaaataaaagggggggactgtttttcattttctataaattacatgagagctcacaagagaataattttgaatcttattagtaccacattttcttattaggagacgttaataatataaacaacaattaaaacaacagttttacaaaaaacaatacgaactttccactaattctgaaataatccttttatcaattttcagatgcagttatttgtatataaccatttatacaatttgtaactgaataaacacaataatgttataatagatactaaaaagttaagtaaatgtgaactagtcaagtcttttttaattataagattcttcatttagctccctaaatctcaagatgatgagaaacatgcttctattgttttcctaataacccgtccactaaaatataggtaaaaatctcagtaaggcaatgccactaagatgggtttttacgtaaatgtattccatctccctgcctcaacagagatttcaggatgtggcactttcatctgatcctgtcatataataagaacaggtaatttctctgatgtctttccagcaattctcaactgaggttcctcatctgaatcaccaaacacaggaaattatttcagtgacttttctcaattgttccaagaatgatacataactaaaaccgttctaaatgcactggagctaaaagtta

SEQ ID NO: 1882939 - DNA, 4001 bp, Homo sapiens
agagactcatgtttccagccacttaaaggatacttctatccagatggaaatcctatagccactcaaatttaacaggcctaaaaggaactcattatcatttcctaaaacttgttattttcatctttaatactggttaaagacatcactgtgtacccaggttctcaattctatcagttctaccttagaaatctcaatcaaatctaacttttcttctccctcaccaatgccatcttttcaacgtaggcatcttctatcagttatattctaaaagaatcctaacttatcctcctgctatcacactctcctccttaagaactgaatcctgatcagggttgctgcatacagcctgaagtctgcaccactagagaaggttgccatccatgtaaactacgaatgttaattgtgcccaatggcctaatcatgatactccccctgctttcaaacttcattagataaaacaaacctacagcactataaaatccttcaactggctccactttctatttttctagcttcaggtgctcatcattcctctatgcaccctacagtccagacatatttaacttttcagtatgccctatcaaaacccaagcttttgtggatttttctttagtctacagtgccctctctccataaaacttctaaatccttcaaactacagttcaaatgtaccctcctctgtgaagcattttttgactagcctagacaaagatacttcacgaagcattttgttaacagttctattactgaatttgttgcactgtataatgatcacacatatccatctctcaaattcaatggagagttgagcagtgcataaagaagccccacatttaaaccctgaatatctacaatgcccagcccctaaaaggggctcaattcatgtttattaatactatacttaccatatgcattagtacaactttttaaaagtaaataaaaactgagttttaaaaaaaagttgcatgttcagctgtcaatctaagtctataatccatgtggcagacagaattgatgtgactattcttgattcctacacttcctggtgtttaaacctttgtataattccctccccttgcacgtgaactggacctatgacttgcttctaatcaatgaaatacagcaaaggcaatgggttgtatgtgattacatgtacacgattatgtaagaacatagcaccagttcacctttgatagactctcttcctttgctgactttgaagaagcaagctgctctgaaccaaacagacacaaggaaataaattcagccaataacccaaggaagtctgggggcagacctttccccagttgagtctctacataacaacccagccctggccaacactttgactgcagtcttacagaggacacagctaagttgtgcccagcctcttgacccatagaaattgcgaggtaataaatgtgttgcttagaacagctaaatttgtagttatttgtgaacaagcagcttagaacatgaataaaataaaaaaaaaaagaaaatgaataaaatcagaacctaaggtatttctgaactctttgttcacaaaaaggcctatgttttgtccaatttctaaacaaataaatgtcatgtatatgcaaaattaaaacacagactaacatttcaaataaacaatagttcttaagaatattcacataaggtaaaacttaggaagtaatctgctacataaagcagttcctacactctcttttaacacatttgccagtatacccaattgtacataatacttagtacatgtaataagtttaatattagggcaattctccttacaaacccaaataataataaatagtttaaaagttgatatctaattaatgatatttggtaatcaaaagaacttacttactggtcaccaggcaaagcaatcaaattggaggagagcaagagactcgctggagatgtgcctgagggagtaagacactatctgacaacaacagggctcttactccctcaggcactgcaccagccagcaaagcatcaaaataccaggttcttaggtcacgctgctctcagatcaggtgatgccctgtgcaactcaccaatcctccccaccttgcagtcaagaatagttccaaaaaatccccaaagcagaaacgtccatgacacaggccacacttacacacagcaaaacatataacacgaaggtatgaaattacaagtgagaaacaataaccaccaaaattcttattacttcaggagtggcaggggttgtggttagaaggctcatttttcttagaaagaggcaaacattcctctttggccactccccataaaagccttcaatggcacaaaataacattcaggaataggaagtagattaattagagtatcccaaattcaaacattttggcacttgatattggtaagaagagataactgagaccaattccataatggttaattgatgaagacaacctaacagcataaaacttcacatctgcttaaaaattaagagaaatcgtcctagaaatacaggtcttattcaacatattcagttttaagagataacccacactccttcaatataagaaaacatgttgcacaagtaacaaggcacctgagttacaatcagactactgaaatactcatgagcaagccacacccaaaaaagctcaagaaaatcaggaggccaaaagcaacccagcaccactagttgtcttagattaagtcattttacattttcacttccggactcaaagatacattatagaagtccacacgatgtctctggaaataatctccatgtattggtatatttctatagcccaattcatctaccccatccttgctgcatcattaaaggctatttgaccactcatgttatgctcttatgaacaatagctacttgacagtggaaaaaaaaacgtagacgtaaattaaagccaaacaaaccctaaaataccgtcaagatttttaaatattaggaaatacccttaagaccttttttaaaacaaaggtgatggacgacactagcagtagtcaagaaagcgtctgttcactttaacactcctcagtctgaaaagaataataaggacaagatttacttcacctaagaactcctaaatataatcacattctgatgtccggcaactcaattctaggaaatttctacacactgaaatatctggattaggcatttttcttccagttctctagagagaataagagtgtatatagcgaaaatagatgtccaaaagacagcaaaacataaaaccaacacagaaaacttcctcgttcaatgtggcaattcattatgagggaactactaacaattccacttgctagactcttaagtgttaaaaataaaagggggggggactgtttttcattttctataaattacatgagacctcacaagagaataattttgaatcttattagtaccacattttcttattaggagacgttaataatataaacaacaattaaaacaacagttttacaaaaatcaatatgaactttccattaattctgaaataatccttttatcaattttcagatggagttatttgtatataaccatttatacaatttgtaactgaataaacacaataatgctataatagatactaaaaaattaagtaaatgtgaagtacagtcaagtctaacttttttaattataagattcttcatctagctccctaaatctcaagatgatgagaaacatgcttctattgttttcctaataacccatccactaaaatataggtaaaaatctcagtaaggcaatgccactaagatgggtttttacataagtgtattccatctccctgcctcaacagagatttcaggatgtggcactttcatccgatcctgtcatataataagaacaggtaatttctctgatccctttccagcaattctcaactgaggttcctcatctgaatcaccaaacataggaaattatttcagtgacttttctcaattgttccaagaatgatacataactaaaaccgtcctaaatgcactggtgctgaaag

SEQ ID NO: 1882940 - DNA, 4001 bp, Homo sapiens
gagactcatgtttccagccacttaaaggatacttctatgcagatggaaatccgatagccactcaaatttaacaggcctaaaaggaactcattatcatttcctaaaacttgttcttttcatctttaatactggtaaagacatcactatgtacccaggttctcaattctatcagttctaccttagaaatctcaatcaaatctaacttttcttctccctcaccaatgccatcttttcaacgtaggcatcttctatcagttatattctaaaagaatcctaacttatcctcctgctatcacactctcctccttaagaactgaatcctgatcagggttgctgcatacagcctgaagtctgcaccactagagaaggttgccatccatgtaaactacgaatgttaattgtgcccaatggcctaatcatgatactccccctgctttcaaacttcattggataaaacaaacctacagcactataaaatccttcaactggctccactttctatttttctagcttcgggttctcatcattcctctatgcaccctacaatccagacatatttaacttttcagtatgccctatcaaaacccaagcttttgtggatttttctttagtctacagtgccctctctccataaaacttctaaatccttcaaactacaattcaaatgtatcctcctctgtgaagcattttttgactagcctagacaaagatacttcacgaagcattttgttaatagttctattacagaatttgttgcactgtataatgatcacacatatccatctctcaaattcaatggagagttgagcagtgcataaagaagccccacatttgaaccctgaatatctacaatgcccagcccctaaaaggggctcaattcatgtttattaatactatatttaccatatgcattagtacaactttttaaaagtaaataaaaactgagtttaaaaaaaaagttgcatgttcagctgtcaatctaagtctataatccatgtggcagacagaactgatgggactattcttgattcctacacttcctggtgtttaaacctttgtataattccctccccttgcacgtgaactggacctatgacttgcttctaatcaatgaaatacagcaaaggcaatgggttgtatgtgattacatgtacacgattatgtaagaacatagcaccagttcacctttgatagactctcttcctttgctgactttgaagaagcaagctgctctgaacctaacagacacaaggaaataaattcagccaataacccaaggaagtctgggggcagacctttccccagttgagtctctagataacaacccagccctggccaacactttgactgcagtcttacagaggacacagctaagttgtgcccagcctcttgatccatagaagttgtgaggtaataaacgtgttgcttagaacagctaaatttgtagttatttgtgaacaagcagcttagaacatgaataaaataaaataaaaaaaaagaaaatgaataaaatcagaacctaaggtatttctgaactctttgttcacaaaaaggcctatgttttgtccaatttctaaacaaataaatgtcatgtatatgcaaaattaaaacacagactaacatttcaaataaacaatagttcttaagaatatttacataaggtaaaacttaggaagtaatctgctacataaagcagttcctacactctcttttaacacatttgccagtatacccaattgtacataatacttagtacatgtaataagtttaatattagggcaattctccttacaaacccaaataataataaatagtttaaaagttgatatctaattaatgtatctggtaatcaaaagaacttacttactggtcaccaggcaaagcaatcaaattggaggagagcaagagacttgttggagatgtgcctgagggagtaagacactatcttacaacaacaggactcttactccctcaggcactgcaccagccagcaaagcatcaaaataccaggttcttaggtcacgctgctctcagatcagtgatgccctgtgcaactcaccaatcctccccaccttgcagtcaagaatagttccaaaaaatccccaaagcagaaacttccatgacacaggccacacttacacacagcaaaacatataacacgaaggtatgaaatcacaagtgaggaacaataaccaccaaaattcttattacttcaggagtggcaggggttgtggttagaaggctcattttttttagaaagaggcaaacattcctctttggtcactccccataaaagccttcaatggcacaaaataacattcaggaataggaagtagattaattacagtatcccaaattcaaacattttggcacttgatattggtaaggagtgataactgagaccaattccataatggttaattgatgaagacaacctaacagcataaaacttcacatctgcttaaaaattaagagaaatcgtcctagaaatacaggtcttattcaacatattcagttttaagagataacccacactccttcaatataagaaaacatgttgcacaagtaacaaggcacctgaattacaatcagactactgaaatactcatgagcaagccacacccaaaaaagctcaagaaaatcaggaggccaaaagcaacccagcaccactggttgtcttagattaagtcattttacattttcacttctggactcaaggatacattatagaagtccacacgatttctctggaaataatctccatgtattggtatatttctatagcccaattcatctaccccatccttgctgcatcattaaaggctattttaccactcatgttatgctctatgaacaatagctacttgacagtggaaaaaaaaacgtagacgtaaattaaagccaaacaaaccctaaaataccatcaacatttttaaatattaggaaatacccttaagaccttttttaaaacaaaggtgatggaccacactagcagtagtcaagaaagcgtctgttcgctttaacactccccactctggaaagaataacaagcacaagatttacttcacctaaaaactcctaaatataatcacattctgatgtccggcaactcaattctaggaaatttctacacactgaaatatctggattaggcatttttcttccagttctctagagagaataagagtgtatatagccaaaatagatgtgcaaaagacagcaaaacataaaaccaacacagaaaacttcctcgttcaatgtggcaattcattttgagggaactactaacaattccacttgctagactcttaagtgttaaaaataaaagggggggactgtttttcattttctataaattacatgagacctcacaagagaataattttgaatcttataagtaccacattttcttattaggagacgttaataatataaacaacaattaaaacaagttttacaaaaaacaatatgaactttccattaattctgaaataatccttttatcaattttcagatggagttatttgtatataaccatttatacaatttgtaactgaataaacacaataatgctataatagatactaaaaaattaagtaaatgtgaagtacagtcaagtctaactttttaagattcttcatctagctccctaaatctcaagatgatgagaaacatgcttctattgttttcctaataacccgtccactaaaatataggtaaaaatctcagtaaggcaatgccactaagatgggtttttaaataagtgtattccatctccctgcctcaacagagatttcaggatgtggcactttcatctgatcctgtcatataataagaacaggtaatttctctgatccctttccagcaattctcaactgaggttcctcatctgaatcaccaaacataggaaattatttcagtgacttttctcaattgttccaagaatgatacataactaaaaccgtcctaaatgcactggtgctgaaagttaaaattcattg

SEQ ID NO: 1882941 - DNA, 4001 bp, Homo sapiens
ttcagatgaggaacctcagttgagaattgctggaaagacatcagagaaattacctgttcttattatatgacaggatcagatgaaagtgccacatcctgaaatctctgttgaggcagggagatggaatacatttacgtaaaaacccatcttagtggcattgccttactgagatttttacctatattttagtggacgggttattaggaaaacaatagaagcatgtttctcatcatcttgagatttagggagctaaatgaagaatcttataattaaaaaagacttgactagttcacatttacttaactttttagtatctattataacattattgtgtttattcagttacaaattgtataaatggttatatacaaataactgcatctgaaaattgataaaaggattatttcagaattagtggaaagttcgtattgttttttgtaaaactgttgttttaattgttgtttatattattaacgtctcctaataagaaaatgtggtactaataagattcaaaattattctcttgtgagctctcatgtaatttatagaaaatgaaaaacagtcccccccttttatttttaacacttaagagtctagcaagtggaattgttagtagttctctcataatgaattgccacattgaacgaggaagttttctgtgttggttttatgttttgatgtcatttggacatctgttttggctatatacactcttattctctctagagaactggaagaaaaatgcctaatccagatatttcagtgtgtagaaatttcctagaattgagttgccagacatcagaatgtgattatatttatataggagtttttaggtgaagtaaatcttgtccttattattcttttcagactgaggagtgttaaagtgaacagacgctttcttgactactgctagtgtcgtccatcacctttgttttaaaacaggtcttaagggtatttcctaatatttaaaaatgttgatggtattttagggtttgtttggctttaatttacgtctacgtttttttttccactgtcaagtagctgttgttcataagagcataatatgagtggtcaaatagcctttaatgatgcagcaaggatggggtagatgaattgggctatagaaatataccaatacatggagattatttccagagaaatcgtgtggacttctataatgtatccttgagtccagaagtgaaaatgtaaaatgacttaatctaagacaaccagtggtgctgggttgcttttggcctcctgattttcttgagcttttttgggtgtggcttgctcatgagtatttcagtagtctgattgtaactcaggtgccttgctacttgtgaaacatgttttcttatattgaaggagtgtgggttatctcttaaaactgaatatgttgaataagacctgtatttctaggaagatttctcttaatttttaaggcagatgtgaagttttatggtgttaggttatcttcatcaattaaccattatggaatcggtctcagttatcacttcttaccaatatcaagtgccaaaatgtttgaatttgggatattgtaattaatctatttcctattcctgaatgttattttgtgccattgaaggcttttatggggagtggccgaagaggaatgtttgcctctttctaagaaaaatgagccttctaaccacaacccctgccactcctgaagtaataagaattttggtggttattgttcctcacttgtaatttcataccttcgtgttacatgttttgctgtgtgtaagtgtggcctgtgtcatggaagtttctgctttgggaattttttggaattattcttgactgcaaggtggggaggattggtgagttgcacagggcatcacctgatctgagagcagcgtgacctaagaacctggtattttgatgctttgctggctggtgcagtgcctgagggagtaagagccctgttgttgtaagatagtgtcttactccctcaggcacatctccaacaagtctcttgctctcctccaatttgatcgctttgcctggtgaccagtaactaagttcttctgattaccaaatatcattaatgagatatcaacttttaaactatttattattatttgggttttaaggagaattgccctaatattaaacttattacatgtagtattatgtataattgggtatattggcaaatgtgttaaaagagagtgtaggaactgctttatgtagcaaattacttcctaagttttatgtgaatattcttaagaactgttatttgaaatgttagtctgtgttttaattttgcatgtacatgacatttatttgttaagaaattggacaaaacataggcctttttgtgaacaaagggttcagaaataccttaggttctgattttattcgttttctaagctgcttattcacaaatgactgcaaatttagtggttctaagcaacacgtttattgccttgcaatttctgtgggtcaagaggctgggcacaacttagctgtgtcctctttaagactgcagtcaaagtgtaggtcagggcagggttgttatctagtgactcaactggggaaaggtctgcccacagacttccttgggttattggctgaatttatttccttgtgtctgttaggttcagagcagcttgcttcttcaaagtaagcaaaggaaaggtgaactggtgctatgttcttacataatcgtgtacatgtaatcacatacaacccattgcctttgctgtatttcattcattagaagcaagtcataggtccagttcacgtgcaaggggagggaattatacaaaggtttaaacaccaggaagtgtaggaatcaagaatagtcacatcagttctttctgccacatggattatagatagattgacagctgaacatgtaacttcttttttaaactcattttaatttacttttaaaaagttgtactaatgcatatggttaagtatagcattaataaacatgaacttaaccccttttaggggctggacattatagatactgagggtacaaatatggagcttctttatgcactgctcaactctccattgaatttgagagatggatatatgtgatcattatacaatgcaacaaattctgtaatagaactgttaacaaaacacttagtgaagtatctttgtctaggctggtcaaaaaatgcttcacagaggagggtacgtttgaactgtagtttgaaggatttagaagttgtacggagagagggcagtacagactaaagaaaaatccacaaaagtgtgggttttgatagggcatactgaaaagttaaatatgtctggattgtagggtgcatagaggaatgatgagaacctgaagctagaaaaatagaaagtggagccagttgaaagattttatagtgctgtaggtttgttttatctaatgaagtttgaaagcagggggagtatcatgattaggccattgggcacaattaacactcgtagtttacatggatggcaaccttctctagtggtgcagacttcaggctgtatgcagcaaccctgatcaggattcagttcttaaggaggagagtgtgatagcaggagaataagttaggattcttttaaaatataactgatagaagatgcctatgttgaaaacatggcattggtgagggagaagaaaagttagatttgattgagatttctaagctagaactgatagaattgacctgggtacatagtgatgtctttaaccagtattaaagatgaaaagaacaagttttaggaaatgataatgagttcctttcaggcctgttaaatttgagtggctacaggattttcatctggatagaagtatactttaagtggttggaaacatgagtctctaattcaggatattacaaaaaactgagaaatcaatttgcaagttataaatgaatccagaaagtggataagattactaagggatgaatatagattgacgaaggacaaggatggaatccagaggagcaagtattttaagagacagggagaggaagagg

SEQ ID NO: 1882942 - DNA, 4001 bp, Homo sapiens
agatgaggaacctcagttgagaattgctggaaagggatcagagaaattacctgttcttattatatgacaggatcggatgaaagtgccacatcctgaaatctctgttgaggcagggagatggaatacacttatgtaaaaacccatcttagtggcattgccttactgagatttttacctatattttagtggatgggttattaggaaaacaatagaagcatgtttctcatcatcttgagatttagggagctagatgaagaatcttataattaaaaaagttagacttgactgtacttcacatttacttaattttttagtatctattatagcattattgtgtttattcagttacaaattgtataaatggttatatacaaataactccatctgaaaattgataaaaggattatttcagaattaatggaaagttcatattgatttttgtaaaactgttgttttaattgttgtttatattattaacgtctcctaataagaaaatgtggtactaataagattcaaaattattctcttgtgaggtctcatgtaatttatagaaaatgaaaaacagtcccccccccttttatttttaacacttaagagtctagcaagtggaattgttagtagttccctcataatgaattgccacattgaacgaggaagttttctgtgttggttttatgttttgctgtcttttggacatctattttcgctatatacactcttattctctctagagaactggaagaaaaatgcctaatccagatatttcagtgtgtagaaatttcctagaattgagttgccggacatcagaatgtgattatatttaggagttcttaggtgaagtaaatcttgtccttattattcttttcagactgaggagtgttaaagtgaacagacgctttcttgactactgctagtgtcgtccatcacctttgttttaaaaaaggtcttaagggtatttcctaatatttaaaaatcttgacggtattttagggtttgtttggctttaatttacgtctacgtttttttttccactgtcaagtagctattgttcataagagcataacatgagtggtcaaatagcctttaatgatgcagcaaggatggggtagatgaattgggctatagaaatataccaatacatggagattatttccagagacatcgtgtggacttctataatgtatctttgagtccggaagtgaaaatgtaaaatgacttaatctaagacaactagtggtgctgggttgcttttggcctcctgattttcttgagcttttttgggtgtggcttgctcatgagtatttcagtagtctgattgtaactcaggtgccttgttacttgtgcaacatgttttcttatattgaaggagtgtgggttatctcttaaaactgaatatgttgaataagacctgtatttctaggacgatttctcttaatttttaagcagatgtgaagttttatgctgttaggttgtcttcatcaattaaccattatggaattggtctcagttatctcttcttaccaatatcaagtgccaaaatgtttgaatttgggatactctaattaatctacttcctattcctgaatgttattttgtgccattgaaggcttttatggggagtggccaaagaggaatgtttgcctctttctaagaaaaatgagccttctaaccacaacccctgccactcctgaagtaataagaattttggtggttattgtttctcacttgtaatttcataccttcgtgttatatgttttgctgtgtgtaagtgtggcctgtgtcatggacgtttctgctttggggattttttggaactattcttgactgcaaggtggggaggattggtgagttgcacagggcatcacctgatctgagagcagcgtgacctaagaacctggtattttgatgctttgctggctggtgcagtgcctgagggagtaagagccctgttgttgtcagatagtgtcttactccctcaggcacatctccagcgagtctcttgctctcctccaatttgattgctttgcctggtgaccagtaagtaagttcttttgattaccaaatatcattaattagatatcaacttttaaactatttattattatttgggtttgtaaggagaattgccctaatattaaacttattacatgtactaagtattatgtacaattgggtatactggcaaatgtgttaaaagagagtgtaggaactgctttatgtagcagattacttcctaagttttaccttatgtgaatattcttaagaactattgtttatttgaaatgttagtctgtgttttaattttgcatatacatgacatttatttgtttagaaattggacaaaacataggcctttttgtgaacaaagagttcagaaataccttaggttctgattttattcattttctttttttttttattttattcatgttctaagctgcttgttcacaaataactacaaatttagctgttctaagcaacacatttattacctcgcaatttctatgggtcaagaggctgggcacaacttagctgtgtcctctgtaagactgcagtcaaagtgttggccagggctgggttgttatgtagagactcaactggggaaaggtctgcccccagacttccttgggttattggctgaatttatttccttgtgtctgtttggttcagagcagcttgcttcttcaaagtcagcaaaggaagagagtctatcaaaggtgaactggtgctatgttcttacataatcgtgtacatgtaatcacatacaacccattgcctttgctgtatttcattgattagaagcaagtcataggtccagttcacgtgcaaggggagggaattatacaaaggtttaaacaccaggaagtgtaggaatcaagaatagtcacatcaattctgtctgccacatggattatagacttagattgacagctgaacatgcaacttttttttaaaactcagtttttatttacttttaaaaagttgtactaatgcatatggtaagtatagtattaataaacatgaattgagccccttttaggggctgggcattgtagatattcagggtttaaatgtggggcttctttatgcactgctcaactctccattgaatttgagagatggatatgtgtgatcattatacagtgcaacaaattcagtaatagaactgttaacaaaatgcttcgtgaagtatctttgtctaggctagtcaaaaaatgcttcacagaggagggtacatttgaactgtagtttgaaggatttagaagttttatggagagagggcactgtagactaaagaaaaatccacaaaagcttgggttttgatagggcatactgaaaagttaaatatgtctggactgtagggtgcatagaggaatgatgagcacctgaagctagaaaaatagaaagtggagccagttgaaggattttatagtgctgtaggtttgttttatctaatgaagtttgaaagcagggggagtatcatgattaggccattgggcacaattaacattcgtagtttacatggatggcaaccttctctagtggtgcagacttcaggctgtatgcagcaaccctgatcaggattcagttcttaaggaggagagtgtgatagcaggaggataagttaggattcttttagaatataactgatagaagatgcctacgttgaaaagatggcattggtgagggagaagaaaagttagatttgattgagatttctaaggtagaactgatagaattgagaacctgggtacacagtgatgtctttaaccagtattaaagatgaaaataacaagttttaggaaatgataatgagttccttttaggcctgttaaatttgagtggctataggatttccatctggatagaagtatcctttaagtggctggaaacatgagtctctaattcaggatattacaaaaaactgagaaatcaaattgcaggatataaatgattccagaaagtggataagattactaagggatgaatatagattgacg

SEQ ID NO: 1882943 - DNA, 4001 bp, Homo sapiens
gtacacccccgtgacctattaggagtaacgtccttccagggtattacagataacgtcacaaggtgaacacattttgtgacattttgtacaccctttgtgacattgaaagaaacatccccctaggatattacgagtaatgacaggcggtgtacacacacggtgtacaccgtctgtgccatcaggagtaacattcccctaggatattatgaataataccacagcaggtgtacacacatggtgtacaccccatgtgacattaggaggaacatgcccctaggatattaggaatagtatcacaggtgttgaatatgcatgatatacacccctggtgacattaaaagtaacaagcccttaggatattatgaataatatcacagggagtacaccccatgtgacattaaaagtgacatcccccgaggatatgatgaataatatcagagggtgtacatgcattgtgaccttagtaacgtctctaggatattataaatcgtatcacagggtgtacacgcattgtgacattggtagtaacatcccgctaggatatgacgagtaatgtcacagggtgtacaccccctgtgacaatagtaacattcccctagaatatgacgaataatatcacaggaggtacagcccctgtgatttacgagtaacatttctatataatattacacgtcatagcactgtgtgactctgtgtacaccctgtatgacattaggagtaacatcccacaaaacaattacgaataatatcacaaggtgaacaccctctgtgacatgaggaataacgtagttttaggatattatgaatgatatgacaaggtgtacacaccctgtaatgttaggagaaatagccgtctaggatattaggaataatgtcacagggaacacaccccctgtgacattaggataatacgaatgatatgccaagatgtacacgcattgtgacattcgtactaatatccctctggtatactatgaataatatcacagggtgtacatccctgtgacattaggagtaacatcccccttgaataggaggaataatatcacagggggtacacaccctgtgactttaggagtatcagcgccctggaatatgaggaatactgtcccagggtattaaccacctgtgacctgaggagtaacatcctgttggaatattacgactcatatcacagtgtgtacaccaactgtgatattaggagtcctatttatttttaggatattaggaataatatcacagtaggtgtacacaaatagtatgtacgcccacggtgatattaaaagttatatctccctagggtattccgaataacatcacagtgggtgtacacccactgtgatatttgaagtcatatctccctaagatgataaaaaaatcaaagggtggaccctgtctgtgacatcaaaagtaacatctctgtggctattccgaatagcatcacagggtgtacacagcctgtgacgttaggagtagcatccccataagatattccgagtaatatcacagggtgtacaccccatgtgacattaagagcaacatcttcttaggatattacgaacaacctcacagggtgtacgccccctgtgactttaaaagtaacatccccctagaatattaggaataatatcatgggtgtacaccccgtgtgacattaggagtaacatctccctaggatattacaaagaacatcactgggtgtacgccctctgtcttattaggagtaacatccttctaggatatgaagaatatcacaaggcgtacacacactgatattcggagagatatctccctaggatataaggtgtatcacagaatgtacacgcatggtgtacacccactgcgacattaaaagcaatatctccctatgagagtatgagaaatatcaaagggagaacactctctgtgatattagatgtaatgtttaccatggatattacaaataatatcacagggtgtacacacatgaggtacacccactgtggtattatttgtactgtcttagatataattctaatataacacggagagctataactctgtagtatctgagatattacaaataatatcacagtctacacatagtgtacatagtgtacacccactgtgagatttacagtaaaatctccctataagactacaaatattatcgaagtgtgtgcacccccgtgaccttaggagtaacatccttctggatatcaggaatcatatcatgaggcatacacaccctgtgacattttgtacactctttgtgacattcaaagtcacagccccctagtatattacgaataatatcaaaggcggttgatgcacacggtgtacacatcctgttacattaggcgtaatctttttctgtgatttatgaatatcacagaaggtgtacacacatgctgtacactccaggtgacattaggagcaacacccccccaagatattagaaataatattaccagggttgcatacacatggtgtactctccctgtgacattagcagcaacattcccctagaatattacgaataccatcagagggggtgtacacacataatgtacgcaccttgtaaaattaggagtagcatctccctacgatgttatgaataatatcacagaaggtgtacgcacatggcctataccccacgtgatgttaggagttacatctttctagtatgttaggaataataccacaaaggtgttcacacatggttaacagcatatggaatattaggattaacatccctcaagaatattacaaataacatcacaggggctgtgcacacatggtgcacatgccctgtgacattaggagtacatttccctggcacattgcaagtaatatcacagagtgtacaccttctgtgacatttggagtaacatcccctaggatagtatgaataatatcacagggtgtacatcccctgtgacctgaggagtaacatccttctaggacattgtgaataacatcacaaaatgaatgcacagcccctgtgacacgaggagtaacatccacctaggatattctgaataatatcacagagagtacaccccatgtgacagtaggagaaacctcccccgaggatataacgaacaaatacagaggatgtacacgcgtcgtgtcactagcattaacatccatttaggatattacgaatattatcacagtgtgaacgccccctgtaatattaggagtaacatccccctacaatattgggcaccatatcatacggtgtacaccccctgtgacattagaggtaacatttcattaggttatgatgaataatattacaaggtgtaaggcccctgcgacatttggagtaacatttccataaaatattacgaataatatcactgtttgtacaccacgggtgacattaggagtcccagcctccaaaattattatgaataacttcacagggcgtacaccctctgtgacattaggagtaacatctttctaaaatatgacgaataaaatcaaaaagtgtacaccccatgtgacattagaagcaacattgcccgaggatataagaaataatatcagattgtgtacgtgcattgtgacatcagtagtaacatccctttagggtatgacgagtattatcagaatgtgaataccatctgtaacattaggagtaacatcaccctacaacatcgggaataataccacagggtgtacaccacctgtgatattagtggtaatatttctttaagatattatgaataatatcacggggtgtacagcccctgtgagattaggactaacatatccaaaaaagcttgacaaatcatatcacggtttatacaccaagtgtgacattaggagtaacatcccccaaaactattatgaataacttcacagattgtacacgctctgtgatattaggggttcacatcttcctagaatgtgaagaataacatcacaggaggaacacccccgtgatatgaagggtaacatcactctaggatattacgaataatataacaaagtgtacccaatttgtatggtag

SEQ ID NO: 1882944 - DNA, 4001 bp, Homo sapiens
aaggtgtacacccccgtgacctattaggagtaacgtccttccagggtattacagataacgtcacaaggtgaacacattttgtgacattttgtacaccctttgtgacattgaaagaaacatccccctaggatattacgagtaatgacaggcggtgtacacacacggtgtacaccgtctgtgccatcaggagtaacattcccctaggatattatgaataataccacagcaggtgtacacacatggtgtacaccccatgtgacattaggaggaacatgcccctaggatattaggaatagtatcacaggtgttgaatatgcatgatatacacccctggtgacattaaaagtaacaagcccttaggatattatgaataatatcacagggagtacaccccatgtgacattaaaagtgacatcccccgaggatatgatgaataatatcagagggtgtacatgcattgtgaccttagtaacgtctctaggatattataaatcgtatcacagggtgtacacgcattgtgacattggtagtaacatcccgctaggatatgacgagtaatgtcacagggtgtacaccccctgtgacaatagtaacattcccctagaatatgacgaataatatcacaggaggtacagcccctgtgatttacgagtaacatttctatataatattacacgtcatagcactgtgtgactctgtgtacaccctgtatgacattaggagtaacatcccacaaaacaattacgaataatatcacaaggtgaacaccctctgtgacatgaggaataacgtagttttaggatattatgaatgatatgacaaggtgtacacaccctgtaatgttaggagaaatagccgtctaggatattaggaataatgtcacagggaacacaccccctgtgacattaggataatacgaatgatatgccaagatgtacacgcattgtgacattcgtactaatatccctctggtatactatgaataatatcacagggtgtacatccctgtgacattaggagtaacatcccccttgaataggaggaataatatcacagggggtacacaccctgtgactttaggagtatcagcgccctggaatatgaggaatactgtcccagggtattaaccacctgtgacctgaggagtaacatcctgttggaatattacgactcatatcacagtgtgtacaccaactgtgatattaggagtcctatttatttttaggatattaggaataatatcacagtaggtgtacacaaatagtatgtacgcccacggtgatattaaaagttatatctccctagggtattccgaataacatcacagtgggtgtacacccactgtgatatttgaagtcatatctccctaagatgataaaaaaatcaaagggtggaccctgtctgtgacatcaaaagtaacatctctgtggctattccgaatagcatcacagggtgtacacagcctgtgacgttaggagtagcatccccataagatattccgagtaatatcacagggtgtacaccccatgtgacattaagagcaacatcttcttaggatattacgaacaacctcacagggtgtacgccccctgtgactttaaaagtaacatccccctagaatattaggaataatatcatgggtgtacaccccgtgtgacattaggagtaacatctccctaggatattacaaagaacatcactgggtgtacgccctctgtcttattaggagtaacatccttctaggatatgaagaatatcacaaggcgtacacacactgatattcggagagatatctccctaggatataaggtgtatcacagaatgtacacgcatggtgtacacccactgcgacattaaaagcaatatctccctatgagagtatgagaaatatcaaagggagaacactctctgtgatattagatgtaatgtttaccatggatattacaaataatatcacagggtgtacacacatgaggtacacccactgtggtattatttgtactgtcttagatataattctaatataacacggagagctataactctgtagtatctgagatattacaaataatatcacagtctacacatagtgtacatagtgtacacccactgtgagatttacagtaaaatctccctataagactacaaatattatcgaagtgtgtgcacccccgtgaccttaggagtaacatccttctggatatcaggaatcatatcatgaggcatacacaccctgtgacattttgtacactctttgtgacattcaaagtcacagccccctagtatattacgaataatatcaaaggcggttgatgcacacggtgtacacatcctgttacattaggcgtaatctttttctgtgatttatgaatatcacagaaggtgtacacacatgctgtacactccaggtgacattaggagcaacacccccccaagatattagaaataatattaccagggttgcatacacatggtgtactctccctgtgacattagcagcaacattcccctagaatattacgaataccatcagagggggtgtacacacataatgtacgcaccttgtaaaattaggagtagcatctccctacgatgttatgaataatatcacagaaggtgtacgcacatggcctataccccacgtgatgttaggagttacatctttctagtatgttaggaataataccacaaaggtgttcacacatggttaacagcatatggaatattaggattaacatccctcaagaatattacaaataacatcacaggggctgtgcacacatggtgcacatgccctgtgacattaggagtacatttccctggcacattgcaagtaatatcacagagtgtacaccttctgtgacatttggagtaacatcccctaggatagtatgaataatatcacagggtgtacatcccctgtgacctgaggagtaacatccttctaggacattgtgaataacatcacaaaatgaatgcacagcccctgtgacacgaggagtaacatccacctaggatattctgaataatatcacagagagtacaccccatgtgacagtaggagaaacctcccccgaggatataacgaacaaatacagaggatgtacacgcgtcgtgtcactagcattaacatccatttaggatattacgaatattatcacagtgtgaacgccccctgtaatattaggagtaacatccccctacaatattgggcaccatatcatacggtgtacaccccctgtgacattagaggtaacatttcattaggttatgatgaataatattacaaggtgtaaggcccctgcgacatttggagtaacatttccataaaatattacgaataatatcactgtttgtacaccacgggtgacattaggagtcccagcctccaaaattattatgaataacttcacagggcgtacaccctctgtgacattaggagtaacatctttctaaaatatgacgaataaaatcaaaaagtgtacaccccatgtgacattagaagcaacattgcccgaggatataagaaataatatcagattgtgtacgtgcattgtgacatcagtagtaacatccctttagggtatgacgagtattatcagaatgtgaataccatctgtaacattaggagtaacatcaccctacaacatcgggaataataccacagggtgtacaccacctgtgatattagtggtaatatttctttaagatattatgaataatatcacggggtgtacagcccctgtgagattaggactaacatatccaaaaaagcttgacaaatcatatcacggtttatacaccaagtgtgacattaggagtaacatcccccaaaactattatgaataacttcacagattgtacacgctctgtgatattaggggttcacatcttcctagaatgtgaagaataacatcacaggaggaacacccccgtgatatgaagggtaacatcactctaggatattacgaataatataacaaagtgtacccaatttgtat

SEQ ID NO: 1882945 - DNA, 4001 bp, Homo sapiens
attacagggggcgttcacactgtgataatattcgtaatatcctaaatggatgttaatgctagtgacacgacgcgtgtacatcctctgtatttgttcgttatatcctcgggggaggtttctcctactgtcacatggggtgtactctctgtgatattattcagaatatcctaggtggatgttactcctcgtgtcacaggggctgtgcattcattttgtgatgttattcacaatgtcctagaaggatgttactcctcaggtcacaggggatgtacaccctgtgatattattcatactatcctaggggatgttactccaaatgtcacagaaggtgtacactctgtgatattacttgcaatgtgccagggaaatgtactcctaatgtcacagggcatgtgcaccatgtgtgcacagcccctgtgatgttatttgtaatattcttgagggatgttaatcctaatattccatatgctgttaaccatgtgtgaacacctttgtggtattattcctaacatactagaaagatgtaactcctaacatcacgtggggtataggccatgtgcgtacaccttctgtgatattattcataacatcgtagggagatgctactcctaattttacaaggtgcgtacattatgtgtgtacaccccctctgatggtattcgtaatattctaggggaatgttgctgctaatgtcacagggagagtacaccatgtgtatgcaaccctggtaatattatttctaatatcttgggggggtgttgctcctaatgtcacctggagtgtacagcatgtgtgtacaccttctgtgatattcataaatcacagaaaaagattacgcctaatgtaacaggatgtgtacaccgtgtgcatcaaccgcctttgatattattcgtaatatactagggggctgtgactttgaatgtcacaaagagtgtacaaaatgtcacagggtgtgtatgcctcatgatatgattcctgatatccagaaggatgttactcctaaggtcacgggggtgcacacacttcgataatatttgtagtcttatagggagattttactgtaaatctcacagtgggtgtacactatgtacactatgtgtagactgtgatattatttgtaatatctcagatactacagagttatagctctccgtgttatattagaattatatctaagacagtacaaataataccacagtgggtgtacctcatgtgtgtacaccctgtgatattatttgtaatatccatggtaaacattacatctaatatcacagagagtgttctccctttgatatttctcatactctcatagggagatattgcttttaatgtcgcagtgggtgtacaccatgcgtgtacattctgtgatacaccttatatcctagggagatatctctccgaatatcagtgtgtgtacgccttgtgatattcttcatatcctagaaggatgttactcctaataagacagagggcgtacacccagtgatgttctttgtaatatcctagggagatgttactcctaatgtcacacggggtgtacacccatgatattattcctaatattctagggggatgttacttttaaagtcacagggggcgtacaccctgtgaggttgttcgtaatatcctaagaagatgttgctcttaatgtcacatggggtgtacaccctgtgatattactcggaatatcttatggggatgctactcctaacgtcacaggctgtgtacaccctgtgatgctattcggaatagccacagagatgttacttttgatgtcacagacagggtccaccctttgatttttttatcatcttagggagatatgacttcaaatatcacagtgggtgtacacccactgtgatgttattcggaataccctagggagatataacttttaatatcaccgtgggcgtacatactatttgtgtacacctactgtgatattattcctaatatcctaaaaataaataggactcctaatatcacagttggtgtacacactgtgatatgagtcgtaatattccaacaggatgttactcctcaggtcacaggtggttaataccctgggacagtattcctcatattccagggcgctgatactcctaaagtcacagggtgtgtaccccctgtgatattattcctcctattcaagggggatgttactcctaatgtcacagggatgtacaccctgtgatattattcatagtataccagagggatattagtacgaatgtcacaatgcgtgtacatcttggcatatcattcgtattatcctaatgtcacagggggtgtgttccctgtgacattattcctaatatcctagacggctatttctcctaacattacagggtgtgtacaccttgtcatatcattcataatatcctaaaactacgttattcctcatgtcacagagggtgttcaccttgtgatattattcgtaattgttttgtgggatgttactcctaatgtcatacagggtgtacacagagtcacacagtgctatgacgtgtaatattatatagaaatgttactcgtaaatcacaggggctgtacctcctgtgatattattcgtcatattctaggggaatgttactattgtcacagggggtgtacaccctgtgacattactcgtcatatcctagcgggatgttactaccaatgtcacaatgcgtgtacaccctgtgatacgatttataatatcctagagacgttactaaggtcacaatgcatgtacaccctctgatattattcatcatatcctcgggggatgtcacttttaatgtcacatggggtgtactccctgtgatattattcataatatcctaagggcttgttacttttaatgtcaccaggggtgtatatcatgcatattcaacacctgtgatactattcctaatatcctaggggcatgttcctcctaatgtcacatggggtgtacaccatgtgtgtacacctgctgtggtattattcataatatcctaggggaatgttactcctgatggcacagacggtgtacaccgtgtgtgtacaccgcctgtcattactcgtaatatcctagggggatgtttctttcaatgtcacaaagggtgtacaaaatgtcacaaaatgtgttcaccttgtgacgttatctgtaataccctggaaggacgttactcctaataggtcacgggggtgtacaccttttgatattatttgtaatctcatagagagatatgacttgaaatatcagtggatgtacacacatagtgtataccctgtgatatgattcataatatcctagggagatacaactcctgatatcacagtgcgtgtaccccgggtgtgtacacccttgatgttaatcataatatccagggtaaagattactcctaagatcacacagtgggcataccctgtgataattttcatcatattatagggagatattgcttctaatatcacagtggttataccccttttgtgtatactgtgtgacagtattctttatatcctagggaggtattactcctaatatcacagtaggtgttcaccctgtgttatcattatttgaccttgctgcctttttgaacccacactacaaaggaatggaacagataagatattgagattagactgtgctgccgtgcggctgccgcaggacacctttcatatccctgtttctcaggctgtagatgaagggggtcagcatgggggtgaccagtgtgtacatcactgaggccactgcaccctttctgggggaagatgacacatctgaactgaggtaccctccaacgcctgttccataaactcagcaaacaactgacaggcgagacccacaggtggagagggctttatacttcccacctgatgaagaaaccctcagaatggaggaaacaattttagagaaagagaaaagggtccccaagatgggaagaaaaccaaatatggcagcagggaaatacatgattatgttaatggtgaaggtgtcacaacatgcaagatgggagagttgagaagggtca

SEQ ID NO: 1882946 - DNA, 4001 bp, Homo sapiens
gctggaggctgcaagattctaaacctccccacgttgctcctgggaataacatcactgttgtaaaatctgggatcagtgcttgagatattgcagaccctgaattctgatgtaccagctgacacctcccagactggtatttgtctcaaccagttctgcgatcccacccaggaacagaagacagcaagaaaaccccacttcaaccccctctgattccatctccaacccgaccaatcaacactccccacttcccgagcctctactcaccaaattatccttaaaaactctgatcctcaagttttcagggagactgatttgaataataaaactccagtcttccgcacacaagctctgcgtaaattactctttctctactgcaattatgctgtcttggtaatttggcagtgggcaaggtgaaccccttgggctgttccatttgggggggtgcagcttccgattccccaccctgcaattgcaccctggagtcagtgacacttggtactgaacagaagtgtcacccttttgaggcaggacgtttcccgcagggaagaggtgtccacaacaggacaagacaccaaggagtgatggaccttcctgactcctctccgctaagcagagggaagctttgtggggcactcttctctgaagcggcaggggcaggaatgacttgctcttgccctgtagattgggctcagtcaacatcataagcagaagactgagctaccgtctccatgggctgacatccactttccatcacacagactgggattaggtgactcactgcatttgccattcaactagacctgggttgtgtttaaatggtgaaaaatggccaattaaaagtggccaatctggcagttttgactgttctaataagtcattcaaatttcatcatggttggccagaaccactatgtcatttagcaagagccaaaatgtttgtctagcatgagtaactttgagtgtattcattagtacatgttcaggcacctttgttcttgagcatggagtgtgtggaagttgcatctgcacttgccctaaaacctcacctgaagtccatccctctcatgaagccattcctgatcaagcggagactcagcatctcccacagagaatgttaaatgggaagatcagagccccagccttcaacctgaagaggagaatgccacgcaggagccggtcagtcctgtccacgtgatgtgggcctttgggattcaaacaaagcctgctgcgccccactgcaccccagggttctcatgccagccctctcaagattgtttcttagaatcagaggcccagccaccccatttgaaacactttctggtcctcgttaaggactggtcagctctgatgtaacccagagcactgactgacacaaaaccattggattggccaacagtttcacctttgtcaccagtgggcaacgttcacgttcacgatcacggagctggtgcagcgttcatgatcacagagctggtgcaatgttcacgatcacgttgctggagccgcgttcatgatcatggagctggtgcaccgtaggactggaatttgagccctgaccttctgtgtattcccctggtacacatcactgttgtcccattcgaccggacacgtctggcagataggatgcccttgaaggaacatgcgtgactcaggaactgtttgacacaggcctttcgaccttgaaaatcttggaatcttggaattaatccttgtaatcaaagaataacccatgattacaaatgtgagggatatgttatcactgcattgaaactacaaggttgcactgtatacagaccctggcatgctatgggcatacagcgtgcatatcagcaagtgtgacaatgatgggttaatttcataagtaggaaggcacaaagcataaatgtatgtaggagacattccccctaaagggctgggagaatataagagcatgtttgaaagctgtacatgtggtacaatgttcacatatgtgccttgtacagcattcaaacgtgttcttacacagacagacacagacacgcctctgcacctgttgggtcaagcagtaagaatctaatggtgaccacctgtctggccagaacggtcttccttttggattagaagtctgggctatatcagctggagttctggaaccagccttggtttggtaaacaacatttttcttcctctctccaccctttgcatttcctttccttgagtttccttttttttttttttttttttgagatggagtcttgctctgtcacctaggctagagtgcaatggtacgatcttggctcactgcaacctctgcctcctgggttcaggtgattctcctgcctcagtctcccgagtagctgggattacaggtgcccaccaccacacctggctaatttttgtattttagtagacatggggtttcaccatgttggccaggctggtcttgaactcctgaccttgagtgatccacccgcctcggcctcccaaagtgctgggattacaggcgtaagccactgtgcccggcctcctggagtttattttatccagtgttgacctgccccctctcggaacctgggttagcctgcctggtgcttgaggcagggagctggccacgctgcgctgctgtcttgtaggtgcttctcaaggtgctttttgttgtgattcctccagtgcctctggttttcgctttcccttttcttggggcttgtttgtgtttaaccaaagttcagggcccttggggtaaaacaggaccttgttcaggaaactaccattaagcaagcagcaagtcaaacaacgaaagtacaaacaagcccaggcccctcccaagatacacagtcctccaggatgtaggctccagactctgggtccttctccacgcccaccgttcacgccaagggatgcggcagtccgacggcctctgggaatcgcagggccttggtcttgggagctgctctcctgcagtgtaaactcagtgactctcattcaggcaacagacctctccaggtcgtccttgttcaggcggagcacttggttcctcagacccccatctgtaccagagaaatggcgttaaggcctcacaaagtagttttcactgaagagaatcccgtgtcctacccttgtgcgtccgaatcacctcacggacctgtcatgaagaggctctcccttctgcgggctcactctgacctttcctttcccccgtggtttccatcactgactccatagtcagatggctcaggacctcccaggacgcaccggcccatcgaaccatccaggggtgccgctgttcccagcctcccgacacccccacacggacttctcttaccacctgtgttaggccattctcgcatggctgtagagtaatacccaaggctgggtaatttgtaagaaaagtggcttaattggctcacagttctgcaggctgtactggaagcatggtggcatctgcttctggggaggcctcagggagcttctgatcatggcagaaggcaaaggggagcaggcatgtcacataggatgggagagacagggagagagagggagagggacagagggacagagagggagatggagggagagagaaggagagagagggagggagggagagggagagagttagggagagggagagagggagagagggagaggcagagaggaagagagggagagagtcggggagaggcagagagttagggagagagggagagagttagggagagggagagagggagagggagagagttagagttagggagggagagagttagggagagagggagagggagagagttagggagagagagggagagttagggagagagttagggagagagggagagttagggagagagttagggaaagggagagagttagggagagagggagaggaggagagttagggaaagggagagagggagagggagagagttgagggagttagggagagggagagagttagggagaggcagagagttagggagaggtatcacatggctttaaatgatcagaacagggagtcgcggagct

SEQ ID NO: 1882947 - DNA, 4001 bp, Homo sapiens
gaggtcaggagttcgacactggccaacatggcaaaaccctgtcactactaaaaatacaaaaattagccaggcaggccgggcacggtggctcatgcctgtaatcccagcactttgggaggccgaagagggcagatcacctgaaatcgggagtttgagaccagcctgaccaacatggaaaaaccccatctctactaaaaatacaaaattagctggtcgtggtggcacacacctgtaatcccagctactcgggaggctgaggcaggaaaatcgtttctacctgggaggcagaggttgcggtgagccaagatggcaccattgcactccagcctgggcaacaagagtgaaactccatctcaaaaaaaaaaaaaaaaattagctgggcgtggcggggcatgcccattatcccagctactggggaggcgaaggcaggagaattgcttggaggcagaggatgcagtgagctgagatcacaccactgcactccagcctaggtgacagagcgagactctgtctcacacaaaaaaataaataaataaaattaaataaataataaaataaaacatccaaattgtctttatttttctatatttgttttgttaagctattcagattgtttttatttaaagatagtaataaaatgttttcattacgtatattttaaataccacctctccctaaaaaaatcctaaagtaaacaaccctttgcagaccggaaggtgggaaacgggaaggggtaaaaaagacggtgcaggcgccgcacctgctgagctgcaaagtcacctctggatttctctccaaagcaaaagcaggaggctccagacagcaggagatggaaacggggcgttgggcaaggacggtgccgtcgtgtggtcactaggtggcgatgcggctccgtgctacccgccccagatcgccccgagcctctggggttaaaaaccaagtctgcagagcgtggaaaaaaaaccttttttccacgagataaccacatccacattcttccgccccggaggaagtcacctgtcacaggtgttcaggatgtggcaggcccacgggagtgactggtcaggcagcgggcctggcacgtctaaagcttcctaggctcccacagcacgccgcctggggcacggcacccaggacggtggcagagctgacctgactcgagtgaccggcagcgtctgcagggaggatggggacgaggaaaaggctcccactgcgccgggcctcacctttgagtgaggatccagcctccccattctgctccctgagggggcacctgggtctcctggtgactctgtgggcatgaaaggtgctgagctcacagtgcgggggctcccatctggccacccactgcacgggccgtgagagcagcacccaggcctccgaggtgtccctagggtggctccggggcctggctctgaaaaggatggcccgcttctgcccagacgctgccctggtcacgctcacagcagcccgggtgactcagggtgacacgctcccccgccctccaccgcaagcagggcttagctggtctagggaaagaaggtgtcttttctgcccaatttgtaatccccttactactgaggtgtgtccaagtcccagccagagcgactccttcctgcaccaccccctccctgccaggagccccagcaagcacaaagctgggggtcacggtgtgggggctgccagtggcagcaggtggctggcgtgggattccaagctctgccaccaaagagactccggccgccccaggatgcggcctcggagcatcgtgccagcctccagggatcccagcgccgtttcctctgcacagctcctgcccacgggcaagcgagtgccacctgctccttccactgcagcgtccgggctcccttgccgcagaaggcaggaatccagaggaacggggccagctggcagcgtctgggaaccggcatttgttctgaacaggcagtacccagctcagagcagacgtggttctcaggggctgctgggcacaggctggagtttgtccacagagatggcattatgagcagggtcggtctctcaggctggcccacaaaacccacaaaacccacagaacccgcaggcctctccgcgccttctccatggccctgctcctgaggaaggcccttggccacggggattccgtcccagactccggaggccatcggggaccatgaaatcacgctgacctcgggaggccggagacaagcagccatgtgacctaggcaagttcatgcactctctgggccttactttcttcatccattaagtgggtacaactgtgtcgacactcagaggttgttgagaatatcaaaggggtcaagacctgtacacccatgaaaagcacctggcagaggtcacatgagcccaaaggtcccctccacccgcggtggctgccgtcacctctgcctcttgcttccggaacaccccctccctccggccagtgcctcccttgctgacagcctctgctcggtctcccttccacattcttcttcctcttcctggccaatccttgtcacgtgtgccccagcccaatccgtgggctcacctggatccataggtggctaaaggccacctatgagctgaggacgccaaagcaactctcccaggccagacctcagcctggactcagggcttggcttaggcccatcaactaggaggccacacttaacagactctccggaccgggcacagtggctcacacctgtgatcccagccctttgggcggcccaggcaagaggatcacttgagcccaggagttcaagaccagcccgggcaacacagcaagaccccgtctctacaaaaaatacaaaaaactagccaggcggccgggcacagtggcttacgcctgtaatcccaccactttgggaggccgaggtgggcggatcacctgaggtcaggagttcgagaccagcctggccaacatggtgaaaccccgtctctactaaaaatacaaaaaaaaaattagccgagtatggtggtgggcacctgtaatcccagctactctggaggctgagacaggagaatcgcttgaatccaggaggcagaggttgcagtgagctgagatcatgccattgtactcaagcctgggtgacagagtgagactctgtctcaaaaaaaaaaaaaaaaaaaaactagccgggcatggtcgcatgtgcctatagtcccagctactcgggaggctgaggtgggaggatcacctgagccagagaaggtcgaggctgcagtgagctgtgatcatgccactgcactccggtctgggagacagaatgagaccatttttaaaaaaaaaaagtgggaaagcccaaattttacatgcattttgcgtcaaatttctaaagcagggagattctgaaaagtcgcccgtctggttctcaaagcagtcgcccgtcctggttctccaggatgcctgggtcagagcatgaataaccaccccgctccccacgcacggagcctcgcagtggctcgagctgagaatcaaagcggccgatccagggcctggtgactccaccagacaggaaatacagaggcttctagcaatctgctctgccatttgaaagtcctgggtttgatcctgcgcttctcaacccaacactaacaggtctgcagtgggaggaggtcgagagggagggtggcgccaagctggctgcatggccgggggactccagggtgtgagcctccagctcggctgctcccgagcagacccggccacttcctgccatgccttctgcgggagaggggagatttacaaggggcgcccttatctctactctgcatggctccagggccaaggtcaagcaccggtgtttgcgagagactcagctccccctgagctcccacagcctcatctgggaaatgggaatgatcaaggctgcaatcgcagcagattatggcagggaggatgggctcagtgcatggctctcagcaaaggcacaaggtgaatgctaactattctggggacaatgacacgtgcccacgtgccccttaggctggagcatgac

SEQ ID NO: 1882948 - DNA, 4001 bp, Homo sapiens
agtggccccaggtgcagtgtgaagtgctgtctgctgttcttaagtgcaggctggctgtcaggtgtcttacagacaaaaccggtgtgggatgagctttctaacaggctgaaatgatggcaccacagactacttactacagctggccctgagttcaatgttaacactattaaatgaatcaacactaacattaaatgaggcgtctttaaaatcaaggtcacataggctgggtgtggtggctcacgcctgtaatcccagcactctgggaggcagaggtgggcagatcacctgaggctgggagttcgagaccagcctgaccaacacggagagaccccgtctctactaaaaatataaaaattagctgggtgtggtggtgtgcgcctgtaatcccagctacttgggaggctgaggcaggagaatcgcttgaaccctggaggcggagattgcagtgaaccgaaatcatgccactgcactccagcctgggcaacagagtgagcctctgtctcaaaaaaaaaaaaaagaaaaaaaaaaaagtcacataaagcaatgttaggtatgatcagctgacgaaaatgttgtgatctgtagcacacaggagcagcaccgcacgggctcattcagtgttctagcaactccacagaaccacctccaatgataagcgctgactgcatcacctgtggtgggggccgatttctattctttaaaggtggcaagggttttggaaaccaagggatctcacacccagttcagagactgagttaaataataaattttaacaaaccaagtaatgaaagcaagtctgaacagatttagaccaataagagcactgctttaggggaaatacactgggaggcatacagtcgagtataaggtcctttacaaagtattttacccacattacacagttcagtgaacaagcctagttagtattaaaacatttaacttcacgtttcccccaaactaaactgtgaagtgtacctttccacgtgagtacaaagtaaatttacaccctttactatgagattaaatgatttcgaccaccaatgtctagcgtgaaacaaatagctcacaccacgctggtgaagcagatgaacaaggatctctcatcaaatctgttggtgggggccgggcgcggtggctcatgcctgtaatcccagcactttgggaggccgaggcaggtggatcacgaggtcaggagatcgagaccatcctggctaacatgatgaaaccccgtctctgctaaaaatacaaaaaattagccgggcgtggtggtgggtgcctgtagtcccagctacttgggaggctgaggcaggagaatggcatgaacccaggaggcagagcttgcagtgagccgagatcgcaccactgcactccagcctgggcaacagagcaagactccgtctcaaaaaaaacaacaacaaaaaatctgttggtgggtttctaggaagcaaactattcatgagaatcttcagagttttctttacaaagcttagtttaacactggctatttctgatgatgaaatgtttttgctttcttggtacttttctgttgctctattttgttttttacatgagcaggtatcattaaaaaaaatagcaccatcctattaaaaagtaaaaaagatctactctcgcaaataacgtataaagtatcaaattagccattactccatcgagtgagcccacatagggtttgagatgtcaccaaaacactgcagttcccaccagaactggtggcggccaggccatggccgtgttcactgtgtctctgcttgagcgccagtggccaagctaagccaagggtagaaagacgttagtatgtgggcaacttctataacacctgcgaataccaaactggcaggggaaaggccgttccctgagctgctggttggctctaagaagacagctgctgcatgtttcaatcagagactagcttatacataaaattacagattgacttcaccatactgcacttttatgaataagctcatttctgactggctacaggacttttaagaactatattattcaacaggtagtcgtcacctgttcagccaaagctgagtttttaaaaatctcagactcacaagacagcgtgcaccagtccctcccatactcacccactactttacaccggttttgttttgatggggggagggtgctgacgttctatacagcacagcattgacagcacatcccaagtttgcgggaaagaaaacaaatttgtttttctcttcctacctttctgggttacaactgaagtttttatcatgtgcatatataaaaaattatacttttgtaatttaaaaacagaaagtaaagatgataaaaatgcttaaaatcaccctgcagggcagaggcctggcgtgtggactgatgctttgtgctataccaccagctgctctgcctgggttggctaagaaagagaacggcgaagtgcatcaggtccaccatcaagggactggacctccccacaatcctccaagaaaaaaaagggccatcaggactacctttcaccatgtaagaacccaaacctctatcctatgttttccagaaggaacagtacttctcttggtgccatacacaaaaccacagaggagtttccctgggctagagtctgagaaagactgctgagcgagctcaaggacccaggcccgtacacatccaaggagctgcaggctaacaaaggtgaccacacaaggtgcatggggctcaagtcctgcccccacaggctctaacagaggcttacttgcatgcctgggcaccctgcaggagagttgtatttgttaaaggaactaaataagtagtccggccaggcgggctactcgtaagaaacagagaacagcagcaaggctcctaggaaaaattaagtggtgatactttaaatactgataccagaattgaagtcatcccgggaatcccatccacctctagattctcgagagctacccattcctgaggatacacaaaaaagataaagttgaggtcgtgtcattaccttgctgcgcaaacatggaaaaattcatttggaagacatacaactcaagtgatggaaggttcaatgaaatcattttaagagcttttgcttccaacagaaaacaaaaaacgccaggcttgcagaagcatcagccattctttctaggattttacgcaaacttttaagagctcacgagaacctatcacacctatgagataatcgagttctactaggaacgttcacgagttggaattggtaggcatactgcaaatctttatgatgttcagctttagaagaaccaatcacctctgtcatctggtccaccttttctgaatccaaagccacctttatcttgttttctgccttctgcaatgtccacacgaagtgaccgatcgcccaacagctaatgataaagggaaaatagtgtaagtattggcaaagaaaacaatctcaactgctatgacagagaaaacccgaggatacttactgcaccatcgtatgtcaaggcttccttaagggaatccacttcatcgaattctacatagcagaatcctggaaaagaaaagaagaccccgatttcctcaagtaattctgggttaaagatgtgggaagatcctattcatactacttctccacgtcacaactaccattctgttgtctagatgatggcagactaggagagcctttcaatagatagaaccctgactggcattcctccctctcaattctattttatcagtcagaaaatgctaactgaacatgcactgaaatagcagctgcgtttctagaaagctttcttcttgaatgttttaaccataatattcaaacctttctcaggccatctgcagagctcttctgacttctgaatgactatttaatctaagtgaggattagatttcgtagatttcaaacttggtacctaaaatgctctgaagaaagaggcttaaagtgccgatttaacttactactcaggtaactgacataaaatttgcttcacaaagctgaaaatatatccttggcaatcagg

SEQ ID NO: 1882949 - DNA, 4001 bp, Homo sapiens
ggtgtggtacgaggtttcttgttggggtgatgaaaatgttctacaattgaatgtggtgataattgtacaaatctgtgaatatattaaaaaccattgaattatatactttaaatgggtaaattatatctcaacaaagctttctctgaaaaaaaaaaacaaaaaacacctagaactgtcagagatctgcctcttactaatgagtaaccctgggcaaattacttactctgactcaattcgctcaatctttaaaatgggaatatctatcttagacagtttttctggagttaagcatgactagtacaatgttctaaacatagtaggtgaccatcaaaatcataaaactccaaagtataaagtcttaattataatgaaaattattatctgggcaccaaatatttacaaatactattttttaaatgagcacagtgtgatttggaagtatcatagtttttaatttctcaaaaagcaataattttcctcaaatatttaaaatccatcctttcttgagctcatatgctaaaattttgaatgaaaagtgatcaaaaactaagtaattttctattatgtttcttaaagtataaaattaagaaagattaagaacctccactcttttctctgaagatctttcagacactagagatatttaattggcaaattacttgcacatgccattaagtggttagactgaatttgtttttacaaattctatggactcttattccttaacctccaccacactataatctgaaatcatcaaggtcttcacttatgcaaattttaactttccatgtttttgtttccatacagaataactaaattaatgcattttaatttctaaaagattcactttttgaagcagcatatctatgaaaaagagtttctcattaaaataaaaaagattcatcaagctatattatttcaaacactaaaccataatctctctctctttctcatggattttaaaaattccattaatacaataaacacaaaagggatgtttgtgttaaacataaaagtaacccctcttggaggcaaagagaggactgctgaaggcccagcattttatctctgaacagtttcatgctttttctaatgcatgctaaatcctcaaagaaagttgtggtttttctctaagggaagtaatattccaccctgctgatatggttaacaaccagcttctacggccatcatcttttaagcagggagcaaaagacaaattgttgaattcgtacattaaataacataatggagtaagtggatgcagacctatctctactgccatatgctccaatatcaaggttgccatttcaaacccttttgacaagtgcctttttacattaatcacagctaagggtctgaagaggaaagacgtattctggctacaattcagagtcgctcaagaaacttctagggggaaaatggttgccattaaaacatagtaagtagagcataagtacttcacattaaaattgagttctctataatcccctgtaaactttttattattattattctgaacatgtaggtacagtggtgataggtatctttcaaaaaataagcacacacacagccaagctgagccaaatattatactaaagtcatatgtggtattggtgtatgtaaaaattagggctaatttaaaactcttccagttctgtacttagggatggaactagcctgagttaaggtcatgtggcattcaggaaagaaccctatccttctagtgccagaagtcaaagttgtgattcttatgaaactagtcaccttttcccctctgggcctgtttcctcatccatgaaagaaagccataaactatactcagccattgttcatttgaagtaggaactacattcccttggagagcttgtttaaaacacattcccaagccccacacccaaaaattatgaatcagtagatttgagacagagccagggagtccacagttaaccaacattctacactattacaatgagaacccatggtctacctcattgataagactccctcctcctctataatctgacagatctatcaattctcaagattcatacactatttaagtcatcatagtgactgtgagtcaacaacaacaacaaaatggctcaaggctggcagatatttagcgtaagatattaaccatctgtcacacacactaactaaatcaacagaggggccaactgagatgtttccaattatctgctagaaaaagtattttcaactgggtagaataaatcattattagcctttcataatatcaaaagtaggtcaattaaaatggtgtttagaggcatatagcagactgtggccactctccagatgtgtaagcttgctttaatcatctgctgtgtgttaattattgttaactttcattaccactagagaatacaactaatgttttaaaattcttaaagcattacagagtcctaattcactctctaaatgcaaatataatatctatattgttttcaaaaacctatttcctaagctagtttccttagacggatattatcgaaaattttcttgcaaaagcattaacatacatttaaccctacttaaatgcttcaagagcagatgtactacaaatgtacacccacagtgatcccatattagtataaaactgttttatttcaattaaaatgtctaagtatccacccccaacatatacctaaactgtaattttctctgagaatttccaatatgttcttgattttgtttcctttatcaacctatcagagcaaaaactgccttgcaactgttggaagaaatcagtcattagcagcaagattacagcaaattttccaatttagaaaaactgtatttttatctctctcttataccagaagaagaatggtataattttcctatctttaaataagcagtacagttagtttaaaatagtcaaattttcctaggactctaagtttcaggattttatgttagctttctgttctctacaccttctttcctactcacaagttctcttcacccttcatcatgcatgcacatgaacatgcacatacacacacacacatgcacacacaaacacacaggtgcacatgcacacacagggacagcagcccccagtccagtctctccactccctgacaggcttctaaggaacagttaaccttcaggcagtagttaactaaggagtggcttcacatggttattttgatttgctctccaactgacattcttccaccttctcaacaggtctgccttcttttctccccctctctatttttaaaatggagtgatgaagtagcaaaaagtacaatattttagccatttgagcacgggcgattcttaaattatcccaccaactggaagtgctctctgatactactatctttcaaaattgaagccattatggtcaatcgtgcaaatccgtatttagcttttcgtaaatagtggatttttgacccaatgaactggaacagtttctggacagtctctaggatctctgaaaagatactcagtacccaggcatgccacaattcttatcaacatagagactatttactttcaaaactcatactgttcttattcgaaattcttactctctatttgggatgtaagcatgtataagagaatatactcagccccctctttacctctcataaaataaaatcaaatctactgcagggcaatatttttctttcatcaaaatgacacattatttttgtgaaacaccaaaatcagaaccaatattaatgaagaactttccccaagtaacgtttcttctgattcttcaccaccttctccctcagctatcttttcgaatatttcattttcgaagtgtctttacaaagacagtaacaaatgaccttcctttccagcaagcttaaaaatgatgggtaaagtctgccttcttccaatccaataccagcattcctctagctttatatatttaatattaaatttgagtgcttaacttcgaaacttctcatttccatacttttaactcccatcattttctgcaacctgaatcgaagtgactg

SEQ ID NO: 1882950 - DNA, 4001 bp, Homo sapiens
ataagcaagaaatggccatagatcattcccagccaacacaaagtaattattatctagaaagagataaaagtaatattataagtaaactattacctagaaagagataaaagtaagtaagtagtccaaaactaaccttaaagaagcaggagatcacacaaacaggccataaactgtagaagcacattaaatccaaagctgccaaattcatgacatgcctggcaggtctgcatgggtgcacaacctgagcagctgcccagggcctgtacacagaagggaggtacacttagctaatgatctactgtcaatgtcttaaaagtgtcaataatttttgaacactgggccccacagattatgcaggtggtcctggagactggcacataatggtgactgagatatgaaaagcaagcaagtaaaatgtatacacaccggcaaaatctaaaaatagctccatttattaatgaaaaacaatatcctgtaatcaagacacagcctgttggttaacgttataaagaattactttgcttgtttaatgtgtaaaccaatgataattcacaaatttgctaattgtttttctgtagatgtgagctgtcaaccggtggagcttaagtattcaaaagtaatcaaccaccatttcaaattccatcaaaaagtcatgtatcactttcaggagacatgaaattttggtacatttttactggagttgcagaaggagtgataaagcaaaagtgaattttaaaacaacaaagcaatctcctcacttcaccacagaaaattaaatgtagtgaagcagctttgtgacacttcagacttttccagtattctctggattgtgaactgacaaagctacatatgagtgaaaaaaaaaatttgaacttttgctcaaattatattcaccctaatgtggattgtaaagttcctttcaccagtgagaaacatacagctttatatccacgtttacagaagagaaagagttaccaaaactttaaatatcaaaaatatttttatgccactgtcttatatacttcagcataactcatttctaaacatgtaaatctagaaatgaagcaatcagagggaaaagttaagatgaagaatcaaacatcaaatccatcttggttctagtctaacaaatgtttccccactggatttcaagttcatgagtagagtctatgtagctctggagaaggtatttaatagtaacctagatttatataacaacatttgttccaaacaacatttgcatacatcatatagtttgtccatacaatatccctataaaaacaagaaaaaaaaagcatcctcatcattttaaagatggtagaactgaggcacaaaacatataaaggtttttccaagatttcacacatatacaaagtaaaacatatttgaaaatcatttctcctttttaacatatctctattattaaaatctgagtgcaagattattgttataaaatgtatgcccagaaaagatattagttacaatgtaatttcaattataaatcattttacctggcactctatgaggcactaaataatttttaacaaatatgcaaattaaaagattatattttctaaatctcattgtgaaattatgtttaaatttagcaccagctcatatcccacaaaaaaaaaaacctaatatagggaaaacttgtgatagaaacagtctattaaatgaaattatattttgatttctaaagctgccttgcaagaacagaggttacaatttctagaaggagccatatacaaatttaaaaagagccataattcatgcaaagaaacattttctaacctgtaatttatagttcagctgcctttctaaaatctcaagcttttagttaaataattgtagatttgttgctcagtttaaaaacccttctggaatcacgtctttaactggcgttgtgacgtcttacgtcatgatgttgcgtcaccacgtgatgacgctgtgccatcacaacacatcatcgcatattgacacaatgtcatggcataatatcatcaaattaaattcatcagcactccccacagcctggccccaggaagggcaagagagctttaaagtttctctttgttcttgtcaacacactcctggttggtaggcgagaacagcaactggacaaatcatttcctggtctattaaaacttcctagatctcaaattaggagaatttgaaagttacagcttagagttggaggaaatagttttcacggggatagatttcatggcttgttactcaccttgccccataactagttacacttgaatcccattttaaagataaacatttataaatgttagttcctcctttttttcccaggccctaaaataggatcatatttaggctggtgaaaaaaaaaattaatttgtttctaatttcttgccctcaatgtccaccttcctcaaattgttttccttcaccacaacattcctcttctataacattctgaaatagcaagtaatggaggataggaggcagatccagtcaatagttttgactacagacatttatataaggctggagggtgtgttgaaagctgtgagagagggccttttgccatcacaggcttggtgacaagcagagtctccgtgttagcaactatgataaacctgggcatttggatgaaacatttatctgaatgttatctgaattaacttatgaactcttccaaaaatatgtagttaccagttcattaaacataatgggcggtttgtgcagactgtcagtgtgtgacctctctttcattagttcatttgctgtgtgccagacactgttctaggtacaagggctcagatgaaacagaagaaacagtgtcaccttgaggtgctcacagagcaataagggagacaagtgagcaacagatttcaagacaacctgctaagggctctaatgatgatatgacagagtgttctgaggactcagaaaaggaaaggataatctagggttgccaagaagatcctataggggagagaacatatttttgtatcttgaaaaatgaataggcagagaagaaaaaaattccacattcaaatgcaagaattggacaagttggacatgtgggagacaccaaagtattagactaaatccgtcattttgtagatgttttctcaaaatgattggttcatataaattttttttttttgcttttttttttttttgttttttttgagatggagtcttgctctgtcacccaggctggagtgcagtggcgcaatctcagctcactgcaacctccacctcctgggttcaagcgattctcctgcctcagcctcctgagtagctggaattacaggtgcacgccaccacacccagctaatttttgtatttttagtagagaccaggtttcaccctattggtcaggctggtctctaactcctgaccttgtgattgcacccgccttggcctcccaaagtgctgggatgacaggcatgagccaccgcgcccggcccatataaatgatttttaagaggtactgactcacactcatattaccataatccttcatcataattacaaatagcctctagataactcatgaatacgctgcatcaatgcagtggagttttcttgtaggagcattttccatccatgagaccaaatatgttccttctctctttgtaaccaaataaaaactgaaaatcaaagccacttgtactttcttgaaagcatctgactagccataaaaaccttggcaacttctcttctggtgtgtacataaagatggattaggaatatccctgctgctgattcaccttttaaaacaagcactggaaaaacacttcagcccagccaatgataagtggttatatattctgacattaagccccacatgaaagtcactggtagacattttctacagctaccataatcctcaagaggtgtttagaaactagacataacaaaagaataaaaacttgaggggatttcagtcctaaaagacttcatctttctgagaattacatgacatcgaaaggcaagttttcaaacaagtttctaaa

SEQ ID NO: 1882951 - DNA, 4001 bp, Homo sapiens
actctgggaggcatcagtcccttctggccctgattctagctcagtctcagaccttttttgccccttgcgtctcagaagcaaggagggtgactgtggatctgtggtctaagtgtggggctcctctctttatcttcaggcccaaggcagtgctgtaaggagggcgcaacatatgtctgttgttacacttgccacagtcagccttataagttccctgctactatactgtgagctccttcagggcatagagcatagctcacttctttctgtttacttgcacaaagcctggtagaatccccaatgcatgcagggtgcttaataattcagctgcattgaaaataaactgcataagcatgcagggatgtatgtccactcttaagctgctgcagaggccactggtcctgcatccacacgacagaggcctgaaggtagcagccgcccctctccctacccagtggtcagccctctataattctctttagacagtgctccttgccatagacagtgaaattccagggattaagaagccttgacagacagcttcctccctaacttggtctactttcattttttttgctccaaggcaacagaagcaggactttgtctcctgccaacaggcaaagccctctgggaggtccttacagagcctcactggtcatttgcagctaatggcaatgttttcgtcagatccctcttgaagacagactctaattgaaagaagggagacagggtgagaggatgccacccaagaggggatgaaaggtttcagcagagagggggctgtggatcctgaggttcatctccatggataccatggagccaccagagggcaggggccttcctctctggagcccaccacaaatccccaggtggcctgccaggaagggcctcactcccttctcttccagcattctaaggacacatggttttctcttttctcttgttttctgcctcagatttctgctctctaagacttcaggggcttgttctgagtcaaggcgggtcctccccagcaggacccagaggctgagtagagcctgcctgggagtgatcgcatccttttgctcaagttctctggtgggctggcggggattttggggtggtggattccagctggttcctctgcccaggaacggctcttgttcccactgagaccaccactacaagactccttccctgtcacatgacccagccctaaaggctggccaccgccccggttcattcaggcaactgctggagcagctttcagcaggactgtggctgacctcaagagaacctaatcccgcaggctcgtgggctccatctctacccctcccccttgcgtttttcctttttcaagcacagccagcccagggccaggaatggtcaagtttttcctggtgaaatgacactgccacaaaggcagctgcctgggaaacagcattagagggaagtggctgagacggggctggagcggacctggggtgggctgaggaggctgggcagagctgtgtcctgccatctgggggactgcccaagtgctgctgacacttctagccccctctgtccacctgtgcctaccatgatttgtttcctgggatccagaagcagctctaagagcttttccttccgctccaaactcaactgtttccctgcacagggtggccatgagaaaagggaggtcagggtggaaagcgtaagcggttggaggtgtagtcgggctagcggctgccagagctctctcctgccctttggcctccagaaaccccaggtctctgcccaggggaccctggccacagtgcacaccactcaggacggaaggaggagaaggtccttcagagactgcccggggatgtcttcccctagagcgctgcctgtttccatggaaactggctatcactcagggctatgttaacctctagagaaggagaaaccccagcagagacaaacccagcaccactccttgctcccccagagggaaacgggctgagcaatgcctggctggtgcctgacagattctgggggctacaaatcatcctgcccagcatagccaggggtatgtaggaacaaacaatcacctaagagactcagagctccacccagataaacctggttatctcacctgcgtccagaggacctgtccggcagcacctccatgcctgagcccaagccagggctcatgtgaaggctcctgaagtaactccaagcccagaggagcagtgggacaaggcagggagacaggggcggcaacgtgagctcttcaggggaggctcctggactgcctaggcattgttcctcccacccactgggcagaggccccctacccccaggcagcgccagctggaccaagccaggaaccacgagccagcggcctgagcactcaccggtctccacatcctgcacgtagaagtgcaggtcatcagtgatctcagtcacaaacacgggcttgtagctagcagatcgctccttctcctccagcactggcatcacctcctccacgggctgctcctcatagtgggcccagacctgcatgttcagtcggcagaggtgagaagagggcgaggaagtgaagtcataaaagacactgggaggccaggcgtggtggctcatgcctgtaatcccagcactttgggaggccgaggcgggtggatcacgaggttaggagttcaagaccagactggccaatatggtgaaactctatctctactaaaaatacaaaaaattagctgggtgcggtggtgggcgcctgtaatcccagctacttgggaggctgaggcaggagaatcgcttgaacctgggaggcacgggttgcggtgagccaagatcatgccactgcactccagcctgggcgacagtgcaagactccgtctcaaaaaagaagaaaaaaaaaagacactgggaaaggggttttgggcaaatgggatcggccctgggcgagtgactgtggggcactcgattcacaccaggctgagcccctgaagccctctatctcggaggggaaaggtgagttctctaaagtcctgatctagcagttctcaaattctggcaggcatcagaaccaacaagggaatttattaaaaatgcaggccccagatcctaccccaggcctaccaaattacaatctgttctgagcatcccagagagtaaaaaagagcaaaaccagatcccaggctatctcatgcacgtccgagtgtgagagccctgctttcatgaactctttggctctgggctcctcacacccgcacctctcttgctccagctccccatctcccttccccgtggcactctgcagggcactctgaattctgcaggacctcctgctgtcacagggctcctggtgctcctgaagcagtccaagccacagccctaggctggggaagagctcaccaagaatgcttctgctcagcaactttccctttctccatcctcctcacctccagcaggttgctctgacctcagcccagaagctgggccatgcgctctccacccttccctctctcccttccttccccaaagccctgtgctgtcagggctgcagtggctcagaagctgatttgacgcgacagcgtgtcaagtccaatcctgcagccaggagattatccaaatggtgaggtctgtcagagcaggggagggaggtggctttccagctgagcagcaggaagggtgggtgggagagtgcagagaatggatcacgcgtggggtcccacagacgcacacaggaataaggatgattaaaagtatttgcccaaaacttctgtgcttattaggtgccaggtaccattctaaacattctccaaatattaattcatttagtccttacaacaaccctttgagtaggtcttggtattatccctgttttacaaatgggaaaactgaggtacacaggcttgcagctagaagtagtgaaatcagaattcaaacataggcagcctggcactacagctcttccaggggcactttggcattgactaggtatccctgagaaaacaccaccaaccaggaggaaaaagctgtttgttggtggg

SEQ ID NO: 1882952 - DNA, 4001 bp, Homo sapiens
ggggcgaggcaagaggtgtcgggccatgtgggtcccatgcaggttccaggaaggacgttcactcagcagagcaggggaatggcaggctggggggagctagtgatcaagtgccctcaaaacatacacgtgtgtgtgtgtaagcatgtgtacggatgtatctgtatgcggatgtgtgtggccacatgtatgtatatgagcatgtgcatgggggtgtgtgtgtgaacatgtgcatgggcgtgggtgagcatgtgcacacaaacaaaaacaaaccacaacagactgtgttcaaagcgagaggatccctaagctgcgatgagggaactgaatttaatgtcctaggttacagcccggccaacagctgccccaaaccatgcctgacacagcaaatttacagacacatcaccctacagcgctcaggtaacggcttcccagccacgccccattacccacgtcccatgctgccatccaagaaacgctccagggaagggaagccaaggctgtcagttcacatctccctctccagagtcgagctcaagcccgcggctgccaccctccatgaactgatggggaagggggccacaggaaggccccaaccccatccagatccaggcctgcgagcccaggggtggcacagaaacagcaggtgttccctgagagaacgacccagggctgtggcaaagccccctccaggctcagctcatcccacctgtggggaaggcaccatgaggcctcctcacgaggcagacgggtgtttgctgtggtggacagatgcccacatctcacgcgcagcctcctggaaggcagcagatgcaaacaccccagctgagaggaggaggctgaagcaagtgcaggaaagaacaaaaccaatgcaccactggaccatcacctttagagaaaaaggttaagaaatctgtatcacataaaacaacctccaaacaccaggctcgacgccctcacccaccacctgccctctgctcatagaaagaacgtggtgaacaggagcatattttacacaaacacatgcctcctcccagccacgctggctccaacctactaggcacctggaagctgaacgcatcactgcactcacacgtgcctaaacacttaggtgcgccgagaagcccaggcatttggggtttccactgacaaggacacggaaggcaaaaaacccaaagcaacgtgggtccttccctctgaagggtcagataaaccggcttattttattcttagaataggtttttgccacagtgaaaactgaataaacaacaaagtcagaaaggggcgtgtccatccacagactttaatcctgcattaacagaggctccctaaagaagggggtgccggagggaggtgcagaccgcttcagggttggcccagcacctgggtggtgcccatgcccccagtgtaaaaagatcctcagctcgtcgggcacgaccttgctttgttatctgctcttggcctctgtccattctcaagccacgtcacgtctctatgaccaggctcttagatgcccaaaagcgacattgggagaggaaactgtcagcccccagcgtggctcctgtggcttctgagaagccccagatgtcaaacaggcatcagagcattccagtcacgtgccccacagagtcatcacggagacagcagagacagccatgagatttgctcagactttcagcaaacccccaccgatgcctccacactggaagttggagcgtggtggaccgtgcgttataataaagttgctattgtatgtgactttgatcctacaaagaggaaaaaacatgggtaaaaagtaagaaaagaccaaaaacgtcactaaacttcaaaaacccgggacatgatgtgattagaggaacagcatggaacatggcaaaaaatacataacaaaacaacaaaaaccagcaacaggcgcttcctccagacacaccacggcacacttcaacctgttccttacaagactacattgagcgtgctggtgttaaatgcgtgcaggcttccgtgcaggagccctctgcacatggcagagagaatgtggcccgtgctgcactctgacgcgcagaccatcttgatggctcagggacggccaggctccaccacacctgctccctcctgactggcctctctctaccaagccagggacaaggcctcatccccagaaccaccaaaggattaacttaaagcaaaacaaacacaagcaaacagaacagaaatgacttgggttcctgtcactttgtgctcccaagccattccaagagaccagcaattaataactcgcaaagaattagctcacctccaacaaccacgggagcttgaaaaccacttccttccctagttttgttacttgcagaatgaactgattctcaaatccctggagatactgggctgagtgcatttgtcctaattacagcaacatcatcttcctcagtgcaccctcgctcacagggcagcgcccaagatctgcactcaccaaagtgagcctctcacagatggaatctgtgcaaactttaagtcccaacaaaactttgccaaactcacttgttgagcaagaagctcagaaatggagatttctaggaccctccgcatctggctgcaaatcccagacacaaaccatccaaggagatcgcacctttgccttccactgagtggcccaacgtggagtgctaggaagccatcaggagccagacagacctatgtccactcccggaggcaccgccaggaccctgtcctgcgtgatgggtctccctgcaacacacgaggagtccctatcccaggggccagaggggacgtcccgcagagaccgtcctgaccccagccctctgcattgcaccaggtggacaccacagaagctctagcctgaggcaccgagccgtcaatcttccatcaatcgatgaagctctcacctataacggacatcctttcgccaccacacagcatttaccaagctttccagggtgccctgatggacatgctcacaatgcctcggggatttcctctgaagatgtggatgcagaatgaacaccatgaaaacacagctcccactccgggtacatcccaaagtcgcacgtcaggccctccgtgccgccgtcacagctgctctctccccagccaccactgcctttgctggggatgccttgcctgaagatgcaggggctaccctccctgggcctccactggccagtgcaggttgtgaccacccaccccccgggctccatcagggatggctgtgggtgcaggttgtggccacccatgccccgggctccatcagggatggctgtgggtgcaggttgtgaccacccacgccctgggctccgtcagggatggctgtgggtgcaggttgtgaccacccacaccccgggctccgtcagggatggctgtgggtgcaggttgtgaccacccaccccccgggctccatcagggatggctgtgggtgcaggttgtgaccacccacgccccgggctccgtcagggatggctgtgggtgcaggttgtgaccacccacgccccgggctccgtcagggatggctgtgggtgcaggttgtggccacccacgccctgggctccgtcagggatggctgtgggtgcaggttgtgaccacccatgccctgggctctgtcagggatggctgtgggtgcaggttgtgaccacccatgccacaggcttcatcagggacagctgtgtgctgctcttcatttcccaaacgcagtgggatcaggcctggctggatgtctgaactgcgactctgccccaactgctgccctcattgccgtaccccaagagcctccatccatcttgcaatggagctgccactcagcttgtccaccacagtccctcctgaagacacatctctgcgaagctccccccatcacccaggccaaagctagcctaccacgtcacacagtggccatctgcccgggcatgtttcacctcggctgtgcagaccctctgaagacgagacattctccatatgtttcttggctccaggcagctcatcgacagataaca

SEQ ID NO: 1882953 - DNA, 4001 bp, Homo sapiens
cagctatggagggcacaagcaaccagcagttttcacacataccatacagcgcataggtgatattatcaaaagatcaggtttgatgatcaggaaaggctatgtgtctgcttggtaacactgagcagacaatgttagagtccctagtccaagaaccaaagacttctgcactgagttttaacttccatttttggctaaaccaagtaacaggtctaattttcctttagtatataattatttctgtccatacctaggctcctgcataaacaaaattccatgactgaaatgaaactggatggtctttgacacttagtgatttatttctatttcttagataaccaattctaaatgtaccattaagtgaattaaaaaattatgcctaaattattaggaaataatactgtcacatgctgaatgggacattacctgtcactattattctaacacaactttgattaggcaatgtggtagtctgagatgagaagcttctacagtgaaacaaaagtaattaacctttttaaaaagccaatcaagaaacaaaagaactgaggattattagctctctcgaaatgctactattctgtaataatcagctatgcacaaacagtcacactgatcacctgagatcaaaaaacaaaggtcaaattacaagttcgtaagaaatcagtttcctaaattcctcccctaaaccccttctccctagcaaagatagtggcttgccaatatttaatgctctagccagcaggttgaaagtctctttagaaattcttatctcttagaaattcttaactgtcatttttgctaatagacaatgacaaaatattctgcagagcctgtacaactgcattgacgttatatttctatatcaacattaaataatcctcacatagtttggttgtaatttttaaaatatccattgtagctgtctacaactgctgtcctgcctagcccattgtgcagggccttctctgcaccaaagcaatttcattgtataagtttttaaaaagatatgatcctgctggactgtgatgctagccagcatatcaaaattgaagccactgtgggaaaaaaaaaaatccatcctcaaaaataaagcgatttcttactcattctgaatctacctataatgtctatgtttttgtgaaaatatggaagagtatataatgataactatttatctctttagatgaaaaaatgtaagcctttctttcctttctaataaacactatcatctcagatcctcccagtatctattttaaggtttaagcaccattacggagcctacaacaatagatcagtgacaggcctgatcccatcaattaacacattctagggtggctgtatggattctggttttcctacctccctcttacaggcctggttttgacacattgacatccctggccttaaggatgaataacccagttaaggggagttccttccctgagaccaattcctttgtaattagagccaaaatacaaaggttgttaatgacctaaggcaaagtgatatgaactctaagccaatgaaaccatgacagcaagcagatttctaaatagcagagaagtgggatccatttacttacatgaagattcagtgccaaacatggctggctccagaggctgctttttaaaaattagaagaaagaaaagggaaaaaaaaaagaaagaaaagcgaggagagtgtacatgtgagagtgaagagatgagccggctacacagcaggggtcatgaagccagacaatgcagtccaagctgtgtccagctgccagattctcctgttacgagcttcagttttctcccggtgtgattgaaatgcaaggtctcttaacagcaccaaaaaccgaagagctgcttttgaaaatccactaggcaaatgaaggccgacgtgcctcttctgggatgcggtgaggctggactaggtagcagcaggggcaggactgggagcagcagcaacagcggatactgcaatccccagccctgctgtagcagtaagacaatagcagggcttatgcatacgctggatgacgtcagggacactgcacagaccgactgcgctgcttgagccagaggctccaggggctccaggagagcagcgtgattgaaaggggaattcctttgtcacaaaatgcacaagaccgagagccacgtatacactcccctcctgcgcagctcttcatcccatgataccaggcagtaaaagaggactcaaagaaatttaaatattggctttatagcaattaaccacaaagacatcatgcatatcagtcttcttggttttgcgcagcatatagaaagaacttttcaagggaattaagaatatcagaaatgagaaacattatctgtctttagaagtaattacagaagagttcattgttatcttctcaaagcttatggtagattgacagatcaaggattgtacactcaatcacaagtatgtgaaaatatgtatactattacacatatattctaggcacataaatacatacaaatgtaacagtaaaatagtaatcttaagtacttagaacactgcttggcacacagtgagtactcaaatgcaggcaattccattactagctattttgcaactattgttcaaatgtgaaaaacgctgctctaggaatatatttacatacatgtatttctcctatttcttcatcgtgccttacatgaatttctgtcattttccagagcaactcagtcattttaaggctgtgtgcacacacctgtgtatacctctgtatgagtaagcatttgtgaccaacccatttctttttgatctacccacacaaagaaataattgaaaatattttatctcttgactcactggaacaaaaaatgtcttcctgtgttaccatattcttataaatctgtttttaaagaaaaagtactagaagcatatgaactttcattagctatccaacacaagccaaaaaaagagttttgttatgtttttaaaatactgaaatgcacaaaaagtaaatatatatacatatatacgtaacttttaaaatcatatatagtagaaagttcaatagttcaagtctcctctccacccattcatccaaggtatatgccttttctaattaatttcttgtgttcacaaagacatgtcttgatctcaatacagtttttaaatattaaattctgctatgaaagtggaaccacatattactttaacatctaaaaatatcattagtactttttctggtcagtatatgtaggatctacctcatccttttaaagactgcataagattccactgtatgaatgtaccacagtttattcagggtaacttgatctttagcttactaaaaatgctgagccattaagaagaacatttgatgatgctaaataagataaagaacaaatcatctgttgcgggaaagaataacaatagctaatatttactgagtgtttactatgtgccaggcactatcctgggtcctttacatgtataaacccatttaatcttcataataaccctacaaggtatataccacttttatccacatttgacagatggttaaatactttgtcgaggtcacacaggtggtgaatgatatactgggcttcaaactcaggagtctggatccaaagcaatgctcttaagcacactacgataatgcctctttcttgaacaatgaataaataatcagcaaaattatatttaaggatttaactgaaatgaagggaaaatagaaaccaactcaaaacatgaagaaaaaaaatcgttaaaagagaaaggtcatcagagaaagaaaaaaaatcacagaaaattgcaggaattaataaaaatgtataccttcaaaaacagtcacatcgacaaccaagggggaatatcaataatgatgttgaaatgtaactgtaggaagtgggaaaggataatacagttcaaaagggtggaaccttaaagccagaatattatcttacataagatctattttaaattgcatatgagatgttgtcacataaatagtcactcaaatagtggatggatgtggc

SEQ ID NO: 1882954 - DNA, 4001 bp, Homo sapiens
ctctctgtagtggtattacagtcttccacatagtcacccatttagctaatgatttgtgaactctgactgtatgagctacactatgctgggaacagggcagacaaaaataggtaagacacaaccactatcctcaatgacctaccacacaaacaaaaggaattatattaaaatgaaacatatgagcttatggaaacataaagaaaagcacctagctatctgaatatctgggacattcagagagttgatgaaatttgagccaggtcttaaaaaagaagtcatcactttccaggcagacagtattgggaatcagttcagggaaatacaaggtcaattaaaaaagaaaaatacatcacatccttatgcaccagcaaccagtaactagaaaccttaataaataaatagctactgttttaaaagacaacaacaaaaaaatgaaatacccagaaataaatctaacaaaatacatatgatacctctaaggactatatatattgctaagcattatcaaaggacacaaatgaagattttaataaatgaaaggaatattaggttcacagataagaacacaacattgcaaagataattctcttaaattcaatcaattagctattgaaggttcaagtgattctccagcctcagcctctgagctagctgggattacaggcatgcaccaccacacccatctaattttgtatttttagtagagatggagtttcaccatgttggccaggatggtgtcaatctcctgacctcacgtgatctgcccacctcagcctcccaaagtgctgggattacaggcgtgggccaccatgcctggccacaaagacaattttgaatagcaagatgagagaatctcttcacctcctatcaagatgtattataaagttacaggagttaaaacagcatggtttgggtgcaggtacaaataacaccattaaaacaaaataaagagctcagaaacagatccatgcatatgtgataagttgctgtgtgaccaaaatagcatcatgaatcagtagaaaaaggattcaataaacagcctgagccaacagactatatagaagaaagataaaattagatcctcagttaataccatatataaaaatggactttcgacgggttaaagaagaaaacataggagattctcttagaacactgggatggaaaaaaaattttcttgcatcaaaaatcacataacaggccgggcagagtagctcacggctgtaatcccagcactttgggaggccaaggcaggcagatcacttgaggtcaggaattccagaccagcctgacccaacatggtgaaaacccatctctactaaaaatgcaaaaattagccaggtgtggtggcacacacctgtaatcccaggtacttgggaggctgaggcaggagactcacttgaacctaggaggcaaaggttgtggtgagctgagatcacaccactgcactccagcctggaaaacagagtgagcctgtctcaaaaaaaaaaaaaaaaaatcacataacaaaaaatactgagaaattgagaaattgttttgcattacgatttttaatttctttataacaaagacactataaacaaaggaaaaagacaaatccccaattgggagaagatatctaacagacaagaagaattaatatctagaatatataaacaaccaaacagaaaacgaaacaaaacctccggaaaatgtgtcttacaaactcactcttttctggacatgactgttcttcctccctataccacgccccctgccccaaccagatagttttattgatgattatcatacccaacctggctcaatctagctcctaaccctagatttctgaattatgaaaaaaaaaaagattattttcttctgtaaaggtggaaagatgtagacatagcctatgccccctgttttccctcaatacccaacctcctccctcacacatgaagagaccagtcttcagcagaacaatgaagagggcatgcagagaaaacacacaggtgacattccacatacatgcctattcctttggcagactggttacatgagtcaaacaattatttttacttaagctagctagagttgaatttctgtaacttacaaccaagaatttaaagaagttatttaatgagtcttgaggaaaatatgtcagaaaaaaagggacagtattcattattgattagcccttaagtaaataaattagcccttaagaacaaagaccgtaacacaaaaatctgaaatcctaatatgaacataattaacacagaaataaattctaacaacctattttaatctgtggcacttacttaaaagcaagcccactccaaaaaatcatgattcaaatagatgtatatttgctacacaaatgtatacttgcttatctattctgattgctgaatcttgagaatataggacaagtatgcattcataatgcataaatcaacactaaaggtgaaaagtaatttttttctatcagacaccctatagtcattattattaaagaagctgccactttgaataagatgctgaaaataaccaattcttttgtcattcccaagagtcaatctttttttgttgtttattggggttctttttgagacagagtcttgctctatcgcccaggctggagtacagtgacctgatcatgactcactgcagccttaaactcccagccaagggccaaccattattaatctccttccactgtggaaattgaccattcagtcttatcacataaccaggttttaatatctgatagaatatcatggcacttctcactccttggttaccaaatttcctttaaaaagcttcttatgaaggacttttagcaaaattcttcttggaagtctgaatgaattagaaccacttagagcatttaatctgtgtccctaccaattcccctcagtgttttttccagtgttaaagccaatctaatttggtgaaacaaaggtaaaggactttcacctactgtggggaaggaaaaaacaacaattcaaatacagcccatctgctgctcagagctcctatagagagcttccttaaccaactctgaatgagatggaagtgggactgggtgggtaaaagggaagggagaaagagcagccctctctaagagccacaggccttgggaaagaggattattagggagcaaactctgtatttctactttttattcatcttcttgacgctcagccacatgaaccaccaattgcatccttctgggaactttcagcaattcaaaaaggagcacacacaatggactaagatggaggctaaaggctagattgtggagtactcttggtcaataaagttgcttccagtattagtctcccaaaattttatttcttatcaatttcaaggaaaagaacaaagccctaatgtaaaaattccttcaaaaaatgtgtggaacactagtctataaatcttcagaagttctgtctcatgtagatttcattgtttaaaatgggattcattaactatcttcctctgaagctaaaaaacacctctcattaccattctaacctgatttaagtactggtttcttactattatatttcttgccattgttacaaagacagataatacataaataataattacctaccatttcaaacactggaattagagaaatacccaggcttcaccttcaagggctcatgaatcccaagagggcagtttgtaatgtgctacatgcattacaggattcagagagaataaaagagagtgcttttacatcttaacaaaaatgacccttagcacaggctgttctcttaccaacatgtcagtggcactgagatagtgcttgctggccatgcactgttccagcttttgaggcacttgcttgatattctcaatttcatccaacaagttcaggacatgcttatgctcaattccttcaatccacagtttccgaagctcatcccgtttgcagtgcagcagcatcttgcatgaaagcaggttctcttttacctacaataaaacagattcggtcttgggtcagtccaaagtct

SEQ ID NO: 1882955 - DNA, 4001 bp, Homo sapiens
cctcacctgtgtgtacctctgtttcttcaaccactactattattatcaccagctggggcttctgctttaactggctgtttctgaaggtcaaatacctctctctaatctgccttcctctttaaaccgtcagagaggtgcatgcttctactgaggaatgcatccaacctgtggttaccaatctttccatacatgagatgctccttccaatgcacaaaaccttcccaagactttaccacagtggttgcgtttttatttatcctgactacacatatctggatgtagagctggcagagctgtgcagttccccacctctaggcagagccacaggctcggaggctcagaactcctagaggacttctgaggccatggggaccttactcataaagctctgaagcaaggctggacacggtggctcacgcctgtaatcccagcactttgggaggccaaggcaggtggatcacttgatgtcaggagttgggactagcctggccaatacgatgaaatcccatctctactaaaaatacaaaaaaaattagccaggcatggtggcatgcacttgtaatcccagctacttgggaggctgaggcaggagagtctcttgaacccaggaggcagaagttgctttgagccaagattgtgccacggcactctagcctgggcgacagagcgagactccatctctaaaaataaaaataaagctctcaagcaagagcagtgtgtgccaggaggctcttccgcaattctccttcagcaggcacagaggactgcaggcaaggcaagatcagagggaactgtggggctgagagcacagagggcaaagaaaaggaaagggccgtcacacacactcacagttccgagtcccccaggcggtccatgttggagacataaggaggcaatttgtgttggaccaaggcctcttcctcttctggctgttgctcctctttcttcagtcggtggatttcagcttgcaatgcaaaaagctatacaggggtgggactgagttagccaatgatctcacctaaccttccctctgcggaggaagatttctagacacatcgcatccaagcccactggtctgagtgccactcgcctcagcgtcaaggggcccatctcactctgctcactgcagactgggaaaagtgactgctgtcactggacaacaatgaggtgagaaaaccaaaaaccattagaaatccaaaacccattttctttttaatcatttgacttgcttcctcctagattcactgagaaaaatagctccacccaacctgttttgctttttagaatctacaaaatcaggctttagaactctcaaagcctgactctggaatggaaaaaaaaaaaaaacctgttaatgaactacagcgtttttaaccttttgcctgaagaaaattacatatacacacaccccaaatcccaagaatcttaaaccccataacctaaacagcctataatcttccttttcctaacaatatcacctaaggagatcttaatttcaggaaagagaaatgttcctcaggcaacatgtacaggcaaatgtgggtcccctggctctattgttttatcaaactagagaagcatatagctgagtaggaacaactaaattatatatgggttataaactatatatatgtgtgtgtgtgtatatatagtttatatatatacatatagtttacatatatatgtgtatatatatatacacacatatatagctatacgtggaaagacaaaacagacacatgaaaacaggttagttataaggtggcatggatgcatatagtctttttctccttaaaagttaattactgttactatattgttcatgctacatatctgacttaaaatatgaatctcgcctctggttttcagagactgttactctccaaatccccaatactgactttctggtgactcatttccatctgagaaattaggtagtggcagtggaaacctgattaatatagtgttccactgccactacctaatttcacacacaaaaagcagaagtacttcctcaggagcaagcctgttcagaacaaaccttctgacgcagaacttcattttcttcttgaacctggttagtcctctgacactccgcatcaaagttcaggatcacagggactggtgcacgaagttaaagaataagccagcccctgaaatgtttaaacgtccttcccaaacccttgacacaccagtaaaacacatgagacacagggacacagagaacagagtataggagcggtgctgtgggctcttgcgggcttaatgaaatagtcgctccctacagtcttgtctctaagactttctctaggtctggcctcatttcattcggacagattcacagacgcatgaccatctgcctggccagcccacagaggggacataaatccaaacctaagcattttctctcaaataccagaagcaaagagctagcatccagtggacttcacagccagtctgagctttagtgaggtcactacattcagctaaaagcagccctggaggccagtggctctgcagtaatacagccaatgaggcagaaaagaccagtcagttggcttcgcctccccaggttgagcctctccctggcaaaggtttggactgagaagagaaagctttctgcagattgcgtggccaccccaagaacaacgacagtctatagcttgggatactggtccttctccactgcctcaggcagcttcagttaggaggagcacagagcagacagggcctcagaactggagaggggactagagcccatatgtgtgtaagctagtttgagaagcactgaaaagatcttgagtgacagtttcgatttcactggagggcccacaaagttaactggagagccctcaggatgaagagagggaacaacggggaagaaacaaggcagttctggcaagggtggaattcacactcatctggggcacagaaagggtgaaggcaggaaaggtgcccttcccacctccaccagaaagtgttcctcccagaggccaaaacgcctgcccatgggtgggcctctaaacacccaagtttatcagtgcctcaccagccagccccattcaagccagactcccttctcctcctctaaatttccagcctagggagcatgaacaatggccttgggagctctggcttgtacacttggtaggctgtaaattatttacctgcattctcattcattccccctctccaatacccgcatatatattcttaaagctactgtgttctctggcaacttgaggaacactgaagttactattagagacaataacccaaacactaacacagacagaagttccaacccaagaagtcttctcatctgtacctaatcccagcaaaggtatatccccgggaacacgtttcatgcacagagagggtactctcaaggctgcccggtttctccaagcagcagctgccttccaaccccagtgcctgctgacaaagccagtactagcaccccactgctgccactgtcactgcccacacgtcagctaatacttcagcagcacagtgtcagaactaagatttatgattccctggcttactgacaaaaacaaccacaatttgtccagccccctcatgtgacccataaaaatggtccctgggcatttttgtagaagaaatgcctgtatggagaccagcgggctactgatcctgaggtctgggtgcctcaggctgggccttcagccccaggcaactgaaaggatatgcatgcactgaaacaggacgctcaggaagttgtgcagggacacaatgaaggtgtcagcccactgtcgagaaaagtaggtagcaaaggtggggttggtgtccggggatggcaggaagggcaggacaaaccaatccttccactcagcctggttctggagttccgtggcctgctttgcaaagaactcctgagccttgtcatttctgtttgtctgccaagacacaaggaggtagcaaggagggaggagagacagaaatccagaggtaagactcttcatcattgcacagcagac

SEQ ID NO: 1882956 - DNA, 4001 bp, Homo sapiens
cccacaaaagtctggaggttggaaatgacatgcatgagccactgtgagaaaaccatcttgcctgaaggggagcatatttgagggtaagaaggtcaggactttgctttcaagactgcattatctgaatcttcagataacaaaaaaagagttaaaacttgttttgtcactttgagcaggttagcaacctctcactagatctgtttcctcaacctaggaaacgtaaaataagaagagcggtaagaataatatttatcatctgtcatgttgtgaggatgaacaagacaataaacaccaagtgtcagggacatgaaaggttcaaaacattttagctaatattgttaaaacatggtatataacataatatatatgataaagatgttttgtagatttttgatcagtgaaggttgtgaaaggagaatttttagtaaaattcatgcagcaggcatcagatgtccacaggttaaagttgcggggtggggtgggggcagccaggaagttgaaggcctggctggactagatcagtccatgttggaacaagaaagtaccactcttagcaccttctcaataataaaaacatgaaggcatatttgaatacaaggaatgggaaacagtaatagtcaaatagcccagataattagcctagatatttggggaaaaaaatagttcccaagaaagggaagatgctgggaaaggaaaaccttattagggggaacttctcccccttggtaagtaagtcctattttgggttagatttggagatggtagcaagccatcctagtggaaatatcttgcaaagagaagagggtgaatacttatcattattataacattactgtgataacttcaaatggacaccaattgtgaataaggttgacactactctttaaacattttgttgatttctaattttaatgtctcttgaatttatgtcagaagagaaagtaatgaacccataaaaatgattataactgtgcaaatcctttaccagtgtagctgaacacaattcttttgatatatgacactttccccactggtcttcagatcagtcagcaaatattgatcaaacttgatgagcccaacattgtgccagatgctgaggatacagtgctgaataaaataagtgtagactgtgctctcatagagcttacagtctggcaagatggaccaacactataaaatatatttctgatacttgaaattatgaacaataaagaatcatcagtcataaaattcttagatattcctaatggaattggaacacgatttgcaaaatttttaaaaaagagtaatttgaagggattccatgttgaggtttctttttttagtttattactcaacttttgtatgaatatgtgtgttttaaaaattcaattacatattaggcaaccatcaaaacaagaatggatcatgatgccttcacaatagagatattaattattggttcaacttatacatttattttagattcttcttttgtggctctaaaatcttcagttaatatgagaatgatcatttgatgtattattaatttctggaccattttctcaccatcttcaaatcgaattagaagatggaacatgatgtcatatataaatcttatctgtcacttgtattagatatgctaaacactgggaagtattttgtttaaatctggctttcttcccaaaagtaacattctgaattctctttttatatggctgacaaccaaccaagagattttcttgctctagttggaaattcatggaaaccataggcaaatagtatgtccgaggataacaagtagaaaaccctatgcttgtattttcaattatatttttatttgctttaatgcagttttaacatcagtaacagtggaaatacgacaatctgtatacgagtagttataattcatgctgatgaaagtagcttccatcttatcattcttgcaatattgaaacaaactccagtgaacttgtttgaagctggttcagtagagattgtttcaacactgaaggaatgaaaaattagaacctctgttgtcagatgagcagtaataatctgcatcagttcctggtctggttcatatttgagcactgaagatggaattttcccaacagtagatgaatgtctcagtggccttcttcctaaaataacatacccattggggcattacgtttatacatacagtcatcccttggtatactcaggggattggttgcaggacctcctgtggataccaaaatctgaggatgcttaggtacttcatataaaatggtgtagtatttgcatatgtggataccaaaatctgaggatgcttaggtccttcatataaaatggtgtagtatttgcatataacctatgtacatcctcctgtattatttaaatcatccccagattatttatacctagtacaatgtaaatatgatgtaaatagttgttatactgtattatttaggaaataataaaaagaaaaatagtctgtatgtttacaatacaattttttcctgaatattttctatccaagattggttcaatctatggatgtacaacccatggatacagagggctgactgtatagatagatagatagatagatagatagatagatagatagatagatagacagacagatagatagatataaacatataaatatatgtatatgtatgattttatgtatattatatatatataattacaatcatggaattactactgcttaaaaataacacatatacaaatttcataaagtttattaaatgttaaacttttgctgataattttatacaaataagaattgctgggaaggtggtatcattttcagcaatacagagacaaaataaaaccagtagtgattggatgaaactaccaaacaatgtaagagacttcaaatatcctacttattataagtgttatgtctatactacttatttcagggggttaaataaaaatatgattatatgttcacattcagatagaaatgagatattaagggcatattgtttttctgaataaacatcagttttcaaagctttgcatataaaccatcttacatgatttttcaacatacaaacaaacaaaactcttaattgttgtcccatgtagcagtttagctgccgtatatgtgatgtcactcctaaaggttcaagtaaatggcgtcacacatacgaccaccaagctgccaccaacagcagtagtcagcagcccaaacatcatcagtttttttcagtcgacaaatactttgagtgcctctcacatgtcaggcactcttctaggttctggaaattcagcagtgaaccaaactggcaagccacctgctctcatagagcttacattcttgattttatccacactaatcatggaatccacaggaaaggaatctgatttgaaatggtcatatgcttatgcaattcctactgtgatgtaggacagtcagtttgcttttgggttacaggcagtttctagaagtacagagacagttacagagctgttcttcatggaactttgagaaatggtccatctctgcaatagttcaagcccactgagtgtatggacccaagctgctgtgctgaagggagagcttcctattgattgccacatgcaaaactactctaaaaagtatgtaaacctagaatccacaaactgatgcaaccaatgagattttcatgtcaccatccttaatgttgataatgtatataattatttttgcttttcagttacttacacatttcaaaataagaaaggacaaagcacactgttgtaaaaagtgttagccctggttttcccaggtaagatcagatgcctggctggtgtactgtgtaattctacttacattatataaacaacgaaactgcatatatcataaattcaaagcaaataggtgaacatagataagtaaacaagtaacaataacacctgctctgaagaacctaatttttatgtctttgttattaccattggctttgttgtcatcagcatcgtcactggcatctttttctgagagctcactgtataccaactgc

SEQ ID NO: 1882957 - DNA, 4001 bp, Homo sapiens
aggtggccccagcttgcttctcagaccagggaatgatctcgttcctgccttccctgcccctccctctcctcccactcccatctcttctccctccctgttggatctgccccagccccggggccctggggccgtatgggggcatcgtggacacgaagggctggacttccctggcagcgtggacccttcagaccagaagaagacggcgtgctatgacattgacgtggaggtggaggagccattaaaggggcagatgagcagcttcctcctatccacggccaaccagcaggagatcagtgctctggacagtaaggtggggcccaagcccagagctggagtgggacattaacccagagatgatagaggagacttttctgagaccagggtgtggttgcagatgagcagtctgggttaaattaaaaaaaaaaaaaaaaaagagaccagactctgggccaatgggacacacatggcccgtccatgctgcttggagctgaacctcattccaagtttagttctgcccatcccctcctcccctgggacttcagagaaatcaggggctctgaggggttgtccttcacagaagaaaccccctctccctccccttcccacccgcttcctttcccctcgtctcccacatcaccaaagccaggtggaaagcatctatctttctacctgcagatccatgagacgattgagtccataaaccagctcaagatccagagggacttcatgctaagcttctccagagaccccaaaggctatgtccaagacctgctccgctcccagagccgggacctcaaggtgaagagggagactcagggagtactggagtggaagacaagcacagcgggaaagagagtaaacgttgtactccaggggcaggtgaggggattcagggctcagggctcaccccacgctccctcccaggtgatgacagatgtagccggcaaccctgaagaggagcgccgggctgagttctaccaccagccctggtcccaggaggccgtcagtcgctacttctactgcaaggtatgcagggacccttgccctgaggcttccccatcctcaactccaagagaaacctccctgttcagcttgtgggcagccctcgcagctccccacagtaaagcttcaccacgctgcctcaccatgcaatggccctccctgctcccagatgctctttcagggcaggcggtgtcagtaggtgggattgtcctgatcactcaccagaacactgacacctgctcctgttctcacttcctctaaagatccagcagcgcaggcaggagctggagcagtcgctggttgtgcgcaacacctaggagcccaaaaataagcagcacgacggaactttcagccgtgtcccgggccccagcattttgccccgggctccagcatcactcctctgccaccttggggtgtggggctggattaaaagtcattcatctgacagcagccgtgtggtcattggaaactggggaggggagggggagagaaggggaagggaagaaggtggggaggcagtgggtccctcgggacgactccccattcccttcccttggattcttctccttactcaattttccctagacctaaaaacagtttggcagaagacatgtttaataacattttcatatttaaaaaatacagcaacaattctctatctgtccaccatcttgccttgcccttcctggggctgaggcagacaaaggaaaggtaatgaggttagggcccccaggcgggctaagtgctattggcctgctcctgctcaaagagagccatagccagctgggcacggccccctagcccctccaggttgctgaggcggcagcggtggtagagttcttcactgagccgtgggctgcagtctcgcagggagaacttctgcaccagccctggctctacggcccgaaagaggtggagccctgagaaccggaggaaaacatccatcacctccagcccctccagggcttcctcctcttcctggcctgccagttcacctgccagccgggctcgggccgccaggtagtcagcgttgtagaagcagccctccgcagaagcctgccggtcaaatctcccccctataggagccccccgggaggggtcagcaccaggaggggagggggggtcagggccagcccccgggggccctgggggtgatctctgtggtgacagggcaggattgaactcctggaaatggactggaaagaaggcctgccagccagagatggcattcatgcgacagcggttgaggacttcgggcccaggccttgtccacacggtggtaaggaagaagagagtgtccacagggtgcttcttcgagaccacgtccatgagtcgcacctgggaaggggcctctgctcgcacagcgagccaggccagcctcgtcccagggtaccgtcgctctaactccgctgctgcagccttcaccccaagaaatgggtctggagctccacggccaccttctcgtggcccgtagaccagcaacagggtgagcaatgcatgttctcgtggctccaggacattggctgcaaaggcctcgaggaaagccggggctgcagcagcttcagccaccaggagtggcagcaccagctgcactcgggtggcctcagtgacatagggcataggtaggatttccacccggctcagtggccgcagcaggctgaccctgcgagccagggcccgccggtgcccacgctgtgtcacacattccaacagcaggtccagggtgtactccatgccccgtgctgggtcgaagcgccgatagccgttgagcagtcgctgcttctggaagcgcaggcggggctgatagcgccgattgagctgctccagggcagtctccaacgcatcacccacgtccgccctgctagccccctgtagtgggcacttgggagccccatctgcacaggagaaggtgtgctgctctgtgaagtagtcccagcccagcacctcaaagcgagagtgtggtgtgaaaggagcagggagcccaacgggccagctcagccctgcctccccttcgggggtcagcacggtcaggttccggatctgagcctgggttggagggaatgcacctcacattagtgccagctccaggatcctacccagctccagctgcctgggctctgagattcaaacagctgagctctgtcctaactccatcaacacttagtgaggggtcccttgctaatcactgaatcccttgtacgttattcttcacctctaaaatgcagatggaataggaatcatactcaccttacacaaatgccatgagaaggaggtggaaaatgtgctttttgcacaggtaaaagtatcttgaaatagaagctcaacagcctttctctcctacacccaaaggactcacatcctcttcataatcacacctttgttttcatctacactccacctctgccaagcctgacgttcaacttgagaattctcccttctacccttgggctttcttgggacagttctagaagtaaagaaacttcagagtttttgcctcctcagtggacaggcactattgaggaggagctaaaactattctgtctgaacactgtgcggagcttcctgatcctcagagtctacttgcaaacccctttagctgcattcaagttgtgctgggagcttaccttatgattgctttggacccccaaagacctttgtccctgtagttgctttaaatttaagtatggtcggcctcttcctgccctgccattatacagggcctagcccagccccactgccagctgctcgttcattgcacgcctggacatctcaggctctctctgaccctctgactgcggtcctctgcccacctgctcctcttcagctcacctgcagttgttctatttcactgtaagcccgctccaactccagagcgctgaagcgtttgtggagccggtacatgagggtaccttcggagacagggtgcacggcgaaggcactcaggaaagccgagctcccttccttctcagggtccctatttttggccagttcaaatgagc

SEQ ID NO: 1882958 - DNA, 4001 bp, Homo sapiens
aaatcagaaatatgagtcggatgtggtggcacctgcctgtggtcccagctactcgggaggttgaggctgcagtgagctgtgattgcaccactgcactccagcttgggtgacagagcaagactccacctcaaaaccaaaaagcaaaccaaaaacacaaagaccacatccaccaaatcaataatacccaaaccggaatgcaaacggcggccccactcgccaagcacttttggaaccagggcaaggaacggatgctgtggatgtgaggaggggagcgcggcagtgaggcaggggtcaggccaagacctgccgtgcaggggctcaggtggccagagaagggcagggcgcaccctgggggcctgcaggggaggctgagtcactggaccacagcgcacacagcatcacagggctggaaattcctcaccaccacaataaaaaacctggtaggactggggttatggcatcatgctccgggcgcctgttggtcccattccttcactgaggacacacccggccactcacatgtccaagtccaacctggtccctgagaccctggccatctcacagtgatgctcctaacacggcggctgtctaccgcctctccagccccaccacggccgcctccagcctgccattcccaaagtgctggacggcacccacggcaccaagcacctcccggggacagtgtggaatctcgtgaccaccccagacactcggtgccattccacacacaccacagaccatggcttgaaagctacttgcagctacttaataaacttaatttcagccgggcacaaggtgctcgcctgtaatcccagcggtgctgcagtgagctggccaccagaaatcaacggaggcctgtcccaggaccttgggagcgtttcttctcccaggctgaaggaaccgccatctgctctggaggaagccggccagggctctctggaagaacagccacctgcggcgctccgaagcgctagaaaccttctctcagccgcagggtgcgggagctctgcgggctttacctccgacttctcaaatccctccaggaggcaaactctccctgtctgctcctccctccgccccccaggaatcacagggacaccctcacgattctgattttggctacacaggagactagaagatccgggcgagcaccgtgttccaaggcccatgcggagcccaactccactaaagaacctctctagggcggccggccaccgcgctgccgggcttgaaggaagggcggagggacaaagaaaggccgtggccgagacggcggccggagcagggcggactcacctccttgtgcccttggatctgagagttgacgaaggcgcggaggatgtgggaggtgaggggcaggtagacgtggatgagctgcgtctcctggtgcaggcagtacagggagaagtagttccgcagctccatcgtctgaatcgcgttctcctgctgcggagcaaacagccgcctttcgcacccggcccagccggcgacgggagcaccaaggcccgaacaccagcgtgctccctgagccagggcggccccttctccttcagccttcaccaggcatttggaaggtggcgaggtaagagagggccggggagggagcaccgtgcagggagccgcatcgctctgggcacgcgggccagctccctgcctccactgcacccccagctctgttccagacacaaggagccaacccaggggagcccaccaggacggctccgggtcccaccatggccgggaggggaaaggctcccacgggcctgctcggccgccccgccacccacctccacaatgcgggactccagctgctccacggactccggctcgcggttctgcgcggtggcgctcatcatctgcctcttcatcaggctgtacttgtgcagggcccgctggtgcttgtgcaacacgcccttctcatgccgctcgcacaggtcctgcggggccgggggaggcattcgcccgctgtctggatgcctgcgccagggccctgcggagccggccgagggaagcacccccgccagacggaaggccccgtcttcccctgcagccctggcttctcagctcctcttccgtcccccaggagttagacccttgaaggatcctaagatcattcctgaaagttctgcccccagccaaggagcagccaagactcaccttataggactgcagcagatccaagaagaggttcagcttctccaccacgtcgttctcttcctgcttaccctggaaggcgagggggagctcacccacgcggacgcacataggacccggtccctgcccgggaactcagacccaagcctggcctgggccggttccttcctcccagagtcagacgggctccccaggaccaccagccaggtctgcagggggcccccttccccaccagcccacccattaccaggcggacacgccttcgagcccagcagtctttttttttttttttttttgagtcggagtcttcgctctgtcgcccaggctggaatgcagtggcacgatctcggctcactgcaagctccgcctcccgggttcacgccattctcctgcctcagcctcccgagtagctgggactacaggcgccctccaccatgcccggctaattttttgtatttctttttttagtagagacggggtttcaccgtgttagcgaggatggtcttgatctccagacctcgtgatccgcccgcctcggcctcccaaagtgctggattacaggcgtgagccaccgcgctgggcctggcccagcagtcttgatgggaacaaggcctgcgttcccgcgggacagctgcccgccctcctgctcatcagcccggcctgccttgcctttctcaggccttcgcaaagccggcgactctcccaacacatatgctgggagagccagatgccccagaccccccgacccctaaggctccatcaagcactgcagaaaacccgagttcccatataacgctgtgagccgtgtgcaaaacgggcacgcccaggaggggcacggaggagaacaagggtgttgtctccgcatcagtaacaggagagagaaacgcaggcctaggaagggggcacagggaagggggcgcagggtaggtaggagagacagcagctgcaggaaggacgtgctgctgatccaggaagagaggcggccgccccaggctgcacgcagaagcaccacactcggcggtgggggcagcggtggacacaggctcctcttcggccctcacacaaggctctgtgcgggcagcacagccacagagagagcccaacagggcagtgagtgcacagcaaacggcgggcagccctggagtggaacaggggccccatcacggcagagggatgccctgctcccagagtcaccacagcacctggggacacgaagcagcccccacgggcgaaccccacccagacgctgcctcggcctccccggcttacaccagtagcagccctcggtgggggcgcaggccaggcacagtgcacacggcccgaacacacggtgctcagaggcatctgcggtatgaagagtcggtccaaagccctgggctccagctgccactgaggggagcatccaagctctggagacagcaggggtctggggaaggcagcggaagcggcagcccatccacccctgacctgcacagctcaccacagaccccccagccacaaccgcaaccaagccaggccgatggcaggtatcctggggaaacccccgacactgacgccttcagtcacacccgggccctgaagggctccggtccccacagctcacgccctcagtccccacagctcactgagcacctcggggagaccaagctccctccacgattcctcgggctccacccgtggtagggggtgaaaagctcaccccacgcactgcacgtcaagctcagcaggagacggggcaggcagaagtggatggaacgagttttacgggacacagccctggaatgggagccaggggtgccgcccaggccctgctgcaccccaggggaccctaagataccccttccacc

SEQ ID NO: 1882959 - DNA, 4001 bp, Homo sapiens
aggcggagcttgcagtgagccaagatcacgccactgcactccagcctgggcaacggagcgagactcagtctcaaaaaaaaaaaaaaaaaattcagattctggagaatttcggattttggatgctgaactgaaaacattcccaaatctgaaaaaatccaaaacatttctggtcctaagcatttcagataaaggatactcaaacctgtatatcgataagctgggaattctcttatcagctcctagatggaaactgaggtatagctgaagaaatgttggcagaacgagaaatcaaaattctgagtctcctttgccagagaaatgcaaaaagttacctgacaagtgaccaacaaatgcttttgttacaaatagtttttaaaatttaaaaaggttctattataggactgacataactccatgtagagggggctggaaaggaatgcatcaaaagggcacatgcgtgctaagatggtgggcactctccccttcctccaaatcctgacggtattactaaactgtttagagggatcataaaacaaaacagaaccagggcccacccttctcacggcaccagctccagcatagtcctttatcctgccccactgaggcaggcctgtaggtggccctggcaacatcctgacctcccatgcactcactgaccgagagtgaagcagcctctggtcatgccctcaaaggcaggcagagagcattagctatgagcacactcccaactccagttctgattcccacttgctcgcacccaggaacctgcgagacctcaagcctgtgaggcctgttcccagtgaagcgggcctcacctggccttaccttcaggaagctggccatggtgctgacgtggctggcacaggctcccttccgcacatcgttcacgccctcgcctgtctgcaacacaaggatgcccaggttgacccaggcctcccccaaagccacttcccttccctggggacccaacatctaccctgtgtcccagaaaagagaaaactgcaacccccaaagcagaacctattcttctgactgcatcacatgggtgaggtaagttcccatgcctccaaggggctcatggattctccctgggcaggatggctaccggctttcgctgtgggggcatttcatgaattttctttttttttttttttttggagatggagtcttgctctgtggcccaggctggagtacagtggcgcaatcttggctcactgcaacttctgcctcctgggttcaagcaattctcttgcctcagcctcctgagtagctgggactacaggtgcacgctgccatgcccagctaattttttgtattttagtagagatggggtttcaccatgttgcccaggctggtctcaaactcctgagctcaggcagtccacccacctcggcctcccaaagttctaggatgacaggtgtgagccaccccacccagccttcaagagttttcttgatccccaccaagggatcaaggaggccctgtccctgtactcccaggctcctaaacactccctcaggctctctactccatcagaacaaccaccctcaagagcacggagcaaggactccctgtgactgcttttaatccattttgcaggaagaactctaggcttggaaggtgaattctgcatagcaaagccacagttattctttgggccacaatgaatctgtcaactattctgctcattcaccagctcagagctgttctattgatctactaagtcatgccagtaaaacactttgttcctgaagtcaagtcaaaacaggaaagaagacaatggggtttcctgggtcacacctagatgaaacaggctccacatacccagttgatgaggacaaatttgggcagtccagagttggggtccttcactctgcagaaggcgtacatcaccttcccgctgttgagctcctccaccatctcctccaggccaccctctgcagcagagtcacagtgaaggtcaggggtggccctgacattccctgctggccctggtcccaccatgaagggaggccgagctgcttctaaaccagggcttctcacctctacctgtatcagaatctttctaggggtatgtttaaaatcagagtcctgggcaccaccctcactaaactgattgatgagagctgggtgggacctagaagtctgcgattctgacaagtacctcaggtaattttttttacccacactcgtttaaaaaccacttctctaaacccagaggtaattctggaaataaaaacagggtcatttccacggcaaaccagccaccagacttccaaatggaggatggctacgtcaaaattttattgttgccacaacgttgcaaaagggcccggaatagcagggcctgtagagtcaccactgcctgcacctgtgtctgctcaagttccagggccacccagacggccagaccagattgaacatcctgcagtggcgtaactggctcagtcctcagactccagaagagagggtgatggggacagggggagcacaggagtgggcagctctaaacaattctccctgacactgaggcttagccctcacaaacttttccaggttataaggaggaagagctgatcaggtatttcatctacagggctccgtatgagtggaggcagtcatgagccccactctggggacagcaaattgttgcatttgtggcagagccctgtcctgtgccactggggatgacaggaaactctcaagttgttgatctctgcaactcccagtcacctgccacaccacatgtctactgttcaatggcaatccttctagaaaggggacacctcccagaaagattgtgaaaggaaggggctttctaccaacaacagacatcaaaccgtggagaaccactccgagtgttcattgaacaatgaagccatgtccagctcaggacagagggaggggtcaggcaacttctggaggaggagcagtcacgggtgtcagctgaggggcccacaggtcacactctgacgaagcctaccctgacaacctctgctctgtgctggccaagagcctgtccttcctgtagagacctccagagcctcccccgtgactatctgcagtgatactgcctctcccagtgaggatggggcccctgcaagcactcggcacaagaccagggcaggacaaagggagaagaagatatgtctgtggactttctttccaccagcaccagttctgggactggtgagcttcccaccgcagctcccaacgcaggctgcccacaagctggagaggcctgtttccctctcagctctccccaagtagacaaagagaaagcactcccctgcacccagagggaaggagaaccaaggaggaatgttttcacttacacatatctgaaacctaaggcctgccagaagtggccagtgagcactggaagccccatgtggctcagtggaccaagacagctgagtgcgctgacccctcgtcgtcaccctcctacctcctggtgtccctgagtccatttggagtcatactcaccccctgtgccagccacgcggatgtcattgctgttgccttcataggtaaagagagccctgaaacgaaacacaagtgagctctgtagccagcaccttgggttccatctctcctcaccgtatccaccatgactttccactacatcccaaagagcttgggctgacagtaacactgtgggtgggcacaggcccgttctcactttgctctgacccactaggcaggttctcagtaggcaactgtgcagccttctcagctctgcagctgggaggacactggcctgacttaccatggggtgggggttgtgagggacaaagccatggagatgggagcacacatctactatgaggaaaacatgagctgtggagtttcccaatgactgctatacattcatgtgtcaaatactcacctggccactaggtatatggatttgaagagacaaaacatatctacatattcctgaacccagagcacccaaaaggagaagcaagtcggagaaatacacacactgggccccttgg

SEQ ID NO: 1882960 - DNA, 4001 bp, Homo sapiens
acgctggtggactgcaaaatgacagacgcactcgggacaacaacttggctcttatgaaataaacatatacttaccaaatgacccagtaatcctgtgcctatttacccaagagaaatgaagacccatgtgttacacgaaaacctgtacatgcatgtctgtagcagtacgattcatcatctccaaaccctggaaacaacccagactttttttctttttaggcagactcttgctctgtcgcccaggctggagtgcagtggcacaatctcagctcactgcaaccttggcatcccaggttcaagcaattcttatgcctcagcctcccgtgtagctgggaatacaggtatgagccaacatgcccagcaaatttttgtattttttgtagagatggggtttcgccatggtggccaggctggtctcaaactcctggcctcaagtgatccacccgtctcagcctcccaaagtgctaggattacaggcatgagccacggcatccggccacaacccagacattcaacacctgaatggataaactgtagaacacccatggcatggaacaaattacaaactcaacatacccagcaacctgcaggaacgtcaaaggcattaggctgtggggagaggccagtccaaaggttaaatatagtttggttctatttacatgacattctagagaaagcaaaactatagggatgtagcaccgctaagtgggtgggggtggagaagcacatgaccacaataggacagcatgggaagtgttctggggatggacctggtgtgccctacgtgtgcaaaaactgcaccccaagagtcaactttactgcatgttttcaaaatattttttaatgtgatgagtggtctgggaaatcctcgcctaacaaagtggcttttgattcaaggcctgaagaaggggagggcccactccaggtagatgacatggccagggcaaaacctgaggccagagtgtgcctggggatatgagggacgtggagggcacccatgtccagcccacctcagtgcttctgcctcagtgagaaggggagggagttggccacaagggggcctgggtgcatcaaataggaagccggtgagtcaagcagctcggggccagtggggctggagagatgccagagccaggggctatgtgtggacttagggtttggaaccattaaagggctctgcgacgggagtggcaggatatgacctatttttgagacattgtgctgagaacaggccttaaaggcagaagcacagagcctggctcggggcgctgcagtactgaagccccatagttgaaaattatcttcctcccagctcctacccaggccctctccctctccagatgcctacagcacaccagacagtaggctccttgctggcacgaaccacagcctccagctcatggctctcaaatgcagtgcaggtatgcatggttctcttctgggcattctgggcagggtgccctgcaggagccacagttaactgcagtgcaactaatgagacactgcacatcagggaccacttgccattcatgactgcaggccccaccacagctccacgatgtgggccccactcacatcccatccagggcaggaacgtgagccatggggaggctaagagcagacccagggtcacacagtgatgaggctggcactgagggctcccacctcatcacaccctgcagcacaccagcaggggctcaactgatcctgcaggcacaattgacctccggaagagccaggccttggcggggaggggtgaaggtgggggtcagggggcagcatatctgcctggagacattcagtggccaggttgggggcagcccaatttcctgagtggaagtgggggacacaggcaggctcaggcgtttctctgctctggaggaaggtactcaaggcccaggtgtctgaagatgtcttcctctgaagccgcttggaaaaatgtcttctgcaacagaagcaggacttccgtgacctaggagtcttgccactgctgcttccctgcaggaagactgagggtggggaagagcccagcgccgaggtggggtgtgctcttgagggccaggaactgtgtgtggagacccagattcgggtcctatgggtttcaggctggaggggtctggggccatttcagattgtgggtcagggagcggactatgggtgctgtttgctgtccccagtccccaacaatgtacctgctccgggtcaaacagcccatggctgttcagccacaggcccttctccttccggctgaagcggcgcagctcccgctggaaaagctgtagggaagggattgtcctcagcagggctggcccagccccacccccaggcggcccagcggcacactgcctaccttggagccagtccaaccgagcagggcgaaagggaactggctgacgggtgcaactaccaagtccactctcacggccttccaggatgggcagggcctcgtggatccccccacagcagcccctggaggttgtggtaggcggaaaatgcagaaacttctctcaaaagcgtccatgtggctctgttgggccaggcgggtaggggactcacagcagctgtgctggtgctggtggtacaggatgaggccctgtggggagaggcgggcgtggctgagaccatccggtggtgtggagagagcaggaggcagtggcattggccagcggtggctcttggggagcagggaggccctcacctggtcctgcaggcggcacatcactctaggcagcagccccgcctcctgaccctccttggggtgggtgatgaggaagtccacgtcatggccctgcaacttccccctgagggcgtcagtctgactctgactcagggacacggcctgctcactccagccccaggccacatcccttccaacgagtgggcccgcttcagggtccccgactcaggtcccttcactggggaggggtctgaagccaagccagaggggcacgtcgggccttcttacctgcggaagccgccggtcagcgtgacggtggccccaggcagggcctgccccacagcttcctccaccacctgctgcagggcatctacatcggaccgcaggactggggtgctcaggtcctggtggtgctggagccctgggggcaacaccggccctcctgactcacccagcctgcccaccacaccgagcccccatccctcaccagcatgaggtgatcaacctggggccccgtcattgcaggaccaggagaggcctccgaggaaggtgaggctagggcagggagcagagtgagatcccaatctaagcctgacactatcttctctccccctttaaattttaaacttttattttgagacagttgtagattcactcgcagttaaaagaaatagcacagagggagatcccatgtgccttttacccagctcccccaaaaggttaaccccttacaaaactataattttgcaaccaaatataaggatactgatgttgatacagtcatgccacaggctatctcttttgatggctgtttttccttatgcataaagtgggaccaagaggtggtaaaaggatggaagatggctttgccatgacgaacacctcactctggcctacttctgtttcctcacctatcagcctcccacacgcagttaaggagaggtttatttatttatttgagatggagtctcgctcttgttgcccaggttggagggcagtggcgcaatctgagcttactgcaacctccacctcccaggttcaagtgattctcctgcctcagcctcccgagtagctgagattacgggtgtctgccaccacacccagctaattttttatttttagtagagacagggtttcgccacgttggccaggctggtcttgaactcctaacctcaggtgatccacccgcctcggcctctcaaagtgctgggactacataaagatgtgagtcatggcacccagctaaggagaggtttaaatgtgaggaacagcagcacctggcacagtgagctctcagtaaacgctgctaaccattcctgactact

SEQ ID NO: 1882961 - DNA, 4001 bp, Homo sapiens
gagttggacagtctgacttccagtgagggcctgcacaaacagggcatggcttaggaggaaccccaggctgcaggcattccttggcccagtgactatttttatggcacttgaagcatggccctggaggggctgctgggcgctgcggtctggatgccttgaaatccctacaggccattggtgtggctggggttcgtcttacggcggaggcaagcatctgtaattcagaaacacgctgccaccaggtagcctcttccctgttactgaacaccttaaaggcaaggttaattaaatcctgttgtggggtttgagggccagactctaatttttgaagtttttttctaatgtcgggagctgactgggtaataaaatgcatgagtcggccttctggcccctggcccttcagggtctaaagctggatttatggccagatgggccacaaactgggctggattttcgtccttgccctgagtgatttcttttaacttatcataattgacagccttatacgcagctttttggagtccctctactaagcaagtgatcatataatctcgcccggccataccaggagatcctgtttgatagttccactgggggtcctcacgggggacctccctggagacctggctcaaggcgccagtggtcacctgcataggactgagctagggcccaaacaccctcccattcttcaggagtgagtgtagaagtgaggatgacatttaagtcactccaggtgaggttataagactgagttaaatattgaaattcctggatatatttagtggagtcttatggaaaagaacctaaacactggctgacctgagacaggtcagacagggagaaagaaacatgaactcggactatcccttcagctccagccacctctcaaaggggaaatagtggggtgggaggagggggattagaagtgggaccaaattgtcagccagttcgggtatggggcagagtagggacagaagggatatagggaggcatggtatgggtagaagggggactggggtctggagaagggttgggaccggagtcggacgggcagggaggagaaatatcggaagggtctgtggacaagaaggactcgctgtcgccagagggtggtaggggagcagatgggcgggacagaaggagaatttgagacaaattgcattgggaacaagggctggggagggaccgaagtgtaaaacatgcctggatgtatggaacctcaaaccatttgcccattttgtgacaaaagttgtctaagtcccacaaaatagagaaattgaaagtgccattttctggccactgagagccactgtctaatttatattggggccaggccatattacagaagaaaatgagatgtttaggttccaaatcaggtgaaagacggagcggttttagattcctaaggacacagtccaaaggacaaggaggaggaatggagggtggaagggtgcccataatgaacagcggaggactgaagaaacagagagacagggagagagaaacgaggaggagagcaaccacaaggaccttcagcaggtgtccccatctgggttgtgcagtggatgagtggccaaggcacatgtccctgtggttgaccagtcacctagggaagcctgtcttcccagagataatccatgaccaatgttagatttaggaaacacagacagtgagtgtcctctcctctctaagaaaaggaaagtttgagaaaggatggaggtctcttacctatccgaaggcagaggcggggcttttacagagctggtccgaggtaccgaggtcgcgggtgggtctcttcaagaagtcgggggaaggggttaagggacacgactcccaaaggagttcccctatcccggatttcagcatcaaatgtgtgttatggcacagtctggattgaagagaaaacccaagcaggcttcgtgtgagctcgcacccaagtgaataaatagcctcactgctcacacaaagcctgcttgggtcgtctcttcaatccagactacaccataacacaaagtaaggttcctctttcatctctgctgctctcttatcttctagccattgaatgggagatctatactggaatatgcctgacaatttccaccaaaacattttgatgaacaattggaatatgactttgttaatatagtggaatatatttgagcttgcatcatggctaagtgaagagctattatggtttttgagtggccacatcacccttatttgtcttgtaatagcagcattccaatttagtgaaataaaagacactaaaatcatgcttccctaatattatctctattgaataaactagtaagcatatcatactaatatctactataataatttggtagtaaattttctttcacattggataaaatacctaagtataaataattttagtgtactagtcataatgtatgtaggattttaaaatattgtctgtaaccataattcaattaaaacactttatgttttgaaagtatgaataacaatactaaaatgactaagggattcattcaaagtaaatattgtggccttacatttatactagtgtagaaaatactgttcaattgatatgaatgcagtttgtctacaaatgctacacctaactatgctaattgttctgaagtaataaatagaaaccaaagaacaactacatactccactgttcggttcatacactgaacctcgcttttgcaatggaagtattttagcctgcaaatattagataattacgttggataatccattttctgtcaaaggaatttactcagcattttttagtcctcattattcagtactgctaaatttaatactatctttgtgctcaacttttgtgtgctcttaaaatgagttttgatttaaacaaatctgtgtctactttaaaagattaaaaaattttaaaaaatttgccaaagcaaaaacaaagcaataaacctgaggtctcagataaagacaatcccaaatcaagaacaatgaccaaaaatttatttagctgttaatataatttatgtatcgttcaaaacaacaaagacaaaaatctatgtataatttaaatcctttaagaaaaaagagattagcaaaatatcctcccttatttttcacataggagaataaagcctcttatttctaatttttattttctcctacaacagacaggtctctggacatgtttttgaactcctggacatcctttttttttttttttttttttttgagacagagtcttgctctgtcgcccaggctggagtgcagtggcttgatcttggctcactgcaagccccgccttgcgggttcacaccattctcctgcctcagcctcccaagtagctgggtctataggcacccactaccacgcccatctaatttttgtatttttagtagagacagggtttcaccgtgttagccaggatggtctcgatctcctgatctcatgatccgcccgcctcggcctcccaaagtgctgggattacaggcgtgagccaccacgcctagccgaactcttggacatcttaattttgcacactgtatgcaactgaaagaatgttatcagaaaaaaaaatagaagagagaaaggtgttataaaaaaaaaaatccggcgaggtgcggtggctcatgcctgtaatcccagcactttgagaggccaaggcgggtggatcacctaaggtcatgagttcgagaccagcctgaccaacatggcaaaaccccgtctctactaaaaatacaaaaatttgccaggcatggtgatgcatgcctgtaatcccagctacttgggaagctgaggcaggtgaatggcttgaacctgggagatggaggttgcagtgagccaaaatcatgccactgcactccagcctgggcaacaagagtgaaactccatctcaaaaaaaaaaaaatccatgggtatgttaatccagaaaaatgacaagacaaatctcaatcattttaggaggttttttgccaaagttaaggaggtgtgccctggagacaagtctatgtctttcttct

SEQ ID NO: 1882962 - DNA, 4001 bp, Homo sapiens
aaccacctcaggacacaaagagggtgaccccagaccctcccacaccttcacccacaggcagtcgtgtgacaggtggctggactgacctctggcctgggtctcccactcttcaggcatgggggagggtggagggggaagagatggcggcacccacccctatgggacccgcccttgtttgctggaggtgggagcctggcccctgccccagatgttctgcctttgtcttgggttggcccctcctgtggtttgggcagagaccatacctgggcggtcctgggtactcaccaggctgcagaaatgctggcggctgcagcaggagcagcaggggcagcagcaggggccgacccatggccttgttcttctccaggggacggggagaccagcagagctgtccaggcaggagaggggccctgtggaggggctgcctgagggctgaggtgagtggggagagccagggtgaggctccccagagggctgtgggggccggggaccttccccaaaccagtacacctccagggtgaccagcacttcctttatccatctggcttcttattgcaaaagggccttaggtgcctttttatcccttgcctaattgctccggccaggacttcaaatcctttttttttttttttttttagtagagatggggttttgccatgttggccagggtggtctcacactcataggctcaagtaatctgcccgcctcagcctccaaaagtgctgggattacaggcgtgagccactgtgcccggcctgacttcaaatcctgtgttgaatagaagtagtgagagcgggcatccttctcttgttcctgatcttggaggcaaagatttcagtctttcatctaaaatgactgaaagactttcagccatgggccttgcatgactggcctttattttgttgcagtacattccttctcttcctggtttgtggagtgttttaccaggaaagggtgttcaggctgggcacagtggctcaagtcacacaaaagtgtcaagtcagccctgcccaagggccccagtgcccatcttcctgctgaggggctgggcctcaccttggctggctgggcccctcccacctggatccctgcagaccccaccgcactcagcctcacttctcatccctttctctgtccaaggccagcgcaggctctttcagggagaggaaaggcgggcctgagtctgtgctctgctgcaccccagattcagtcctcagagaggagaaggaggaagccagtggaggtcacaggcgctcagcccccagcccaagcaccagagcccccagcttgtcctctgtccctctccctccctggcaggggctcccatgcagtccccaggcaccaccacagcccagctggcctcttcccaccccaggcctgctcccttggtgcagggaccacagtcttgctcaaggggtgagggggctgacggtcccctacacagagactggtccctctcgaggccaccccttgacccccagacatgagactggatctgcagggtcccctctgacctccctgccctacacaggaggggacagagcttggagaagccctgtcccaggccacatgacttgcagggcagtcccaggactggagccccctctacctggatctctgggcctcaacttctgagttgcaggaactcaggcataggggagccccaggaggttgttccctcatacagcccctcaggtcattccctccacacacctgagcctatggctgaaccaggaaggttccttggtgccagggcagctggactcaccctgggtgatggtgaggtgggtccccttgatggactgccacgacagcctccctgatctgtatgtccagctggacttggcagaagtacacagactggtcctccttccgcaggttcgagatcctgaggaagcctccctgaggaagtgaaggctcagagcaacagtgggcaccccgcacaaagtcctgggcccgtctctaacaggggatctgcaggtctttgcccgggggtggtcactggagctttggtgacccacagggctccctccataggaggctctgcccatcctctccagagtaaggtggcatcagctgaggggccgtggggacaggaaggcaggatttcaccagaggaagtgataacaatcttcttgagacagaagcaggcagggacaggcctcccttctcttgtcagtctcttccctggtcccagtaggctcctctgtgcttcccagggccagtcaggccgatccaccctccttcccttcacaggtctgaggaaacaggctccccatgctcaggaaacccctccgtctgagccaggccctatacacctcattctccttgttcaacccacagggaaactgaggcaccggggctttggactgaactggtcccacctgcaaaggtgggccgaaaagaggacaagggaccccctggctgtttgggcaaggcctcaagagggtggcccaccctgcctgaggactttttgttttttttttttgagatggattctcgctgtgttgcccaggctggagtgcaatggtgtgatcttggctcacggtaacctctgcttcctgggttcaagtaattctcctgcctcagccttccaagtagctgggaattacaggtgtgtgccaccacacccagctaatttttatatttttagtagagacagggtttcaccatgttggccaggctggtctcaaactcctggcctcaagtgatctgcccacctcagcctcccaaagtgctgggattataggcatgggatacaacacccagccactgaggactgactcttcgttccattcctgccttgcccgtggcccatgggacccagctagaaggtcacctgcttaccaggctgcccaaggagggggccacatagaacttttagccaacagcctctgggtagctctggagggtacatactccccaggggcctcaggcccggtaccgccacgtgcattctccttagatgcaaggtgcgtgtttatgtcactttccgggctctggacccagctgaacccccatgggagattccttttgtgtcaggatttctgctctggaatggtgtgaggcctcccggatggttcatcctccctcccccaacagcagtgacagggcctggggctaagcctggggctgtggctctctctcagaggggggttttgggaggcaccggccctggaggagggcatgattccaacatgggcagagtctaaatccagcccgttagcccagcaggtggccatgggagaggcatgggatgcagtgttcagcagaggcagggagggggccaggaccctgcccattttgagaactgctgcttgtatgtccccaccttcccccaacaactatcctcctttcctcaccagccacgtctatgcctgccccagccccttgcccctccttggcacccaccttgttcttgctttccccttgagatcaggaatgaggcacagatgtctgctctcactgcctcccttcacggtactggagtcctagccagcgcgctatgcctgaagggaaatacaagtgctctgtgtcttcttcaattctgtattgatctatttggcctccacccatcacagggcccatattatctatatttcctgcattcttggcctctttttagtgggggacatggtctcgctctgcctgtaggtgggactataggcacgcaccacagttctcccctaattttcttttttgcagagacgtggtgtcactgttacccaggctggcctcaatctcccaggctcaaggcatcctctcagtgtgctgggattacacatatgagccacagggctgagccccttgtacattgccaatgctctggcatctggtgcctcactgactagggagagactccccctcccaggggtagctgactgtaaaatttttacatcaacttattaaatcagctggtcaattttgacccagagccatgctgaaattttgattaagaagctcctattcaggcggggcaccgtggctcaagtctgtaatct

SEQ ID NO: 1882963 - DNA, 4001 bp, Homo sapiens
tgcctagctgagttttaaaattttttttgtagagatagggtctatgttgctcaggctggtctcggactcctagtctcaagagatcctcctgcctcagcctctcaaagtgctgggattacaggcatgagccactgggcaaccaatgcagctgcttttaaatgtcttcaggctgggggtggtggcttacacctgtaataccagcactttggaaggctgaggtgggcggatcactggaggccaggagttcaggaccagcctggccaacatggtgaaacctcatctctactaaaaatataaaaatcagtcaggcgtggtggcgcatacctgtgatcccagctacttgggaggctgaggcaggagaactgcttgaagccaggaggcggaggttgcagtgagctgagatcgtgccactgcactccagcctgggcaacagagtgagaccctgcctcaaaacttaaaaacaaaaacaaaaacaaaaaacgtcctcagagaataatggtctctcctcttctttggccttcccaattgtacataagcactttcactggcagaccttctttgaaaccttaccaggaaatgtagttcccagctccttctaagcaactcatgaagacccaagaggctgtgcagtgctgtacatttctcacctggactactcaataggcaagtagactttccttatattttatctctccccacctcaggacagtgtgctgcatgggcctgcccctactcagcttatgagcctccttcacactcctagcaccagtaagcgtccacattgctgccactcccggggcctagaacatttctccatctccactccactcccaccctttccatcctttggctacttcctccttatctgctgcatcttagcgtaggcatcacctccccaggcagtccaacacctgacccactggaagcacacaagggacacgctagcactctgctttcttaagagctgcaagatgccagcgactgttgtgacaattgttatagcaacagcctggggtgcgaacatataaaatggccagaaatattaatgctgaaaacaaaagaaataaagttttgatccattagtttagtttattcttccttttctaatctctaccttaatttctttactctccccaaggcaaagatattgcagtgttcaactctaatcatgcaattttagaaaaatggcttagagcgtatttgtctaggtggatgctaatattcactaaaaactctaagtggcttctaaatagctgaaagattttaagacattcttagttcacagggcgccaagttaaagggaacaaagatctgcaacagtaatgcacctagacagctctgctcccacgtaatatagtcagttctcatgaggagaaacagtcaaataaataacctaccagatgtgatggagatgccactaagatgcccagttcctcaatcaaagaagcgtcgtttggactttgaaaatggcaaaaggtgtgtgtgtggggagggaggggtagcaggggctatttgagcacaggtggtgaagagagcaagcaagaaaaatgttgacacagtggaagaaaaactaaacacttcccactttacattatagtatctgtcctaaagaagatgatataaaataggaatccagagctttgtaactggagtggcaagagtggctgccatctcagtaaccatgtcaaccgttactcacaaagtactcgtcctcatttgcttatgaaaaggaaagcactcaaatccttcttatacatcagcagtcaggtaaacagcagatatttgggccatgagggcagcccataataccataattcaatatacatctagaaaaaaatgtgcctccctacctttcggcagtgaggattaggacagctgaacctcttcacatcactgtccaacagagccggaaagctacaggacgggcacctagagtcagaacagcagaactgacattacttcaaacattaaagcctgatctggttccagctccatgtggctgttcatatgaagatggagttttgagctggacattcacatcccctttatactccttagttttccttaaaaacacagattgaacctcttctttgtgctggctcttatcaggaaacataagcaccacatgaggtcctgactgaatataaaccactcaataaacacgtcccaaccttaatgagaactccttgcatataccgatttccctccagcccagggcaccatgattgtatctacgggccagaagatttgggggtgccaagatatgtagacagaagtttgagctacagtctgggcgcggtggctcacgcctgtagtcccagcactttgggaggctgaggtgggtggatcatttgaggtcaggagttggagaccagcctggccaacatggcaaaacctcgtctctactaaaaataagctggaatgtggtggtgcacgcctgtaatccaggctactcaggaggctgaggcatgagaattgcttgaactcaggaggcggaggttgtagtgagccaagattgcaccactgtactccagcctgggcgacagagcgagaatccacctcaaaaaaaaaaaaagaagtttgaggggcagatttttccattaatagaattactggttactcaatggttctgaggcgtaaaaaataaaaataaataagtaaaattattgataatcttatttctcagcaagaaatgtcaaaaaacctggaagataaacacaattttcatcatctgatgcaagtgcccaggtagttttcacaatggggaagagttggcagatggcacgctctgcctgagaacgaacctgacaagctcgtcggcgtaggctgccgcaacctcctcctcggcttttcgctcatagtacttatacaggatggtctgggggagcaccttctccagctcactggttgggaacgaacacgtgcagctgccttccatgcagctgagctccaactagaaaaaggcgaaaaggcaaagaaaaaaaaatcaataccatttatagaaaaataaaaagcgtcagtggttaaaaacatagatcctgagacaacatagcaaggatctctctgcctgttcatctctgagaaatcacacttaaatcatggaaaccatgaaacaaaaatccagtacatctttgatatcactaaaggacctctattagcccaaatcacaatccacaaagactgaaagtggcggaagggcaaatggcttagcagaccacacacagaagcccatagcttagggtctgaaaaggagatgctggggagaagttgttcccctctacagatattagaaagctggagaacctctggaaagcagagctgagtggtggggaggggcagggactcaaagtaataaactgaaaacagggacatgggtggagcctctagttcctacccgcttcagaaggaattggctgactctgagagaaatgaggaagatctcctgaacagctggaccacacggctctggactggaaaccactcatagaggagagcagagctgaggggtggcctgaagtcagagtctgaaatggagtctgcataatgaacagagaactctccagacctttcctccccctcagtttcagaatgttggaaaatgggctcacacccaccaggcaggaggcagactgaatcaccccaggtaagagacttcagagccattcaggttcataatataaaagctaactggctcctatgcacctagagtcaaactcactggtctataagccccactactcacacagctttcaaacagctctttaacatgaacaaaaagtgtcagacatgaggaatgcttcccacatgaaagacaaacaccaaagaaaacaaatggaaaaagacgacattttaaaaataactagctaaaatttatgaggcatttaccatgtgtcaaacaataagttcattaaactcatcacctcatttagctttcaaaacaatgctatgattatttccattttacagaggaagaaacagtggcttaaggaatttaaattgct

SEQ ID NO: 1882964 - DNA, 4001 bp, Homo sapiens
ctgtccagttgcaggaaaacaagctcagggctcccactgatcctacatgatggtgaattgtataattgtttcggtatatattacattgtaatatacattgtaatatataccgaaacaattatatatactatatattctattattattataacagaaataaagtgcacaatgaatgtaatgtgcttgaatcatcctgaaaccatccccctcccaccccctcccatccccctccccagtccatggaaaaattgttttccccaaaactggtccctggtgccaaaaagattggggactgctataatgtctctgaaggtggccaggcagttccagctagaaagctcatctgagaacatctcagcccaggggcccgtaggcagttcttttttttttttttttttttttttgagacagagttttgctcttgttgcccaggttggagagcagtggtgcgatctcggctcaccgcaacctccacctcccaggttcaagtgattctcctgcctcaacctcccgagtagctgggattacaggcatgtgccaccatgcctggctaattttgtatttttagtagagacgaggtttctccatgttggtcagtgtggtctcgaactcgtgacctcaggtgatccacccacctcagcctcccaaagtgctgggattacaggcatgagccaccgcgctcagccccaatgggcagttctatcctgctcccccgcactgccctgcccttacctattccacgtcccagacctctgactctgctccaaaaccagccccttggccaggcgcggtggctcaggcctgcaatcccagcactttgggaggctgaggcaggcggatcacctgaggtcgggagttcgagaccagcctggccaacaaactggggttttagtgaaaccccgtctgtactaaaaatacaaaaattaaccaagcgtggcagcgtgtgcctgtaatccagttattcaggaggctgaggcaggagaatcacttgaacccgggaggcagaggttgcagtgagccaagatggcaccactgcaccccagcctgggcaaacaagagcaaaactctgtctcaaaaaacaaaaaagccccctaaaacaccaccagccaccccacccagtcggtgtcccattgtctgtagggcctgaaatcccagttccccagggctcacctggggcccgtgctcgcctcctcttcctcttcctgcagggccagagaccccagcagcttcctctttggcccctggccctggctctctctggctcctatagccaggcccccagacttcacctcggcctgggagaggaaagtgggggcccgggaggggcccagaggcctgagaggctccccgcctgggtgggccgcagcccctcactggctgtgccaccttcacttgcacggggaaggctgggccagccggggtgctggcggtagtgtaagaggctggagtggggcccccatagggagacgctgggagcggcgaggctggatttggcttcagggagcccgtgcggtaggcaggaggtggcgggggctcatatgcctgaggagaaacgcaggccagaagtcgtaagcaaggaccccactccaagacccacatttgtggaaatgaccctggctgtggggaagcacaggctttttgcatttgacaaggtcccgtcctcaagtggctgacatgttggtacttgcagccacgcttcctccatgctggggtgcacattacacacatgggggatcgatcaggctgggtctgagagtccagagaagggggcagggtgctgacggggaggaggggcagagtcacctgtcggtctggtcgccgtgacgcatgaccccgacccccattcagctcggccagcgtgctgctcagcaagtctatctcggcgtccaggcttccagggcgaaggccccccctgtctgcagggagcccctgaggatggagccagggcaggaagaatgcaaatcaccataggccttctcctgtcctgggtccctcagactcggttctgggggatcccacatgtcccaccccacgatcccgggtctcacctgcgtgtgctggagtactccatgggaccccacccacgccggcccccgatcctccggtccccctggggcctggtaacactgctcagatggaagggggcaaaaattgaccctggggtggggctggagtgctgggttgagggaagagaaatcaaaggtggggtggcggaggacaggaggggtgtatatttgaggagccaccctctccgcctctcgttacctcctcccccaaatctagggtcccaagagagcgcaggcggctgttccccccgcctcggcttggggaaggggcaggaggaagcagccagggcgggaggctggagcggtaggacagaggtgagcgccacagctgggtggctcttctgtctcacaagggctgccttacctgctccgtgggccggtggtggccccggggtgccgcgggggatcgccctcccctgaggggctctggcgggctccggctgcttcgggggcagccaggtgggccccgacatggcctggaaagggggactccagacagcggtcttgaagccccgagcctctggccttcaccccctcttccgtcccgcacctcgtttgggactccagaaaagaaaactttttctggcttttttttttcctcttcctccctaattttggggacgaccacgcctccgatgacgtcaccacattcctgggggagggtcacgtggccccctaggccctaaactgccatttctccctgagtcagccccctcctgccgagaggggagggctctccgggggatcccgagtcactgggggttgcgggcagctggggatgggaggtgcgggcccgagccagcctccaagtccacggatgcgtccgggccccgcaccccagccctgcacgtggcagcctcgcggcgggaggctgaaggctccgatctccacccctctgcagagctctccattcccaccccctccctctcagctacccaccagcactgctcagccagcctgtagtgttttggtcttttattcatggtcagcagagttagaaaaataaaacagaacgaaaacatcaccaccccagtgggccggtgagtctggccaaaatggggaaactgaggtagcccagagtcacagaggaggcctggcccctagcatcaaggcaccagtgaagggaggctgcggactccctcccctgcacggtggggacagccacccagagttagtgtgctggggtccctctgccaaaggaggtgggcgtgatgcccaagcccaggatccccttcaaacctcccctgggctccacgtcccaagggcagggccacgggccacagtggcctcctcttcctcctcctccaaggatcaggataggccgcctgcctgggccctctctacctagccctggaggcaggggcatcacagatcagtgcaggtgactggagtgaccccatgaaccagcagcgtggggcccaggtctcgggttagagtctccagtagcgccaggtagcgggggtatcgggcgggatcggctggcggccgaggcaagtacaggaaggtgagggctgtgatggggccctcagcatccccaccctccggcccacccggccctcctcctgtgccgcgcccctgctgggcccgaaccagggcgttggcgctgcgtgccagggcctctgcctctgcgtctccccgcccactgttcacaaagtccccttcctcctccgcctcgggttccccagccccggccccctcgccccacaccacctcctgcacctcagcccggatcctcagttggctcagcagtgcccgcagccgcccctcggccgccccaggcgcctcccgaggccccaggcacaggaagatccggagccgggcgctatgccaagcgggcaccatgcccaagatggttgccatctgcagcaggaagaggccgcagacatccacatagccgggcccaccccggggccgcagcaggttgaggggccacac

SEQ ID NO: 1882965 - DNA, 4001 bp, Homo sapiens
tgccttcccaacagctctagcacacagctctcacatgcacggtttaattttcattgcagctaacattactattgcccaagagtgaattcacacccatcactgacctccctcgaatacacatctctgctggtgaaactttccagaaagcttccaaaaacactgctttcaccagccctcctgacccaccccacacctactcaaaaatcatgaatgcctctccagtgctcaagagctccttgggtgagccacttcacctcctacaccctccagccccgcttgcctctccaagtatagctctatcattttcctacaggaaccttccactttctgttctccaaacatccctctcctctctggattcttacgtcctgcccatccttcgaagcctttcctaatttgactccccgagttgactccctggtctgagtgcctgtgactcacaggattctgcaaagctcactggcccttggcatttcttcctatgctgtgtccgagtgtaggtagacatcaacactatcagtggactctggatgcttggactagatgaccatcagggtcatcttcgtcaccagaaattggacgatcttatttcctgaactagaaggcaagaaccattttgtaattacagcttttctattttgagcattcctgtactagatacagaacccaacactctctaggtattagctcacccaatcttcacaaccactgtatggagtagagaatgttaaagattgagaaactgaggctcagggttcacctaacttgcccagtctaaggacttgggagaagctgagccaagaattccattccaggtccatctgacacctgaaggctgagcttcttgcagagatctcttccctcccatgtcctaccctcctgggcacagagcacagtgcctggcacgtggtggatgctggctcaaccagtgtttactggggctgtctcttacctccaagccctcaggcagaaagagtgctcagaggagcagggagattaactcaagacccaagaatgggaaaaaccaaggtggaactggtgatctcatccctccctttaactttctggggtaaaggcacaaggaaaggtccaccagatcctcctaattcagagcccatgctctctgcgccgtcccagccaggccccacccagccccacacccagccaggcctctcctccagaggagcattttcctaccattgttccaccaggctaaccccagaggatgaaaattcctatcccgccaccccgcaacccccgtgtccaccctgactctccaatcaccttatgcttatgctctggctcctgacccagccccgccccagtgccctggtaccaagccttgtcctatcaccatccctcacctggttttggttctgagccggtgggggcacggggtgctgcttctcctgcactcggggcttctccctctgctgggcataggtgaagctgggaggttgaggggagcctgtgccagcagaaagagcttcggggtgccccaatttttgatttggttgtgacccagatccacctggggctccaggactgaacttggaagccacaggagtaaacttaggagtcactggagaaaacttaggggctggagccggagatgaggctgggggccctcggggctgggtgttagccaaagacacaggctgggtctgggactggacatggagttggacctgaggcttgggctggggctggggctgaacatggaactgtgtctggctctgagccggagccggaacctggggcagaggctgggagctggaaggggacttccaaggaggcaggggtgctgtgcccccggctgcaggcttggtactggacttggaactgaatggagtggccactggtgggggcacatatccagatgacacctgcaaggggtgggagagggaagagagatgcagtcaggaggacaccatcctccttagttctatgcccagtctctctggccctgagccctgcttttcctactctccggtcccttacccgggctttgaaaggatcattcttggtcatgtcatccagcagtgaggacagagagtcgatctccaaatcaatactgctcaccttctccctgggctagagggtcagaggtcagagcacctattccatgcctctatccccccacccccaaggcagaggtgcaggggaggtaagaagaaagggccctcttctcctctccttgggggtgtccagtgcagccgcccctcccaggcctccgtacctgtggtgggggcggtatgggggcctcaggccctccctcctcctccggaggaggcggcggggaagggaagatctcctcctccagaggcgcagggggaaatgattcctcgatcgggggagggggcggcgggaaggcacctcccagagcaccctctgcatcgtcgccatccccagcaaggggaggtggaggcaggggaaagtctggggtaggaaggagaaagacgtcggccggggtccctctacccctcacccaagctcccctcagttaaccgctctaacccctaacccaagaactctctcaggggtcccagagcgtgtggggaagcaaaggaggggcgcagggcgccctgggagtaccaggtcaggaaaggccgggcgcactgccgaggagtggtgcagctcccgttacacttcggaaaacggacccggaggggaagattcgtgccccacattcccgactcccactcccaggcgggggacttggaacggtcccaggagccctggctcccagccacgagctccacgatgaggtaagaacatctgctcgggacagggtggctgcgcccagccccctcggcaacaacctttccagacatccccaaattcccgaaacgactgccccccaccccggctcctgccggggtacattccccaagccccgccgcataccttccgggggcggcgggggaatctcgcccacccggcccatctgtgcgcgctgggccccgggtgccgggggaggctcgctgtccccgggccggaagggattcactttgggctttggggccaccacagggccgaacttcttctgcggggcgtaaaaagccggagccgagaccgaaacggagatcgcgggagacgggcggggggccgccatggccgggccgggctgctggggtgggtcgccgggttacgcagcgcggagccgggctcaggagccccaggcggtcccagctccccttggtgacccccactcgccccctcccggcgccccgcgccccctccccgtggggccgccctgccgctccccgcgcctcaccgcaggccggagcgtgcgcgccgcgtctcgggtggccgcctcggcgccgggtccgcagactctgcgtcccggtccggagcagcctccagccgggcggggagggacacacggaaggaggagggagggagaagagagggggcggggagagagcggcgcccagaccatacaaggagcggcccggagagggggcggggagagcggggaagggcggaccaggcaggaaactcccccaggaaggggccctgatcctgcctcaggccggaggctccgccgaggtccgctcgcccccaccccactcactgccgcccccgccgccccagcccggctcagacccccactccctgagcacaggcctctgatgtcatttcctgacctgcctccccctccccgcccgacccgcgggtgcccgagatctgactcaccgtccccctccgggcttagccggcggaggtggggcgggtgccgccgaggtagccacgcagcccctgtgcgcctccggcccggcccagcgacctcctctcgggcctgccgttacccggtcccctcctgccaccacccgctacccggccaccccgagtccgcctggggtggccgaacgtatggagctgggctccagggtgcacggggatggggggtgaggagcggggcgttctccctcccagcaccccccagctgactctgtgcccggagggggtgtgtgagccggaacctccagcattcttgg

SEQ ID NO: 1882966 - DNA, 4001 bp, Homo sapiens
actacacttccttgagagaaaccgctgtcattaataaaaggggagcagcccctgagcacccctgctggtggctctgtcctctgttaggcaccacactggttggtcaacttggatgttcatcgaggctcattctggccttgctcagaagcccttctgatgctcttcagtgagggaggcactaccatttgaagtgaccccatgtcagtcacatggactggtctttagcaaagtccaaggctgcctgcttccacctaagtggtctctgttctacactttaatgtcaccctctacatcatcttacctagcccacccaaccttataaacatgataattgactactttcctgagctaaattaacttgtttttcacatacgcaaaaaagaagggatagtaagcagatttttattagaaagaagtccaagccttgatcctgtgggcactgtgaattaccaggagggagagtttctcaatgaccgtttactacatattttggagaggcagctaggaagtggtctaaaggttgggattgctgtatgtgatcacttgtgctgattttcatcacccgctaaccagagctttagagtgggagttgggaactaagtaatgacctgtctgctagaaaaggggaaaaaccaagagaccctgcatttcatactggcgccatatccccagagcctgacttgcacacaggcagtataagaccaaataagggagtcggggggctcaaaaagtggagccccatcttaagtatctccaaacagcagggaccgcttagtccttgccgcatccccagtgtctatactgggggcctggcagggagatgcactttactcaggtaatttactgagtggatgaaatagcataaaaacgaacaggaatctaaaaaacgcacaaaaccctgttttaatggaagtcaggcccaggctagaagatgacaatctacaaacacttttattagcaaaaggagtaagtgcagcatgggagaaagaggggctcctccttcccctcaaaggcatcactgccccttcccaaggggcaggccagcagggaacaagaggaccccagggttgcaagcaggctggaatcagacaaaagtgatccgtgtccgggaagcattgacctgccagacattgagctcctcatattcatccagagccgcctggaactgggcgggtgtgaagccacgagatacacagcgctgctctgcctcagagaaccggacacttcggccccctgagaccagttcacggacggtggcaaatatcacatctgctggtctctgagtcctgaaggaaatgagtgggtgtgtaaggtcaggatacaaacaggaatgctcgacatcaacagagaacaatggtggccagtgttagaattgaggccaacctcagacacatggccacagaagacaaagtgacacagctttgtccttcactaaaccactcacctagctgtctgccccttgtctcctagaagagagtcctttgacatctccattagcctgatggcttcattcacatcttctttctccaccacatccaccattctcagacgtgcctaaggggaaggtaggggggaaagatgggaacgggaggagggcagtggaacgaggtcaggggacacccttgttctggctttaaggctgggcagcccatgggtcgcctactcacaaaacaggagtggaatcccccctccccccagcatccgcagtgttgggccggcactgtcagaccgagacaagtgcaatgcccagggcagcgtccagcaattgcccaagtctccgcctctcaacactggccagtcccggagttcagctgtcctgtgagggagaccagacccttttgaacgccactgggctccccagcatgacagatggagcttggggagctcagccaagaagacaattggcagagagaacgtgtcccgggggctcgggaagtgctagctcagcagtaggttgggtaatcacactacctgcacgaacagcactttggagcccccaggactgaggtccaagacgggaggacagaaaggaaggtctgtagcacaggatctaggacacatggagtgaaacagaccccaaccaccctctcagtgaaggttaagaagtggggaaaaggcctttccctccacggacgctgtgcgtgccctgctggagcagcaagtacccacagtgcggtagcacggagaggaccactatctgcactgtcagcactttagccccggcagggctggagcgggaggtggggaggcggcaatgagagcacggtaaggagctacccctttaagggtcaaaacagatggccctccagcaatttgggcacttaccagagcagtggaaaggcgcaggatagccagcagggtccgggcagaagtataggtggcatccttactagcccaagcctctcgcctcatctccacgtatgctgctgtgatgtagtcagccagagactctggcaccatgggctgcttctcgcggcacatggctatgtaacgcctgtgggggaaggttcatggggaagcagaagagggagatggggaagggagtgaatatgagcccatgttgttttctgtaccagggctccccatttaacatggtcccctccaagaattttaagtggaaaacacaaattagtgggtgattatttgcttggcttgaatatcactgatggatttcaccaaacgtatagcccccaccagtatcctccaagttatttcctatttttttcgggaaaatggcctttgtaagacaaatccgtctgtcattaagagaggatccagacccctcctctgagcgcatgacatggcaaaacatatattttatttaaagagaactgtttacagaatatttaaaagggagtaaaaaccggaaagaacactggaggctcatgggaaaatagcgatagagattatcatccagaatgcctgggagcaggtgttttaaactttaaattttggagtatttgcatatgcatgagatagcttggggatgggactccagtctaaacatgaaattcacctgtatttcatatacaactgatacacataacctgaaggtaattttattaaaaatatttttgtgggccaggagcagtggttcatgcctgtaatcccagcactttgggaggcagaggtgggcatcctggccaacatggtgaaactgctctctactaaaatacaaaaaattaaccaggcgtggtggcgtgcgcctgtaatcccagctactcaggaggctgaggcaggagaatcgcttgaatctgggaggcagaggttgcagagagctgagatcactacactccagcctgggtgacagagcaagacttcgtctcaaaaaaaataaatagtgtaggaaacaaaatttcctgtgtccctatgatatgaagtgtggaattttccacttaaaagctgatctgaggctctggacatgtctgtagcgggaagtggtggtgtgaaaaacacacaccctaagactaataagcactttttcaggaggctcgcacggcccacgccaacgtttgcccacccgcacccagctctcctacctcatgagcttcatgtccagaggttcaaactgggaggggggctgccggctgtgctggtgcacataggtgatgtgctgggccaacctggacagagggaaggttagaaggaacaccctttttagggctacgcacccatgtcctcttaggtgtccctcctttggctctgccacttcctcacagtgtaggagggacaagctttcccgggaaatcctcatcagcatttcagccccaacccaccatttccctgagaaccatggaccagcccctgctgcaaaggggaggctctggggtttccaggagcgtggaatttgttttctgattcacctctcctcctccctacacagatcattacaggggacctctctttgggtgttgagcttcattcaccgtaggtcattgtctcggtcgggccggtcctgaatcagccagaggaggtcaaaccgggagagcagtgcagcaggt

SEQ ID NO: 1882967 - DNA, 4001 bp, Homo sapiens
aggcacgcccccacaccagtgcctgcactcggggctcagcaaaggcgcccacctgggcaggtgtgaggaggtggagcccagctgcagaccacccaggggctgagggcagcttctgtcatccggccttccccgctaggcaggaaggagcagaaccctggccagacactccagaggctccagggaaaagctctagaaccggtcactgccaggggccttccacccccccttgctgggtctctgtgcccaccccacctccagggctcattctcactcaggccgggaaatcccttctttcctatcccatgggacctgcagcaggacgccctaaggaagcacccggggcggaggactggagcacagagacagggtgcggcacaggccagccaggttccgaggggcagagggagagctggggccatcagaagagagacctagctacagggacacctcaccagggcagaagtccccttctatcctgaaataaacaagcccctccttttttctgcaggggcttggagagcttctgtagagaaacacgggcaccacaccccagagggaatttattgggggctcctcgcggtttggtgatagctaactgacaagaaaaaaaaggcccaacccacccaaggcagtccccagggcacccaggcaggcagcactggtcaccatgttcctgctgtgcagtcaactggacccgtcatcctccagctgccagcttcaaccacacacatcccccacccgggcactccctggctcagacacctaaaatgactcccactgatctgggctaagtccaccaacccttgcctgaggctccctggggagaagcagccccatcaggggctggcccagtgacctggggcatgatagctcccagctggtcccaagtcggccactggtctcctgcttgattgctgaccaccagatttcacatgggtccagcctggctggccaggctctccccagctttgacagactaggtccaggcctcccagcctcagtctctgccatctggggcatccttgggagcccaggcctgtagattcagagctgagacacctccaggccctgggtgcctccatggaaggtgtggctggtggcggaagagccacagtgacccagctctaccactcaccaacctcttcagccaagcctttcctctcaaagcctcaggttccccatctatgagataactattttaaaaaattacaagccccacagggctgaggtgggaactgttgggattatatatgtaatgtcacctgacacccagatggagagcataggccagttagtcatagcccagatccagggacccaggaagctacattaccagtgtgtggtgtgtgaaggggaacattggcctctgctccagaaccttctaggggcaggcctgaaaatgccctccaactccgagccccactaagtatcctcctcttggagctgttcggagatgacccactccacagcaggctacagctccagagacggtagcccccctggaaacacccaggctgacctcaagggcagcccacctgcctggagctgcccccttcacaacctgcagcagaaaagaccaggccctgtgctgccagccaaggtctcaccccaagcgtgtgctgggagcctggctgggcctttccaacccacggcaccattcaggatggccctacagatggtttcagactcccccacctctgccctgggcggccccatctgctggcccagctcagattgctgggctcccagctctaccgtggccccaggcagtgtaaggcgatctggctgcccaccagcgctgggccctcacacagcagctgagccagatgggctggggaggcggtgaggaggccttgaggaggagcaggctggggccctgacacaaggatgcaggggaggcggacgcagctgcgggtcctgcttttcccatattggcactgcacatgattgctcagagcggagagacacaagcaaaaatgtgctagtgccaaaatcggccaagcagatggcactggtgcgggctctctggggacacactggacgaggggccttgcatccctgcacccttggaagcagcctgtttccgacgtctaggagcactcaaggcagaagtgggtaaggtgctccggaggccctcgtggatctgtctctgctctgtttatggcccttcggtaattcactgactgagactgttcacagtgaattctaccagtgccatacacagaacaggagtcacactctgcggcctgccgaccctgcggagagaccagcggcccacgatgcccgttccctgctcctagcctgcccactcccttgggggccccccagcaggccctcagcagcggctgctacggtctctaccccccaccccatcccacctcttcacaagatccacatgccccatcagcccaagatgaccttcaaggagacagggacagtgcgggagaggagctgaccttctggccttgcagaggagaagaccacaccaaggtgtctcctatctccacctgaaggcccacatccctccacatcacccagactgcgcctccaggctggggagggagtgggtcaggaccatccatctccttgccagagtaactctggctcggagaggcaagcagctggccagagcctcctctctacccaacctgccacaggggcagtgaccagtgggacatccaagatgcctctcgtagcctctgagcccagacaccagcagcccaggctcctaggcactttggtctccattatcctccaccccccagcctgccctgtggcagaaacagagccccaggaacaaaccgaatctgctgctcacccccactcccatcccaaaccagaccagattgggccagactgtgaaccgcccaggctgggcatctctgctgccggcctaggatcaaggcaggaaaaggccaggaaaggagggcagaagagaagtcctgcagccacccaggtggcttggagggagccggaggcacggatgcactctagcaagggagtggctcctggctggctctggagtgactgcggaggaaagcggaggctcaggagcgagggaggggctgggaaggttgcatcagtggttgccagagcagctgcctagagagaagttgctgtggaggccctgcctctggtgtcacaggccctggggaaggacgggaagaagggagagggtgggagggagggtctctggggagctggcacccagggcaggcaagctggggcctccgcagagtggccactagagtctcagcctactccaggtcagcggtggcccagaaggcagggtggctagaaaatatcctggaagggtcagagcaggtgccctggcccagaaactatgcagacctcttggcgatgttacccccaggaactacctcccgtggacctcagagctccatctgggtaccttggccaaagccatccgctctcccctagacactgcttaatgctccacccttcctgctcccgaggactctttgtcctgctcccacacacccccactacagggctctgcccttctagctggtctatctccccagaggacaatccagcttgatgaggtggtgatctcaggaagtcactcctcagccttctgcctcagtttcccttactacaattttctgaactctactaaggaagagagaccagacttcccagccttgggtggggaggggaaggggtgatggcagggtgttagcaaagagtatggggtgggtagttatgaacattgcttagggtgtagccataagcatcacccaaggagcctgttgaaatgtagattcttgagcctgcctggaaatctgcattttaatagcaccctgacagctcagcatggggtgggggtgggggtgggaagatctattttgagaaatctttcccaagaagcctcaccctgggataattaaacagaatgcagaattcttctttcttctggctgggcgcagtggctcacacctgtaatcccagcgcactttgggagacgggaggatcgcctg

SEQ ID NO: 1882968 - DNA, 4001 bp, Homo sapiens
aaagaatattccatgcctggcttagagcaagctccggaggctagagagaacaaggactctatgggaacaaattcagtgtgctagttagtgggcagatgtcaaaagcgcaaaggagaaaagtggggggggggtggtggtgaggaagctggagagaaaaatcaaggcaggttatgaagggcctctgttaaacagtttagaagggtattgaaagtcaccaaaaggatttaagcttaagaagaactaattaacatgtgtttttaaaaaagattgctcaggaactatgtctggaaaagaacaaggacttgacttacattaaggtaagaagtggaattataaaatctggggcccaaaggaattggagtgagttaattcctcccctttaaagtgtctattttcttcaaagataaccactatatcatctctggggctaacattctctggccctttcccactgtctctggcagctcccgacccaagtcactacagttacagcattcccttaaggaacacatgcttttccaacctgctgcaacacagaaagcacatgtaattttttattttattgtattttatttgtttttctgagacagaatttcactctgttgcccaggctggagtgcagtggtgtgatcttggctcactgcaacctctgcctcctgggttcaagtgattcttgtgcctcggcctcccaagtagctgagattataggtgtatgtcaccacacgcagctaacttttgtatttttagtagagacggggtttcaccatgttggccacgctggtttcgaactcctgacctcaggtgatccacccacctcagcctcccaacgtgctgggattacaggtgtgagccaccgtgccgggcctggcctttctatctggcttttttgatttgatatcctagtagagcccactattaaaatttccatctatagaaacaggaagtcaggaaaggactggagggaatttcggcaggttaatgattacaacgggaagagaatacaattattgaggtgttttgactcacttggtcatttcctgagaaactctttgcttgaatttttccactcttcaggtgaagatgatgacactgtccaggctttcaggagtccaacctcttagacaataagcgacatactctttggtaactgcagtggctaagccaaggaataaatatgcataactacaacaaacaggtacttgatgagaacgttatctagagctgccagataatttagaccaagtgcaccttttgttgtaagaagctggtatgatgtccacatagttttcagggctgctgttccctctaagaagaaggaatagtctttttcctgaactactctctctctgaacttttaggctacaattatgtcagttcaaagtgggcagatttgccaactgaaaaaatgatgacacgcagcttcccaactctgtaaggacttttcaggtctgtgggtgaacgtcattcccgagcaaaccaatgccacaagattagtaggatgcggctcacaagaaatgtttacaatgaagggcatcacagactgcaaaccaaacagggtaggaggacacgggaccatttccttttcctgtctccatctgactctggaaggcggggacaagacatttaaaaccaggaccactccaggaggacagcacattagctactgccctccagctcccttcagtgttgtttccgtaaaggacttataaactggcgagggcggtggcttccaaaagcgcacaggcgtcccttttccaacttggtcttcttattttcccttcctgctccataactacaacgtgtttctgttcgtaatcatctcggcttttccttacctctgcttgtaagaaaagtcctttgcgccattcccctccaagccccagggaagggcctggaaagcgcttacacctcagacccagtgtcggtcagccgtcaaggagcgagcgacgtgggaaaccctgagataggacattggcccggcgctgggctcgggtaacgatgcggggcggggagcgcgggcggccggggagggcggcggcccctttaagagcaggccacgccccctcccctcctcccgttcgctgccagcggtcggtggcggccgctacggtgctgacaagatggcggctggcggagctgtcgctgcggcgcccgagtgccggcttctcccctacgcgctacacaagtggagctccttttcctccacctaccttcccgagtaagtgccgggccttgagctcgtgctgccccacccttccgcgtcagcacggttgggccaggggtgcaatggagggcagccgagccgagaggcccaggcggggcctgctgagggggacgtgcggcctccggagtcttagttcagctgctgagagcgttgctcggcctcgctcgggaaggggttagggtccggagagcgagcccagggagaaggggcgaggtgtgtggcggatccggggcgcgcacaggagaaccggaagcccagcggttctgcgcttgggatttgggggttgaggttgaggagggcttggggggcggacggctctggggcaggaatcggagttggcggggccctgcccgcgggcaaactaccccgaatgtctgaggtcgtccgaggtggtcggcgtcgggggacagttcagtcgattgctgccgggacaaagtgtaaagccgaggagtgtctattccagagtggggtcattaaaagtgattagctctagagtagtgttaaaagtcacggaaggctgaaaagttgtggaatccatctgaatcctagcaggcggggagaacttgtaggattggcagacgttgtctttaatgcctggaagttctgaaaaagatagggagtgggaaggagggacgttaccgaagaatttcagtattacggctcattagaagatgggtttgtatggacacagacacgtttcccagtccggaaactcaaacatagaaacatctggctttaatgaatttgattttcaacaccggctttgtcttgatccctgatttaggtgttaaaaaaattcagttgcattgttaggtttttgttggtggtgtttttttctctagcaaattccttctgaaatgctgaaaatactcttacatagtatcttatttatctttggcttatctttgaaaggaggagcagatctaactccaattttacatgctagtggaggaactggcttagtaaagggttaagatctgtgcagatcctgaagaaaagtgctagttgtccctctaaccatctcacaggaccgaaacgattttatgaacgaaacaaattaatgaataatatattttactgagtattttactaaacaaaaaagtgactagatctgtgaagcatactcaagtaagttttccatctgtatttgagaaattcttcacatttatccaaatttgatttcactggttatatcaatgaagaatctcaaaatggagctgcaactggaagaatctgtcatgactgccagcctcccattttattcaccaggtcaagggttggcattcagtaggatctggcccaatgaagggtgccaagtgacctgtggtttgatctggcctgcgtagcctattcatggccatatccctgattgatgctgaaacccaactttgaatttgagagtgagccagataaacagtccagccatgtagttggagttgaaatgtggccctatgtacttgacctctgatattctgggctatcttgttcttggatctgaagttattcagcttttttctatacccaggctaggattatggacagttgggaattggtgtggcattgtttgatctaactgtagagacatttttctggtcttgaattagcgtatttccaggacgtcactccttaaatttttgatgtaggcctgaggcttggataacacaagtaccatccgcgttatctgttgtatagacattttaagaaagtacatttcaagcaggaaatgatttagtgggatggcaactttaatcttttgtgtcttgttactctggcccct

SEQ ID NO: 1882969 - DNA, 4001 bp, Homo sapiens; identical to SEQ ID NO: 586691

SEQ ID NO: 1882970 - DNA, 4001 bp, Homo sapiens; identical to SEQ ID NO: 586693

SEQ ID NO: 1882971 - DNA, 4001 bp, Homo sapiens
ccaacatggtgaaaccccatctctactaaaaacacaaaaattagcctggcctggtggcacatgcctgtaatctcagctattggggaggctgaggcagaagaatcgcttgaacctgggagatggaggttgcagtgagccatgatcatggcattgcactccagcccgggcaacaagaacaaaactccatctcaaaaaaaaaaaaaaaaagtggggggcgcctggcgcggtggctgactcctgtaatcccagcactttgggaggccgaggcgcgcggatcaggaggtcaggcgatcaagaccatcctcgctaacacggtgaaaccccgtctctaccaaaaatacaaaaaaaaaaaagaaagaaaagaaaatggagatacggagatgataaaaatcttccttctagtgtcatagtgaagattacggatgagaattgcagaaagctcatagcacatagtaggtgttcaagaaatgcgcgtgtttccctctctccagtgagaggtagaactgcatttgtgtcaccacaaagacatctaaaggcacgacaaactccatgtgaatgcctgggatttctttttaccagtggtcggctctgcaaagccagatcacatttactccaagttgcagttactcatccattgccatcctcctaaccttccaaccagtcctgtgcatctgggaactaccctgtgttataatgaaaacgataccactcatggcaacagagtcactgtcatcaactctcgcctaggtcaaaagccttttgaggagaagtggcaaggtctctatatttgcctttttaaaaatccctcttgtagcaacctggcgtgctaattttgaagtttacctggcactgagtttctctttggctctctcccctctccacagccccttccggtcctttattcacctctcacctgcatagcaagccctggaacctggaactccctcccagttctcacgcttgctggggaagataactgggtctaatggcgctattgacaaagcctggtgttgatgccgcttgacttcccgacccctgtgtggattctttcagcttcaaaaacgcccttggaagtggttttactgtaaatatttgaagtgtgcgtgtgggggaggggtgagacctggatgctcactccgtgcctcgctcactcacgggaagccctttcctctccacttcccaggaggccccggcagcacgagagacatagcctttccccgctcctgcccggggactggccgggggtcgcagcggcagggcttccgaaggatgccgggccccacgggtttttcagggccgaggtgtgtgggccttgactcccgcaagcccatgggcatccctcggcagcgaggaagagccttgtcaccgaggacccgctccactgagcaggcacgtgggcgacgtctgcaagccgacttgggttctgcaggccagagcgcccagatctaccgtctccgccttgactggggcaggggctcccagagaggattcgtggaggccaaactcacactcacatgcgcgtttacacccccacacccccgcacacacacctgaaaatgcggggccttcccatagcagataaggttcgacctgcagagctttggccacggggacaaaaccctcccctgctgcgccctggaggcccgagagcagggagggcttgggaaacaccacggtcttcagtgcgctgccgtcgcctcgcagagcggccaggtctgcgcagcgtgggcgctcaggagcgtggaaccaccgcgctccgcaaggcagacgtggacccactccagcgccgacaaggaggccggagaggacgcgcgcagctggctccagggaccaaccaagtccggaggggcccacgtgtctcgggagcgggtcttgggccgccgcggggctctccaggggcccgggggttgccagtgcccgccgtccggctccgcacccaggggagggcgggcagaggccccaggttgagcctcggagtatccactccccgttggtgtccccgcccgccagcgccgcgcaacagcccgggctgcttaggacctcgcggcgcgggggcggggcggcgggcggccgggacggtgacaggtgcgcccctcggccaatggcggagcccgcggccctccccgggcccccgctgcgcgcgccaatcggaagccgcgctgagcttcaagtgcgcggaggggcgcgggtccccaccacggcggcagcggcctccgcgcggtcgcctgagggctgcagcgcaaagaaccgggctcccgggcccggacgcggggaagcactcgcgtgggagtttgtgcgagcgcggcccggggcggggcccgcacggaggaggcgccgggaccatggtcaccctcggctgagtttccggcggcgactttgattattggcaaataaccaccataacaataccgagcccccgggcttgcaccgcacgcactgactccgcgagcccgcacacggccgcgtcgcccgccaccgggccctgagcgccagccccaaacgagccgatggaaaaatccaaaaatttccgcatcgacgccctgctggcggtggaccccccacgagccgcctctgcgcagagcgcgccgctggccttggtcacgtcgctcgccgccgccgcatctggcaccggaggtggcggcggcggcggcggggcgagcggcgggactagcggcagctgcagccccgcgtcctcggagccgccggctgcgcccgccgaccgcctgcgcgccgagagcccgtcgccgccgcgcctgctggccgcgcactgcgcgctgctgcccaagccgggcttcctgggcgcgggcggcggcggcggcggcacgggcggcgggcacggggggccccaccaccacgcgcatccgggcgcagcggccgctgccgccgccgccgccgccgccgccgccgctgggggcctggcgctggggctgcaccctgggggcgcgcagggcggcgcgggcctcccggcgcaggcggcgctctacggccacccggtctacggctactccgcggcggcggcggcggctgcgctggcgggccagcacccggcgctctcctactcgtacccgcaggtgcaaggcgcgcaccccgcgcaccccgccgaccccatcaagctgggcgccggcaccttccagctggaccagtggctgcgcgcgtccaccgcgggcatgatcctgcctaagatgcccgacttcaactgtgagtaccctgcggcccccgtggatgcgcgtggcgggagggcctcgcgcatcctccaccggcaccgcctgcccctctctgcgcttggctcccagcgagcgggggaagagctgcgaagccgcctcggctctgcccggggcctgcgaggactcgcccggacccccaggcatgagacgggcagcgaattattaaaatggccatgcgcaggccttgccttctcttcctctcttaacgggaaggggcagttggaggtgtgagactgagatctaatgattaacccgaaggctgcaggagaaggaagtcgccgggggaaggcgagccgagagcgccctgaattaggcaggcccgggaatgggggtcagggcttatcaccggggaaaggaacttgggccaggtcccccactggggcgttagagagacccgcggcccctccagggagagggagtgcttcaggagcagcaaacaagagaaatgggcttcggaggcccggggaggcaaggccaaggcccagggaacccccggctcttaccagggcgctgccctcctctggaagggcgttggatccggggtgcgatggccgaggcaggtggcctggcttgaaccagctatggggggactctcaacagtaggtgcctgccctggaatcctgggcgcccaacaaggtaacgaatgcccctccaaggtggggccgagggagcccctgttctccccaccccagagccgctgggcttcgggcagcttcctctccatccgggcgggacacctcgccagaggcctgggcccctcaggctttcctggcacac

SEQ ID NO: 1882972 - DNA, 4001 bp, Homo sapiens
gagccagatgacagtgaggctctgaaaaagtagggcaagggccaggccagggaagggggttcacattagggtcagattggcagtccttaggagacagagaagagtcagagtaatctccacccaagggatgtactgaatactgggggcaagagaagggatctgggttgagtggggtgaggagaagggagctggaggctgctgggtgggatgaaggtgtcttacattagtgatctccaagtcatggatgatggtgtcctcagggacatccagatcgtcagggtggacgacttgtagcagaaagatggacttgacaaaagtacgctcccgatacagcttcagagtgtcatccaggccataggtggccagcaccctcacggtgttgctctgcggggtgccataagcattgaggagctgccacccctgagcagcactctgcatatccctgcacccaaggacctacacaaggcacttgctcatgtctacatggtggaatggaaggagcttcacactgggagtgagaactagttaagttctatttctgcctccgaggctcacttgctggtgatcttgagcaagtcacactccctctcgcatgccctctctaagcttgtgtccacatctgtaaaatgaaaggactgaattaaactcttatatcctaacactctaaaggtcagcgaaactgggcagaattcttcaaaaggaaaaccctggggcaggtgggcaggaggtgaatcagtgggaggtcaccctgcggaaggcttgtggatttcagcaggtggcacaattggagcatttcctgggaaggctgagaggaatagaagtcctgggaatgatgactagctgcctgactgggggcaactacctctccagaaggaaaacctgcttgtgattaaatgcttttctctgctctctattttaccgtaatatccaggtcatgagggtcgcaggagcggaagggcctggaaaagtgcatggtggtgtagacagcatcttccgtcagccgcagcagctcagcatcctggctcccatcctccttcagagtgtcttcgtccaccaagtgctgatccttgggtccagtgaaggtcaagaagtaagaactaggagcttcaaatgtcatgctttggagcagtagctgttcctttagctcccctaggatactacagtagcagagcccaggtgttctttattatgtagtttttctccttgggcaaagcatggcatgaagaacatggcagagcacacttttatggataatggagtttcaccacctgtccttgctttacttctcccatttcaaatctcatgtccataaagtctaatattcctgcatccctaatacttgaagtctcacatattatctgaagtatgtatgacattcattctctcatgtggctcttcatgtaactatttctcagacagctttgaattttccctagtgacctgcatttagtgggctttagcaagtaagtggtgcaagactatctcacaatctaatggtttcattctctcagcagtcttagagacttgcagtctggaagacatagatttcaaactctacaatggaccatttctggagggacacaccagcattcagctggcattctgggagtgtgtttagatatcctcggggaatgtgaatcctttctggacagaaaccatcctcaacccaacaaagaccctcatccttggaagcaagtcaccctcacacttaccgagaaatagacattgccattaggcaagactcctccaacaaccagatcacttcccacgttggtgtagcgatttgtgacaccgaagcccacccagccagctgtacggacctggagctcaaaactgatgatttcagcctcaaggtcaaagtcccaacgcaggaaaatgacattagaaggatctaggaacctggaatagcgcaggcgagatgtggggccaaggcggttgctttgtaaggggactcccagggccaaaagtggaaaaagcctgaagagaaggtcatgggccatggctcctgggacctggagcatctcccttgcagatgaacattcgagagcttcagagttttatgtcctacctgggccaggcaccatgccatgggggagggccaggctggggcacttctgatctgattatcctccgggttcagagcgatgccccttacataactctggaggtgagaggtgcccagagaggatacagggcaggttgctttcactctgaagcaggggcctggcagaaaattcttaggattgaatcatttagactttccaccctgaccccatgccagcgtcctgccagtggggaccctgcagaatcaagaaagtttagtttctttttctccccctcccttcctgcccacctcttccatcttctatcctggatgtctttacaggacattctgcctctggactatgcccccaccccactttttgtgggcatttcccattttgtctatgtatagaacttcggtactagcaaggatgtgggactgcttgtaaacctagtctttcaatttcccagtgcagtgcaggaaggagggaagtagctggcagggaccggagggaaggctgcaatttccatctgctagaggaggctttgctactaatccctagaaggacactgagaggagggatatcagcttctcagatggttgagtcgggcagctttggttttctgcacactcctagggaggagcaggaagagagaggaggtgaggggaagaagatgagaaataaacatgagtttgcctttgggatgctttgtgctttcccttccggccatcaattacctttcagagaaattaatttaatggctgcatggcaggctgagcttgcccgattgagcacattagtattatgcaaacaatggaagcaacacagaaggaaggttagaatattagaacaccagaatagaaaagaactttagagccacttagttttccaaaaatttctatctccttaatttctagatgatgaaatgggagctccaaagggtaacaagagtggtgcttgatgccccgttgagtcaatggtgggtcatggtccctgaccataatttccttaggtcacagacaccctacaggtaccagacccctgccatgcatttccacatggcttgtcctggtggaagaatttagtgacatttgttggctgcttcttagggaagaaaccaaagtctgactctaactccacagtattttccccctggtgactgacacagctgacctagagctagaagtcacctcatctgacccctggttgctggctctccacttgacaatggagaggacatggaccctgagggcctctcccacacagactgggcctcacctctccacagaggaattcagctcaggagtagatgtacagatgccggcacgatctgcttacagcttctcattgcaggcatagtctttttttttttttttttttggctactgagctcatcaaagctggtgaggacccagctaaggttgtttgctgctgctgtgagcacttgagtagtaattggggtgtggtgagggagaaaacaaatgcctcaagggggcagccacagcccctaactctaggcctgacagagaaggcagggagctcggcagccatctggaagcaagaggcttatcttggcccaggaccagagctgagccaagagaagaggagaggtcggagcctgggaggcactgaccttgaggagcagtaacaccagagagagagagataacaggtgcgtggagacattctgatcccaatctcacttaaggattaagggagggggcagtagggagacaggatagccagtcttgtaaattgagacgggcccaggatcccttatcctgcaatctgtcctgctggacagagcactgtcctcagcacagaggcaaggtcctcaataaagagctgggagcagtgactgcagactcagagggtctcttctcctggatccttatctggcttccaccccaggaagccaggccattgctacacctgtgtgaggctctctagggagatg

SEQ ID NO: 1882973 - DNA, 4001 bp, Homo sapiens
aaatgagctgggcgggcgctgtgtacctgtaatctcagccatttgggaggctgaggtgggaggattgcttgaggccaggagtttgagaccagcctgggcaacatagcaagaccctgtctcttcaaaaacaaaaattaaaaattagctgggcatggtggcacacacctatagtctgagctattcgggaggctgaggtggaaggatcgcttgagcccggagttagaggctgcagtgagctatgattgcatcactgcactctagcctgggcaacagagtgagaccctgtgtcaaaaaaaaattttttttttccaaaataaaaaagcgaggccaggtgcaatgactcacatctataatcccagcagcactttgggaggccaaggcgggtggatcacctgaggtcaggagtttgagaccagcctggccagcatggtaaaaccctgtctctactaaaaatacaaaaattagccaggtagggtggcagatgcatgtaatcccagatactcaggaggctgaggcaggagaataacttgaacccgggaggcggaggttgcagtgagctgagattgtgcccctgcactccagcctgggtgacagagtgagactccgtctcaaaaaaaaaaaaaaaaaaaaaagtgaattaatgtaaagaaaggtgagtcatggaacaggcggggaaagccaggcggcaccggcaacgcctggcctttgagacatgctcacctagattcctctccaatcccaggtcctccagggccggcctgtgtgtggatacatttggggaagcagaacttactattcctccctttccatctgtggtgggtgctgattgttagctagttctttcccatgggggagtgtaaagaaacttccttgtgagctatggaggactcagggccacccgagatgactcagagcctgtccccaccctctgcgggtcctcctttctcctgaacatagctgcctggtgcctgactccctcttctggtgcccagagacatgtccctcttaatggtggccccagcacaggcatgattggacccatgtgcagtgccatggctggtggcctcctgccttggttgagggtggcctggctgcttgggacctctgtgggtcccaccacctggctgactcacataccatactcattgctgtttcggaagaacaggaaatgagaggtcggaccttatcatttcctgaggttcccccagctctaagccaagaactcactggagttgaagatgcctcaacatgcccaggggcaaggagtcaataatcaagctcactttttttggtgggggtggtatggcgctctccatcttaagtggattttattttgagggatgagatggaaggcagaaagacacttgctctcctttcctttcctctctcccttcctttcctctctccctttcatctctcccttcctttcctctctcccttcctttcctctctgtcttcctttcctctctcccttcctttcctctctgtcttcctttcctctctcccttcctttcctctctcccttcctttcctctctttcttactttcctctctctcttcctttcttttcttttgaaatggggtctcactgtgttgcccaggctggtctcaaactcctggcctcaagcaatcctcctgcctcagcctcccaaagggctgggattacaggtgtgagccactgtgcccgccccatgatttttcttagggaggaattagtccctgtctggacagaggctagatttttgtctctaaggtgccctcattttcaaactgttcttgcagcctctcactcccgaggggcatctctgtccaggatcaagccctcccccagcccataggcagcagcagtcccccctggcctggcccctcggccctcaccttgttgtacagcttccaccagccccagaaacggagctgcaggaacttgtgcacgttctgctgaatgactttcaggcccattctgcgaaaagaatccagggttgagtgggttacaatgaaggtgttaggacctggcttccctggggaaggggtggggcctgggaatagaagccagcagatctaccttgttcagacaccaaagtgccttctcgagacccagcattgcccatgtggtctgcggcagggagactcacgttggggtcagagcttagcagcacgataagggagctgaggtgaaacctgatggaaccaggtccctcccagatggcacaaggctgagacataccagtcattgactcctgcattttccctcctccaccagaaatcacccattagtctccaaatcccatggatctgcaaagttgctggaatctgcccgtttcttgttccctgcagcttcactcaactgccatttattgaggacctcctgtgcaccaaggccctgggctgaatcaggccaagatccctcacatcagcccctaactggtatccctgccttcagtccagggctgcaggtggcctgctgatgggaacaggaattcattactaattctatgaccacaaagaaatagagtgaatcacaggtcatctgggatggacctaccttttttttttttgagacagggtctcactctgttgcccaggctagagtgcaatggtgcaattatggctcactggaactttgtactccctggctcaagcaatcctcctgcctcagcctccaaagtagctgggactacaggcatgcaccaccacctgcgaattttttgtttctgtttttttttgtagagatggggtctccctatctcctgttgcccaggctggtctcaaactcctgagctcaagtgatctcccaccttggcttctcaaagtgctgggattacaggtatgggctaccacacctggccagacccagccctttaaaaattaccaggttagggagatggctgaaaaacatggttccaagggcagggatgtggagtgagaattgctgagttctaatcctggctctgcatgaacctgccccagttccttaacctctcagacctcagtttccacatctgtaaagtgggggtgctggccctaccatgcccctctcatagcatcattatgtgaatcaagtaagaggaaggctgtgacatgacttgaaactataaagagagggtttatattagttgtttcctgttaggggttaagctgtgtcctccgaaaggatacgttgaagtcctaacacccaatacctaggaagggaaccttgtttgggaatagggtctcagcaaatgtaactagttaagatgaggtggtcatactggagtaaggtggaccctaattcaatgactggtgtccatataaaaagagggaagatgggctgggcgcagtggctcacgcctgtaatcctaacactttgagaagttgaggcaggtggattgcttgagcccaggagtttgaaatgagcctaggcaacatagggagaccttgtctctaccaaaaaaaaaattagccaggtgtggtacagtgcacctgtagtcctagctactcaggaggctgaggtgggagtatcactcaagcccaagaggttgaggctgcagtgagctatgatcgcaccactgtactccagcctgggctacagagcaagaccccatcccccactcaaaaataaaatttaaggcgatggatatcccagttatcctgattttattatatgaatgtatcaagttatcacataaaacctaaaatatgcatagctattaggtatcagtaaaaaaatttttaaaaattcctgttgtttgaagccacccagtgtgtgaacttggttgcggcagctctgagagacagggttctttttatttttttgagacggagttttgcttctgtcgcccaggctggagtgcaatggcacgatctcagctcactgcaacctccgcctcccggattcaagcgattctcctgcctcaacctccccagtagctgggattataggtgcccaccaccacgcccagctaatttttgtattttttgtagagatggggtttcaccatgttggccaggctggtcttgaactc

SEQ ID NO: 1882974 - DNA, 4001 bp, Homo sapiens; identical to SEQ ID NO: 586721

SEQ ID NO: 1882975 - DNA, 4001 bp, Homo sapiens
gatgcagtgagtggagattgtgccattgcactccagtctgggtgacagagtaagactccatctcataaaaaaaaaaaaaaaagactgatccagaatcaatggcaaaaccctgtctctaccaaaaacgagctgggcgtggtggcgcgcacctgtattcccagctactcaggaggctgaggcaggagaatctcttgaacccaggaggcagaggttgcaatgagccgagattgcaccactgcactccagtctggtgacagagtgagattccgtgtccaaaaaaagaaaaagaaaaagaaaaaagactgatccagattaaagaaggttaaaggctatgacattgatccttgactggatcctagacctgaaaaaagttttcactgcagaggacaagcaggataatcggggaaacctcagtaaagtctgtgggtggataatggtgttttgtccatgttaatttcctgattttgacacgtgtgttgtgattatgtaagagaatgccttgattttaagaaatgcccaacaactagtatttagaggtaaagaaacacgtcttcaactcactctcaaataattcagaaaatatccccagaaagagaggtgtggatgaaggtgagtgaaagactattggagtgactggtaccgttttgacacccagtagcctttctgtaaatttgaaatttcaaaactgaaagttacaaagaaaaggagaaaagtgactaggcacggtagctcacgcttgtaatcctagcactgtgggaggctgagaccagagggttgcttaagccgaggagttcaagattagcctggacaacatagtgaaacctcatctccacaaaaattttaaaaactagccaggcatggtggtgtgcgcctgtagccccagctactcaaggggctgaggcaggaggatcacttgggcctgggaggtcgaggctgcagtgaactatgatcgcaccactgcactccagacctcatttcaaaaaaacaggccaggcacggtggctcatgcctgtaatcccagcactttgggaggcccaggtgggtggatcacttgaggtcaggagtttgagaccagtctggccaacatggtgaaaccctgtctctactaaaaatacaaaaattagccaggcgtggtggtgggcacctgtaatcccaactactctggaggctgaggcaggagaaccagttgaacctggaaggcggaggttgcagtgagctgagatcgtgccactgcactctggcctgggcaacagatcaagactctgtctcaaaaaacaaaaaaataacaaaaaagagaaaggtcttggcacataggactaaatgttccatacaagcttcaatttcctaaatgtagttcctccctggccttcctatgggattaggggacccagtggacttgtgtgtctgagcaggcatttgtccagcctccttggggacagatgggaggactctattggcccctgtcatggtgtcaccctactggagaggataagactctaactgacactacaggcagctggggagagagagagctttagtttccaggcctccctcttgggagggccactctctgatagctgggctagtcagggaaggcttcctggaggagtgggcctcggacctgagagagcgctgggctgcctggccatggcaggggagcagaaagaggactcctggctaaggctgagggcctggctggggacacaggcggggacagtaaagggctggggcccagggcgggtccaagggaactgtcttcccagggatcagaggggtagatccaggctcaaagaccagggaccaggtgcccaagaccctgccccgttagtcctcactggagctggttggccctgggactgcaagggtggccgtgctgtccctcccgtattccccccacgggatgccctccaccagctactcacatagtgctggctgggtacgaagcgcttctcaaagcccagcagggcgatgtgacggatgaaggtgtcccccatgactgggtggcctccagtgctccctggcacttccaggctgcgccttaaatgcactggaaagaggaagtcgcttttgtcgcggtcgggacagggggcagggagggtacagaaagggctttgcttcttctttcagtttctggggactcttcaggcttgcagggtgtaaacatgggcagactcatgttcacacacacctgcagggacaaggaaaagggtttacacttgtccttcccgtcgcctgcacgggccccacgggttttgggggtgaatcaagctgctcctgcctcagggcctttgcatttgctgcgtccccttgaccatctttccccccttgaccatattcctggtcttgaccatgttccccccattcaccatcttccctccataactctcctccatttctctgctcaaatgtcacctcttccgagaagccttccttgataacttcacattgcatagcaaacctcatacctttctcagcctcttcctgcctcctttttctgcagagcacttatcactgatgcatcgcaaattgcatttaatttttctttattattattgctattgttatttgagacagggtcttgctttgttatccaggcttaagcgcagtggtgggatcacagttcactgcagcctccaactcctgggctccagcgatcctcctgcctcagcctctggagtagctgggactacgggtgtgtgccaccatgcccggttaaattttttttaatttttttgtacagacagggtcctgctatgttgcccaggatggtctcaaactactggcctctagtgatcctcctgcctctgcctcccactttttttttttttgagatggagtctcgctcttgtttcccaggctggagtgcaatggcgcgatctcggctcaccgcaacctctgcctcctgggttcaagcaattctcttgcgttagtctcctgagtagctgggattacaggcatgtgccaccacacctggctaatttttttttttttttttaattagagactgggtttctccatgttggccaggctggtcttgaactcctgacctcaggtaattcactcgcctcggcctcccaaagtgctgggattcaggcatgagccaccgtgcctggcctgacttaatttttttagtctccccttaccacaatgtgtgtcccaggaaagctagggcatgaccgggttatcaggggctctagccccagcccctccagctagtgcctggcacacagaggccataaatatttggatcgtgactgcaacattcactgagtgaatgaatgagtgagtgaatgaatgaatgagtcaatgaatgagtgaatgaatgaatgaatgagtgaatgaacgcgggcatgggagtgtgcatgcaagcgttagatgctcatccttgggtgtgtgtggatgagggccagtgacagctgggacgaaaatggcacagactttgagtgagacttgagttccaatcctcaagtaagcaaatggttcattgaattgttccttagggctgactcagttttctccagagtgatattaagactgtcagctttgccaggaaggggatttgggacaaagaggtgaggagggggcagcatgcccagggacaggctgaggcctctctctcccactccccctagagcctgggaggcccagagcttttggagctcattcaaggtcatgagttcatgagtggtgggcctcagccccaggcagcctgctgcagcctgtgcctcccagcaggccagggctgcaccaactcacccttgcctgagtccagggtcagctcgtggtccggacctgatctcctgggggtgagggttgaggtctggcagatgaaagccaagacatgctgggcgttaatttatttgtttgaagcgaagtttcgctcttgttgcccaggctggagtgcagtggcacaatctcggctcactgcaacctctgccttccaggttcaagcgattctcctgcctcagcttcccaagtagctgggattataggtgtgcgcc

SEQ ID NO: 1882976 - DNA, 4001 bp, Homo sapiens
taagactccatctcataaaaaaaaaaaaaaagactgatccagaatcaatatggcaaaaccctgtctctaccaaaaacgagctgggcgtggtggcgcgcacctgtattcccagctactcaggaggctgaggcaggagaatctcttgaacccaggaggcagaggttgcaatgagccgagattgcaccactgcactccagtctggcgacagagtgagattccgtgtccaaaaaaagaaaaagaaaaagaaaaaagactgatccagattaaagaaggttaaaggctatgacattgatccttgactggatcctagacctgaaaaaagttttcactgcagaggacaagcaggataatcggggaaacctcagtaaagtctgtgggtggataatggtgttttgtccatgttaatttcctgattttgacacgtgtgttgtgattatgtaagagaatgccttgattttaagaaatgcccaacaactagtatttagaggtaaagaaacacgtcttcaactcactctcaaataattcagaaaatatccccagaaagagaggtgtggatgaaggtgagtgaaagactattggagtgactggtaccgttttgacacccagtagcctttctgtaaatttgaaatttcaaaactgaaagttacaaagaaaaggagaaaagtgactaggcacggtagctcacgcttgtaatcctagcactgtgggaggctgagaccagagggttgcttaagccgaggagttcaagattagcctggacaacatagtgaaacctcatctccacaaaaattttaaaaactagccaggcatggtggtgtgcgcctgtagccccagctactcaaggggctgaggcaggaggatcacttgggcctgggaggttgaggctgcagtgaactatgatcgcaccactgcactccagacctcatttcaaaaaaacaggccaggcacggtggctcatgcctgtaatcccagcactttgggaggcccaggtgggtggatcacttgaggtcaggagtttgagaccagtctggccaacatggtgaaaccctgtctctactaaaaatacaaaaattagccaggcgtggtggtgggcacctgtaatcccaactactctggaggctgaggcaggagaaccagttgaacctggaaggcggaggttgcagtgagctgagatcgtgccactgcactctggcctgggcaacagatcaagactctgtctcaaaaaacaaaaaaataacaaaaaagagaaaggtcttggcacataggactaaatgttccatacaagcttcaatttcctaaatgtagttcctccctggccttcctatgggattaggggacccagtggacttgtgtgtctgagcaggcatttgtccagcctccttggggacagatgggaggactctattggcccctgtcatggtgtcaccctactggagaggataagactctaactgacactacaggcagctggggagagagagagctttagtttccaggcctccctcttgggagggccactctctgatagctgggctagtcagggaaggcttcctggaggagtgggcctcggacctgagagagcgctgggctgcctggccatggcaggggagcagaaagaggactcctggctaaggctgagggcctggctggggacacaggcggggacagtaaagggctggggcccagggcgggtccaagggaactgtcttcccagggatcagaggggtagatccaggctcaaagaccagggaccaggtgcccaagaccctgccccgttagtcctcactggagctggttggccctgggactgcaagggtggccgtgctgtccctcccgtattccccccacgggatgccctccaccagctactcacatagtgctggctgggtacgaagcgcttctcaaagcccagcagggcgatgtgacggatgaaggtgtcccccatgactgggtggcctccagtgctccctggcacttccaggctgcgccttaaatgcactggaaagaggaagtcgcttttgtcgcggtcgggacagggggcagggagggtacagaaagggctttgcttcttctttcagtttctggggactcttcaggcttgcagggtgtaaacatgggcagactcatgttcacacacacctgcagggacaaggaaaagggtttacacttgtccttcccgtcgcctgcacgggccccacgggttttgggggtgaatcaagctgctcctgcctcagggcctttgcatttgctgcgtccccttgaccatctttccccccttgaccatattcctggtcttgaccatgttccccccattcaccatcttccctccataactctcctccatttctctgctcaaatgtcacctcttccgagaagccttccttgataacttcacattgcatagcaaacctcatacctttctcagcctcttcctgcctcctttttctgcagagcacttatcactgatgcatcgcaaattgcatttaatttttctttattattattgctattgttatttgagacagggtcttgctttgttatccaggcttaagcgcagtggtgggatcacagttcactgcagcctccaactcctgggctccagcgatcctcctgcctcagcctctggagtagctgggactacgggtgtgtgccaccatgcccggttaaattttttttaatttttttgtacagacagggtcctgctatgttgcccaggatggtctcaaactactggcctctagtgatcctcctgcctctgcctcccactttttttttttttgagatggagtctcgctcttgtttcccaggctggagtgcaatggcgcgatctcggctcaccgcaacctctgcctcctgggttcaagcaattctcttgcgttagtctcctgagtagctgggattacaggcatgtgccaccacacctggctaatttttttttttttttaattagagactgggtttctccatgttggccaggctggtcttgaactcctgacctcaggtaattcactcgcctcggcctcccaaagtgctgggattcaggcatgagccaccgtgcctggcctgacttaatttttttagtctccccttaccacaatgtgtgtcccaggaaagctagggcatgaccgggttatcaggggctctagccccagcccctccatctagtgcctggcacacagaggccataaatatttggatcgtgactgcaacattcactgagtgaatgaatgagtgagtgaatgaatgaatgagtcaatgaatgagtgaatgaatgaatgaatgagtgaatgaacgcgggcatgggagtgtgcatgcaagcgttagatgctcatccttgggtgtgtgtggatgagggccagtgacagctgggacgaaaatggcacagactttgagtgagacttgagttccaatcctcaagtaagcaaatggttcattgaattgttccttagggctgactcagttttctccagagtgatattaagactgtcagctttgccaggaaggggatttgggacaaagaggtgaggagggggcagcatgcccagggacaggctgaggcctctctctcccactccccctagagcctgggaggcccagagcttttggagctcattcaaggtcatgagttcatgagtggtgggcctcagccccaggcagcctgctgcagcctgtgcctcccagcaggccagggctgcaccaactcacccttgcctgagtccagggtcagctcgtggtccggacctgatctcctgggggtgagggttgaggtctggcagatgaaagccaagacatgctgggcgttaatttatttgtttgaagcgaagtttcgctcttgttgcccaggctggagtgcagtggcacaatctcggctcactgcaacctctgccttccaggttcaagcgattctcctgcctcagcttcccaagtagctgggattacaggtgtgcgccaccacgcctggctaattttgtatttttagtagagaaggggtatcaccctgt

SEQ ID NO: 1882977 - DNA, 4001 bp, Homo sapiens; identical to SEQ ID NO: 586724

SEQ ID NO: 1882978 - DNA, 4001 bp, Homo sapiens; identical to SEQ ID NO: 586726

SEQ ID NO: 1882979 - DNA, 4001 bp, Homo sapiens
tggaggaggacgaataaatttattttgttttcctgtttttctcatttcttgacccgctatactccctggtcagatgggtactgctggtagttcccagactttgatattcaggttagaaaatgccatcaagtcctactgatctgtggcatgtgcacacacacacacacacacacacactctttatgtataaatatcatgcaggtgctacctgccagcataatatacacttagggcaaatttcattgtacttcaaattatcttcttggtaatttttaatagattttgctaactccttggtaacttttattacaaggtaaaacaaaactgatgaaagtggctgacataccggggacgtgagcagaacggcttggccacttccttaacatggccccgggttcacccgctagtccggaactacagtttctctgccacagtgtctgcgcctgtccacttgcaggcattaattttggtgaatatgaagagagttaatataaccagtgtgtcctcttctccatggcagcgcccagggacagacctgcagtgaccaccacctgcccctctctgccaggcccaaccacgggctttcttctcagagctgagctgatgtggccgtctggctgactaggaggggcccggggtcagcctggagggggggtatttgtaaagcttaatttctctttttttttttttttaggtaaaatcacagtttatccctgcaccttcatagattatgttgctcgtcttagagaccaccaggcagcgaatggagtcaagcccttgcgctctccgagagtcctgccctgactacaggactagtttctcccattctttccttctccaggataaagttcctcattcctgtcttttagtgagcagtatggtttaggtggacagagattcctttggtgcagtttttttcaaggaggtgatgttattttttccttcccaggtcttgaggggacattcaaagcaggcagagaggggttgggatggctccagatggctgggagggagaacaccagctggtcacgcagcccctcgtgccagtgcgcatcaggtacagtgtggaggcgggaaagggacaaaaagacggcagtctcttccctgagcctatgccaacccagccttaaagccagtggatcgaatcaagccatttgtggcattatctattgctgcgtacgaacttagcctggcacaatgcctgtaatcccagctactcgggaagttgaggcaggagaatcgcttgagcctgggaggcagaggttgcagtgagccgagatggtgtcactgcactccagcctgggtgacagagcaaggccttgtctcaaaaagaaaaaaaaaaaaaaaaaagaattatacaccactcagttttaggaggggcagaacacggggagagccctacaggatcagaggggcaaccaacaagctgtttcagaaggcatggggcagctcagcaaccataagttatgcgtgggctttgctctcgggagagaggtttcctgcagccgaaggactcacagctaatctgggtcaggagcggctgccggctcccccactcctggagatgagcgactctgtgacgtcacgggaggcgcgggcggagcgccggggaagcgaagtaggcaggggcgaggcggctggggaccgcggggcggacgggagcgagtatgtccgctctgactcggctggcgtctttcgctcgcgttggaggccgccttttcagaagcggctgcgcacggactgctggagatggtggagtccgtcagtgagtgtggggctggggatgggggcctcgccggcctgtagcggacagcgcgggtccctgggacgctctcaccttgactggggcgcctgaagaggccgcgtcccgaggcatgctgggacctgtagtccgcgtgtctcctgaagccgcgactcgaggagagggaccccgctggccggagggagagggagagacttcgctgggcagatgggacaccgtgtgcagggccgtcatggtagtaggggccgcctgccctcgggagacgcacgcgtgaatgcggagcgggctgagccagtcggcgccggcgcgggcggtccaggcggaggaagcagcgtgcgcggcgggtgtggacgctcctggagcgaggcggggggcggcggcggtgaggcctagggagggcgcggtccagggtcccggtgcctggctgcggaatttagggtagagtctgttcggcagcctttaatcggagacgtcacgtggccgctttttaatgctgaaaaatcactctggctgcagggagtggaggctgtcgcccagagagagcgccgtcgggtgagaggagcagaaagccggaagccaacgctggggcagccgtggcgtttaggagagtgacaggcagagccgcccgcgaggtggcccgagacgcagaccggagggcggagggctgggggtgcgaggtagggagcgggtgcgaggtagggagcagctgccgaagccgagttagtggtgtgcagagattccgtaagagcaggactggaaaagagtcatggatgattccaggtcccttagatcatcagctacactttaccaagaggcagtgtggggtcgtgattccaagcgggattctggccgcacagtggctgggttcaaatcccacctctgccacactccagctgtgggaccttggaaaagtttcttattctcttaatgcctcagtttcctcacccatttggcgtccatttgcaaggaactaaatgagttactgttatctaaagcgtgtttgtgtgttttaggagatggggtctaactctgtcaggcaggctggagtgcagtggcgcgatcctagctcactgcagcctctaactcctgggctcaagtgattctccagcctcggcctcccaaagtgttgggaatacaggcgagccactgcgcttggtctcactaaagtgtttaaaacaattgctggtgcctgctaaggaccgtacaagtattctttaactgttgttgttattaaggaactgaggcccaggaaatgaaaggagtgacttgcctgaagtcccacatggatgaagaatctggagctggggcaggtgtggggtgggcagaaggcaaagccctgtgtgacttgggcaaagacagtgatggagagccatgagcgacagcccttggtcctgcatgaggagatgggggaatgccgatcttccctgaggtgctggcttgttcgtaacacacacttgtttcagagtgtgtgataattaagtgcataaatgtttatggagcatcttctatatggctgctcctttctaggtgctgaggatatagcagaatacgagagagaatgaagtgtacattctggagaggagagaccagtagaaaagaaagaccttttttgagtactgttaagggttatgaagagaatacagctggggattaatatggagaatgcgtggtgtgggagtagaagggatattgtatttggggatggcgtgggaatgcctgggagtgtgatttgaagcgggacctgagggatgagaagtcagccatgcagagacctcaagggaagagcccggtggacataagagggcagaggaggcatcaggtggagaggccagagcccgcagggttggcaggaggccaggctggagtggagcgtaggggaagagtgggagagaccaggtcacagggacaagtgtgggggccggattagagggggctttggaggactcggaattttattctaagaatcacagggagccattggagttttaaagcaggaaagtaatgtggtctgatttattttttaaaaatgtaactttgtccaggcgcggtggctcacacctgtaatcccagcactttgagaggctgaggcgggcggatcacctgaggtcaggagttcgagaccagcctggccaacacggtgaaaccccatctctactaaaaacacaaaaattagctgggcatggtagtgtgcgcctgtaatcccagctactggggaggctgaggcaggagaattgcttga

SEQ ID NO: 1882980 - DNA, 4001 bp, Homo sapiens
tgttcccatctggcaccttcaaaactctcctattcaagccagcagggagcatttatgcaacctacatggcagtttaataattccccaagaatgccaggagattaagcaatgtcacaaccgatctggatccaccggcacttgagaataatggaaagagcaggggtctaaggtctaggacaggggtcaaccaaatttctctgtaaaggcccagatattaaatattttaggctttgcaggtcctatgatctctgtgtcaactacccaactctggcattgtaacatgaaagcagccatgagcaaacaggcatggctgtgtaactaaaacttcttttatggcacagatatttgaatttcatataattttcatgtgcctgggcatatatttcttttttaaaaaatattttctaaccagtaaaatatgtaaaagttattcttagtttgaaagctgcacaaaaatggaggacaaagtctagcgacctgaattcaaatcctctctctgccatttgttatttctgtggctttcgacatattacttacattcactaagcttcatttctctcttgagaaaatgagcagagcaggtgccatgcattcagggcctcccttgtggctggcactgagccacatgctttatatgctttactgaattaaatcctacaataaccacaaaaggctgaaattatatgattgccttcttcagatagttacgatgattaagaaattatgtctataattgtgcctgagctggcctccatagttcattgagtttgatgcttcctgttgtacgcaaaaattgccatgttggttcgatgagagcatgcctgctttttctactacctgtggtgttttgagtacctatatttgtattgcacttacagtgaaaattatctaattatattattctatttaattacaattgcatcaagctccaataaacaatccaaatttcactgaactgaaagttgagtgcacactttgaatagtcactccttctgttaggttggtgcaaaagtaattgccattacttttagtagcaaaaacagcaattactttcgcaccaacctaatatatatgtgcacagtaggcagtttggctcaggtacacttattcaaaacattgcattaagtaagataatacatgttaaatacctagcacacagcctgggatgcaggtgtcggccagtgtttgttccccacttccttagtgacaaagattaggcttagctactttttgggaaaggtgagtgccaccagaaagatgaggccaaggccttatcagacacactggaacacagccttcccaaggaataaatccagaatattttgtgtatgagttctggctctgaagcccagcctgttcttacactgaccccccagtttctgccttgatcagccacccactaggctgggcattgcttcctctcactctgctatctagtgacccaacctcggcccaaccctccagctttcttctggccatgcgactgttctgctagtctgctccgcatatctgctcctaccttccgatgcctcctctgagctttggctccactccccactcagcacaaacaacttactttgccccagtatggggtacaacagctcagactcttctagaggtctaatcctggacacctcgtttgctttataagcacaatctggaaagaagagtttcattgctcagagcccctcaggaagcagaagaggagagtggtgaagagagcattcatcctctggaatgaccataactggtgtttcaatcccagctcccctccatactaatacttgggtgagttactcaccaggtctatgcttcagtttcttcatctgtaaaatggaggttgtaaaaatatcatctaccccatagggttatggtgatgattaaattagttcttctatagaaagtgcctgcagcagtggttagcatgtggtaggcactttgtatgtgttatctgttatgtctgtttgctcttactaacatctatatttctgagtcctagacctccccagagagtgtgaagttcatggtgtttcatgggaacagatgtaagcccacttgctgaatctctctctgagctaataattaacaaatacattgcacagtagcttaccaggaaagcctatactggtctgaacaagaagaaacttgctgaacaattctaaagctcacttctcaatataacagcagcccttgctcaacatgttgcccatatcttcagtaccgtgcagaggtcacagccatcatattctgccagctcttcccctatgggttgagcaaccatatgtgtcttcccaaccaggacatttttcatttttagcttcttgttttgacataatttcaggtttacagaaaatcttcaagagtagtacaaatacccccatgtaccctgtacacatattcctgaaatgttaatatttttcatatttgctttatcatttcctctatcagtctatctataatacctacctatctacctatccatccatctaaaaatgtcccaggtaatcagcaaacctgctttaaatgtcaccaattatcccaagaacatcctttttagcacaaaaaaccccgaatcatgtattgtattcagttgccatgtacgtttagtgttctttaacttagaacagttccttggtctttctttgtatcttatgacatcaacatttttaaatagcataggttagatattttgtggagtttctctcactttgggtttgtgtgatgtttccttctgaatagattaaggttatgtgcttttgagagttatacaccaggaatgatgctatgttcctcttagtatatagtatcagcagacacagtatatcaatttgtcccattactagtgatgttattgtcagatttctccactgtaaagatactatttttccttttgcaactgacaagtattttaagagtacatagccatcctgatactccttaaactttcactcacagcacttaccatacagtgtagattcctgtctgaatcaatgctataaaggtttccaaatgatgattttctaatttcattatttcttctatacttattagcagtctctctactttaaggaagaaatttcccttctctcccatttttaaatttacatcataggttcttcttttattctgtgggttataatttgttgccatagttatttctttttatgcctagattgctgactggggtcagcaagagccctacaatttggtgcgtgtttctgttgacatgtttctcagcatttttgggcatgtcctcacttgccagcacaacatgatgttccaggcttatcttgtccttttcccagccccaggccaggaatcagccatctccaatgagccaagtaaaaccatggcatatttaagagaaagggccacaggcataatcatggcgggtataaactgaaactgacctagaaatgctgggtcatattcccaatctaccactagatgtccttccacacctcaatagttcttcacaggaagcagtcctggggcatttggaaatggtgggatatttggagttatcacaaagactggggcagcaggggttacttctggcatttagtaagcacagcccaggcatgccaaatttcctgcacaggaccatctatcctaacacagaattgccccataagtagcaatcctgttaataaatagtggcccaatccctgaactaatctatcttgtgttctagtctctcaaggattggcttagttcttttcaccttatccgccatcagttaatttaatcaccactgtttccatagtgagaatctaatatattagactgatcaagtgtgttaatcaaatatattggattagctggcatgcattatagcaaataaaatagccagtcttcattttagatctagtttaaagaaagcctctacttcttatgtgtcaatttttgcagaaaacattattctagcaagttggcaaggagtctaggacttatgttaagacacaccatctcatccccagttcttgcagctctctgtctag

SEQ ID NO: 1882981 - DNA, 4001 bp, Homo sapiens
aagaccagcctggcagcatggtgaaaccctgtctctataaaatatacaaaaattagccgggcatagtggcgcacactggtagttccagctattcaggtggctgaggtgggaggtcaaggctgcagtgaactatgatcctgacactgtactccagcctgggtgagagagcaaaaccctgtgtccaaaaaaaaatggggacacacagcaacgcagatgtctctttgatgcttgatcactaagctccaagaagtagtctgatttggcaataataccctagttattaggtgttcgccatgctaacagaaaagctggtactggttctcactcatctgattggccctaagtaaaaagaggggtgacttaggcccaaatccctaaagcataagacatttcttaacttttcccctgtgtacatggttgataaccataaatatttgaattattggtcaattaaatactggggttgcaattgacataaccattaactttccatggtgagtgtaaccttaccttgcacagtatttcactttctggggaagaagtttccctgttctagcaaatagtcaacttagggttgaactcactaataacatttttctcattttttctttactgcaggcatacaaattgcaaaaatagtccctgggcaattatataagaaagaatggagatgctccaaaaaagtccctgagctttcctggagcacttggaggggttcactcagcaagaatgggaaaaggcagtaagaagcagagattttaacattgccattaattaagttatattctaaagatcattaaaagcaattagtgctttgtcggctactgcaaactgaagctctgattttttaaaataattctcaagagggaagatacacagttttaaaataaagcattgctttgtcccaaagtttttagtcaagatgcttaatgtagtcaaaatatcaagtaatattaaagaagagtagtttttatatttatcaaagagtacctaggatagaaaacttgctgacacttttgaatccttaacactttgttttcctgttaggcacagattaaatcatgtaagaattggtgtgatatagtataaaaaataggcaaaaaagaggagaaaggaaattagtctctactaattttccagcaccgtacttggcactttaaatattgtcacatctgatactcaaaaagttcgagaggtctgtattgttaacaccattttgtagaacctcaactgaggctcagtgtagtagttatctattactgcattacaaatcaccacaaacctagtgacttaaatcaagatacatttgttatctcacagtttctgtgggtcaagaatttggccgtggcttaaccgggtcctctgctcatgcaaggcagccattcaagttgtttatccagggcaggggtcatcagaggctggactgggagaggctcttttccaagctccctcaggtccttagcagaattcattttcttgcagctgtgggattcatggcaccttgcttcttcaaagccagcaatgcatagagacaccaacaagacaggcactacattctatgtaatcagtcccatcccctttgccacattgcattgattagaggcaagtcacctgctcttcccacactaaaggggtgaggatcaacaaagccatgaatgccagaatcagggatcatagatgtcatttaaaagactgtctaaagtcaggactgtacaacagacaagtagaggagacccaagtttttctgactctaaggcctgtttttggattctaatcacagctctccctcaaaccatttgggctaccttgaggaaactgcataactttaccaggtcttagcctcctcacttaagaaagaagtaactccatccagtggatcctcatggtcactttcagttgcaattctatgaacagcaagtataagggggcaggcatggttaaaagatctgtcccttcacaccttgcactcggggaggtgggagtggtcttctctgtgtcctcacagtagggatccaccagtcactttaatactacctttggttctttctgcagcatcatgtatggcattgtgatccgaactatttggattaaaagcaaaacctacgaaacagtgatttccaactgctcaggtaagtctctactctgcatggcccaattcttggctaatttgcttctccagaggttttcttctagcaaatgtgagctagggactccttgatacacaagcatacaggatcatatcaggacccagccggcagaccagacccaccaaaggctgtcacaggcgggctctgtcttcccccatgtgacctccctgaaatctaggagaaggaagggggcactttggacctggtcaagctatgccagcagagagttagcctttgacctaggatccaagggttaccccagcctcagatctagcaaagaagcaccttggaggacacagataagaaaagacagactgtccaaggaggacatcacaccttcagcaaagatgagcataggcttttctgattggcttgaattttcagatacataaagctgccatctgtccatagaacaatcttggacccttagccagtaaaggcacggtagtccatgctttcccaactgacacaccaattcaaaccagatgaagcctaagaccacctactacaactcttccccacattccttctcagtaaacctgaatgcagagcctctcgtatgcaatagactctgagccctggaagcctaccctgcttcccaggaaaacattactggacctgaccaaggtcaacctggagaaaacacagcaaaccaaggggccaaaagaagaaagggcttctagttttctgttgctataatgtgataggtctgcagaagaagactggctccgctcagcttccacacccctcccattccttgtgcacacacatacacacaatgtaggctcatatacacaaatacacacaccttcacacactcagtctcacacacactaacaatgcatactcacacttatatgcactcacacaaggacaacaagctataccacaaatatctggaataagaagagctactttctgttccagatgtaccactaagagctgtgccacctggcaaagttatctaatccctgggctccaagaggttaaaataaggggatagactggattctccctaagccctcctcttttcagactgtgagctaaacttttgttggaccaagacagagcttgttttctccctcttaaagctactttttccaataagactgtgaggccaccaagaggatgcacaagtattatcgggcactgataacttgtgtctctttccctagaagtatgagtggagatacataagtctgggttcttcacctgaattcagttcaattcttctgtactcttctgcatgtcaggagtggtacagggactggaaatgacaaagaatgaatagcatggttcctgactataggcagcttacagtctagggccttgggtcttggccctggctacacagtagaatcgcctggggaggttttacaatgcaccgaaacccagacaccattccctgagagattctgattcactccatctggagtggggcatggattttattatttcggaaaagctcttcaggcatttttaatgttcaaccaggtttgacaatctggtccagtgagacacagagtcataggtggctgaccttcacactgactgaccagtgtaaccaagagatgtgcttaggctgcttggaaattttcaacccacgaagacccagtcattcagcttggggctaattccagcccccatgcagatcctagtgcttcccttccactggtgcagtctccacaccctggtttttctggaagagcaaaagcaatcagagagaataaacacaagtgaattcattctattcagtgcagttggctttggttaaaagttagaatatttgtccaaaaaaaaaattggatgaagacatccttcctctatcagatatcaaataaatgcagtaagtac

SEQ ID NO: 1882982 - DNA, 4001 bp, Homo sapiens
tgcactccagcctcggtgagagtgacagagcgagactcagtcctaaaaaaaaaaaaaaaaaaggagtggagctgagaaagatgctcaaggtggaggagtaaatgattggagggaggggaaggaagcacctaggatgactcggtttctggcttgaccaaatgggtggaaaacggtgacatctgttagattaaactggggatgtactaagtgtaaagtctgagaggaaagatgaatgcagcgactgtggcatctgtggtgcattcatgtgaacctaaggagggaagaatgcaaaagggaagtctacactgggcggtgagaatcaccaggtgggaggcaggagctaaagttagagaaaaaacggagagctccggaagaatgtaggatggggctcctaggagttcgatgtttaagggatgcgaggaaaacaaaccttggagatggagaaactgctggaaaggtaggaacaaagcccagagagcaaagtcacaactatccaaccacttctcttcccagtaccccagacacctccctagatgaggacagccagggctctaagctctcacctggaagcccgaccctgataggagaaaccttgtctcttgaaataactacataaacggagcaggtcttgagagtgttcacacgcacaaatcgaggcagctgggaggctaggtaggacgcaatgagcagtgagtaggcaggagcaaagttccccacctcccccgcccctcaactccttccagctcacctggaccaggcctggatcccacttccaacaggtcctcatgccagctcacaccccgaagaaccttgagccgagccaactcaacacctcgcctggtgccgtcccaacagagccttccattggcccccaccccctcgaaagccctttcccaacaactcatacactagcacctggggatgagggatcaaagacagaaacgccctaagcaagaagtatgaatgccttagaactaactctaatagagcccgggcactggaatggctaaagagatcacctgactagatggttacagataaaggtggggtaccttactcaagaccacaccagaaattaactacacaacaggatcggaacctggcgtctcgcttcccagccttagaccctttccccacagatgttcaccagtagacctctgcacccagcttcttgccaacattaccctttcgtgggtgtgggtttggggtttttgtttttttttagaatggggtctagatctgtcgcccaggctgaagtgcagtggccacatcacagctcactgcagcttcgaactcctgggctcaagtgatcctcccccctcagccttccgagtagctgggaccacaggtgcgcgccgccacgcccgacttccttactgtctccgctactactactttgtacttcggttatttaatccttcaaaacactcgaagttaaagcattttcatcccatctcaattcgtaacccagggaaggtctgctcatactcatttcaggtgagcgacttgctccagtcccgccgtgcacggcagcggggctgaaaccagatgacaaagcgctgaccgtcggggttcacttccccgccccgcccctacccttggccaggtgcggctgcagcttcttcgcactgaggaggccggcgctggagatcacggcatccagcacggcggagtagcgctgcgtttcgcacaccagcgcgtacagctgcttcacgttctgtgtggccgagggagacaagctgggtcgggggctcccccggccctcctcgccgggccccacctcccgaccccatccgggcccgtcccaccccaccccgggttcctcaccccccacccctacttgtggcgcccgggcccgctacctggaagttgctggagtacaccagccccttgatagagccctggcggctctccacgccggccagcacgcctgccaccgcagcgtacagccccatgttcccgcgcgcctttacggctctgtcgcaaagcgcacccggctctgcccccgcccggacttccggggtccaagggcatgcccttccgggaccggaagtgccggtcgaagtccccctgcagggtgtgtgtgtgatcgcgcacctgccgggctagggagtgcgacgctgcgggcgcacctgctggggtagggaatgcgacgctgcgagcccgtttcgccacttcttctccagttcttcagtctttgtcaatctgatggataaataatgggattttactgctgtttaaccgcagttattgcgttgaatatgttcacatgtgtattggtcatttcatatatatatgtgtgtgtatatatatatgtgtgtatgtgtgtgtatatatatatatatatttttttttttcagacaaaaagactcactctgtcgcgcagtgtcgcgatcttggctcactgcaacctccgcctcccaggttcaagcaattctcctgcctcaccctctggagtagctaggactacaggcccgtgccaccacgcccggctaatttttgtatttttagtagagacggggtttcaccatgttggccaggctggcctcgaactcctgaccttaggtgatctgcccacctcggcctcccaaagttttgggattacaggcgtgagcccccacgctggccataattatgtgtctctgtttattgtcttatcttcctctgccatgtgtcctccaatggctgtgttctcagggaggatttttctgtgtaatggcagaaaaggtcctagcaactccaggtccacaatgtggttcatgatacctgccactcaccctgcaccagtaaccacattagtcccagagccaagcaagaaagcacgtggggtatttgggtacctgaaatgggccggtttggccaaattaaatgatgtagttatgatccaggcctcaaagccacaataacggttttgtttttgcttttgatgaggtcccactccgtcacccaggctggagtgcagtggcaccgtcatagctcactgcagcctcgaactccagggctcaagtgatcctcccacttcaccctccaagtagctgggactacagacgtgcaccaccacacccagctaattttatcttttgtagaaatgcggtctcaccatgttgcccatggatggtctcgaactcctggcctaaagtgatcttcccacctcggcttcccaaagcagtgattacaggcatgaaccactgtgcccagcgaggattttgttcttttatcttgagataaatggtagtcctcttaagggttttaagtcatggagtgctgtgttcatgtatacttctttaaagatcagtctggccaggtgcggtggctcacacctgtaatcctagcactttgggaggccaaggcaggtggatcacttgaggtcaggagtttgagaccagcctggccaacatgacaaaacccgtctctactaaaaatacaaagattagccaggcattgtggcagacacctgtaatctcagctacttgggaggctgaggcagaatcgtttgaacctgggaggcggaggttgcagtaagctgagattgtgccaccgcactccagcctgggggatagagcaagcttctttccccaaaaaataaataaataaataaataatcagtctggttacagtgtggggatataggatggaggggacagagttgaggcagggagagaccaatgggggtcatggcagtcacctaaacaagaactggtggcctggactgagttggtggcagtggagttcggttgaagttggcagtgtgaccgctaagttaaatccacagaacttgctcaggaaaaaggtcaggtcgagaataactcataggttttcagtttgggcagttgacacaatgctgctgtgtcttttggtaggatggggaaacctggggtggtggagtgaacaacggccacccagagagagcaggtcctaattcctagagcctggaaatgtcaccttctatggaagagatctgtaggagtgatcaggggaaggatttggagagaaggttatcc

SEQ ID NO: 1882983 - DNA, 4001 bp, Homo sapiens
cactccagcctcggtgagagtgacagagcgagactcagtcctaaaaaaaaaaaaaaaaaaaggagtggagctgagaaagatgctcaaggtggaggagtaaatgattggagggaggggaaggaagcacctaggatgactcggtttctggcttgaccaaatgggtggaaaacggtgacatctgttagattaaactggggatgtactaagtgtaaagtctgagaggaaagatgaatgcagcgactgtggcatctgtggtgcattcatgtgaacctaaggagggaagaatgcaaaagggaagtctacactgggcggtgagaatcaccaggtgggaggcaggagctaaagttagagaaaaaacggagagctccggaagaatgtaggatggggctcctaggagttcgatgtttaagggatgcgaggaaaacaaaccttggagatggagaaactgctggaaaggtaggaacaaagcccagagagcaaagtcacaactatccaaccacttctcttcccagtaccccagacacctccctagatgaggacagccagggctctaagctctcacctggaagcccgaccctgataggagaaaccttgtctcttgaaataactacataaacggagcaggtcttgagagtgttcacacgcacaaatcgaggcagctgggaggctaggtaggacgcaatgagcagtgagtaggcaggagcaaagttccccacctcccccgcccctcaactccttccagctcacctggaccaggcctggatcccacttccaacaggtcctcatgccagctcacaccccgaagaaccttgagccgagccaactcaacacctcgcctggtgccgtcccaacagagccttccattggcccccaccccctcgaaagccctttcccaacaactcatacactagcacctggggatgagggatcaaagacagaaacgccctaagcaagaagtatgaatgccttagaactaactctaatagagcccgggcactggaatggctaaagagatcacctgactagatggttacagataaaggtggggtaccttactcaagaccacaccagaaattaactacacaacaggatcggaacctggcgtctcgcttcccagccttagaccctttccccacagatgttcaccagtagacctctgcacccaacttcttgccaacattaccctttcgtgggtgtgggtttggggtttttgtttttttttagaatggggtctagatctgtcgcccaggctgaagtgcagtggccacatcacagctcactgcagcttcgaactcctgggctcaagtgatcctcccccctcagccttccgagtagctgggaccacaggtgcgcgccgccacgcccgacttccttactgtctccgctactactactttgtacttcggttatttaatccttcaaaacactcgaagttaaagcattttcatcccatctcaattcgtaacccagggaaggtctgctcatactcatttcaggtgagcgacttgctccagtcccgccgtgcacggcagcggggctgaaaccagatgacaaagcgctgaccgtcggggttcacttccccgccccgcccctacccttggccaggtgcggctgcagcttcttcgcactgaggaggccggcgctggagatcacggcatccagcacggcggagtagcgctgcgtttcgcacaccagcgcgtacagctgcttcacgttctgtgtggccgagggagacaagctgggtcgggggctcccccggccctcctcgccgggccccacctcccgaccccatccgggcccgtcccaccccaccccgggttcctcaccccccacccctacttgtggcgcgcgggcccgctacctggaagttgctggagtacaccagccccttgatagagccctggcggctctccacgccggccagcacgcctgccaccgcagcgtacagccccatgttcccgcgcgcctttacggctctgtcgcaaagcgcacccggctctgcccccgcccggacttccggggtccaagggcatgcccttccgggaccggaagtgccggtcgaagtccccctgcagggtgtgtgtgtgatcgcgcacctgccgggctagggagtgcgacgctgcgggcgcacctgctggggtagggaatgcgacgctgcgagcccgtttcgccacttcttctccagttcttcagtctttgtcaatctgatggataaataatgggattttactgctgtttaaccgcagttattgcgttgaatatgttcacatgtgtattggtcatttcatatatatatgtgtgtgtgtattatgtgtgtatgtgtgtatatatatatatatatatatatatttttttttttttcagacaaaaagactcactctgtcgcgcagtgtcgcgatcttggctcactgcaacctccgcctcccaggttcaagcaattctcctgcctcaccctctggagtagctaggactacaggcccgtgccaccacgcccggctaatttttgtatttttagtagagacggggtttcaccatgttggccaggctggcctcgaactcctgaccttaggtgatctgcccacctcggcctcccaaagttttgggattacaggcgtgagcccccacgctggccataattatgtgtctctgtttattgtcttatcttcctctgccatgtgtcctccaatggctgtgttctcagggaggatttttctgtgtaatggcagaaaaggtcctagcaactccaggtccacaatgtggttcatgatacctgccactcaccctgcaccagtaaccacattagtcccagagccaagcaagaaagcacacggggtatttgggtacctgaaatgggccggtttggccaaattaaatgatgtagttatgatccaggcctcaaagccacaataacggttttgtttttgcttttgatgaggtcccactccgtcacccaggctggagtgcagtggcaccgtcatagctcactgcagcctcgaactccagggctcaagtgatcctcccacttcaccctccaagtagctgggactacagacgtgcaccaccacacccagctaattttatcttttgtagaaatgcggtctcaccatgttgcccatggatggtctcgaactcctggcctaaagtgatcttcccacctcggcttcccaaagcagtgattacaggcatgaaccactgtgcccagcgaggattttgttctttcatcttgagataaatggtagtcctcttaagggttttaagtcatggagtgctgtgttcatgtatacttctttaaagatcagtctggccaggtgcggtggctcacacctgtaatcctagcactttgggaggccaaggcaggtggatcacttgaggtcaggagtttgagaccagcctggccaacatgacaaaacccgtctctactaaaaatacaaagattagccaggcattgtggcagacacctgtaatctcagctacttgggaggctgaggcagaatcgtttgaacctgggaggcggaggttgcagtaagctgagattgtgccaccgcactccagcctgggggatagagcaagcttctttccccaaaaaataaataaataaataaataatcagtctggttacagtgtggggatataggatggaggggacagagttgaggcagggagagaccaatgggggtcatggcagtcacctaaacaagaactggtggcctggactgagttggtggcagtggagttcggttgaagttggcagtgtgaccgctaagttaaatccacagaacttgctcaggaaaaaggacaggtcgagaataactcataggttttcagtttgggcagttgacacaatgctgctgtgtcttttggtaggatggggaaacctggggtggtggagtgaacaacggccacccagagagagcaggtcctaattcctagagcctggaaatgtcaccttctatggaagagatctgtaggagtgatcaggggaaggatttggagagaaggtt

SEQ ID NO: 1882984 - DNA, 4001 bp, Homo sapiens; identical to SEQ ID NO: 1882843

SEQ ID NO: 1882985 - DNA, 4001 bp, Homo sapiens
gactctattacagaagaggctatacttccttaattacattctattctacagccacctcaaaataactagtgaacacgttcaaccaggatcattggcaacagccaatgggcacagtgatctggaaatggtctagccaagctgtttgggctgtagaccatggcattcctaagagcaaaataggcaaggagtccattaatatttcacttgacttatgtcaccatggaaacccctggagtagtgaatggctttggggagtggtcagattcaaccaaaaataacagaaatctctgtcccccaggtaaaggattcctactttgtgtgtgtctgtgtgtgcacacaggcacactcgagagacttttggcattctttgaagtcactggaggggcacagagataaacccactcagccttggcctccaagactaacagaacacaacgtttccctgaaagaataaaaaaaaaaatacaggcataagaaaacacacaaacatgggcttagagatttaaatacacacacacacacacacacacacacacacacacaggccctagaaggaacatacaccctgagatacgcactcattctaaaataaactcgggaatacagaaggacacgggcatgtcctttcagagaggcacacttctaggccctaagtaggagaaggaagaggggagaggaagaggcagggagagggacagggaggggggaggagggagggagagagagagagaaacgaagaagggggcggaggaggagatggaggagacactctttattctataggaggagacatcacggaagagaaatcaacactgaggccttggccgggcgcggtggctcacgcctgtaatcccagcactttgggaggccgaggcgggtgcatcacctgaggtcaggagtttccagaccagcctggccaacatggcgaaacccggcctctactaaaaaatacaaaaattagccgggcatggtggcgcggacctgtaatcccagctactcgggaggctgaggcaggagaatctcttgaacccggagacggaggttgcagtgagccgagatcgcgccattgcactccagcctgggcaacagggcgagactccgtctcagaaacaacaacaacaacaacaacaacaacaacatcaacaacaacaacaacaacaacgaacaaaccaaaaaccaatgaggcctgaagataaagacacatgtacaaccacggatgtcagacttccagaggcacggccaaggcaaaagacaaacacatacagactgcagcaggcagacaggccggttccagagtcaggctccggtgaagctccgaagaaacaaacacgcagggagatttcggaggcgtccgaggacaccgtggggcccggctggctccctctgtctctgtgcgcgccccttccccgggtcaccccgcctgcgcccgacctgcgcccgcgcaccgcgccctcggggctccctgggacagcccgcggcctggcccgtgcgcccgggctcccctccccgccggcccggcacttcccagctctgacgcgggagcttctttcacaccaatggggctcgcgcgcggaggggccctgcccctcctccgggaaggtgtgtccctgtttcctcacctgaaacttcctaggagaacccgatccctccctcccgtcgggcggccaggggcgggccgcgggtggggcggccgggcctgcgctggggacggctctggggactgcggccggcgccgggacctggaggggacgctggggccgaagcagcatgtgacaccgaccaggtgggtgccctcctcccgtctcggccctgggctcccggcggctgtggagcccggcggaggtggggcagggacaggaaggaagaggaagccaggcctttcccagggatcagcccccgctgggtccggggcgcaggctccggaaatgggggggctgggcccgcaggcagggctcggggtgtgtggctgaggaccctggtggggaagaggagaggaactagaggaaatgttgttgcctacaagtttgcttccggtcgggtcccgcctaggaaatgggcaccctgcccccagacgttccccgggccaataatcagggctctttcttcaaagtaggcgccctggggaaagctaagccatatcagaaggaataactgagattccctttctaggctgttccttacctggagaggttttatcggctccttttccttaaccaggccggggcctttccttatgtatctccataggtatttgcatactgtgtgagtctatgtgtagcttctctccgtgttaaccaaagctccgtaacctggaacagtgaatcctgccctgcccctcaccccagttccctacatatggggagcctcctaaagcttgatgtgaatcacaacgttgcattcttagcaaggtggaaagaagttatttagagttgggggctgaggtaggcgttggggtgctagaatgcggacgcagagctctagaacccctgagcatcttttgcagttgccttccggcaagactaccggaggagagccagttgtgatactacgtcatttccagatctcagtccctttcttcccttcctggatcttgggttccaaagacagatttgccctcctgtctacctagaagtgaactctggccaggactcttgtctggttgagagagaagggtgtgtcaaacagatgagagagggtggttttcctttcgagcttcctccctagcttgctcccctactgcactccactgtctggccttgcatcttgggcctaatccagaggtcccagctccagctaaaaagctcttgatgtggcctctgtctcagacgtcttgttttatccacatttggagcatgaagaagttcctggcataggccttagcaaaatgggtgtcatttgttaaccaatctgtgggcctaaaagtgaagccatggctagtgaaggagtcctggggagctgggaagatgggatgagggcgtgtcagttctgggtgagactgatatgcaggaggaatgtatgtcatggtcctagtggggaggagagagaaatcaggaggagtgcaaaggaatccctctcatcaacagaatatagtgattctcaatagagagaagagtgttcatatattagaggtcctgagagtgtatcagtgcccttaacgcggtctgtctgaggttccgtggccacgttacacgtggtgtctgtgggatagacaggaatacgtcatttgtggtgtctggagaggtcagtcgctatgtggtatggacaggaatggagtcactcgtagggtcttgggttcaacgggagcagcattactcaagtgtcagtggtgtagacaaacaggtgaccaacagctctagtgtagacaggggctgggtcactcacagtgtctgtggagtaagcaggagccgatcacttatagtgcctgcaaggtagactggaacaaagtcaccctcaaggtctgtgttaatacacaaacacgtcactcacactaatgttatctgtgtgtatgccaccaggaccacagatgagattgtagagtgtaagtcagcattgacactaataatgttcttatataaactatctggtctataaggcagttggtgtgacattttcagacattagagaatagataaatgtgtattacagctttcactggcatggtgggactttcctgcaatggatagaacacacactgtagtagtcagtggtccagaaagctacccctgttttgatatctttgtagtattgagggcagtgatgtcaaacagtgaataaagttatatatctatgtggtgatcttattttaacctcaatattattttagtgatttgtaagtcagaatatttgaaatcaaccttgctagaaaatccaggaagcatggtcctcaaaaatatatatatggcactgagtctcagttcaaagatttggcagtttgattggggaggggttgtatccttgaaatacagtgttgtttctagtgactagaaatagacaagagctaa

SEQ ID NO: 1882986 - DNA, 4001 bp, Homo sapiens
ctaatttttgtatttttagtagagatgcagttttgccacattgtccaggctggtctcaaactcctggcctcaagtgatccacccacctcagcctcccaaagtgctggggttacggacatgagccactgtgcctgacttatctcttcttttaagtttgttccttcactcagcctactagttaactcctgtacatgagttaataagttttacacaaaatttctcagcgcatgcaacacaactaactaaatccctctatttaacagggaaagtgcaattgtgtgagaatggacaagtgtgctgctgggttttgggaatcacttctttggctgaacctttttattttcttttaaatcttatgacatatgccgttagtgagtttatatagttcggtgtattagtctgctttcacactgccataaagaactacccgggactggataatttctaaagaaaagaagtttaattggctcacagttccacatggctggagaggcctcaggaaaggtacaatcatggcggaagccacaggggaagcaaggcacgtcttaccatggcacagcaggagagagagagcaaagggagaagtgctgcacttttaaaccatcagatttcgtgagaactcgttcactatcaacagaacagcaagggggaaatccctccccatgatccaatcacctcccaccaggtccctccgctgacatgcggggattacaatttgacatgagatttgggtggggacacagagccaaactatatcatttggttaaagaagtaagtggcctgtatttaacttttgggactgggaaaatgaattaaaataattctttattttacagatattaaagtaattgtgaaataaaagaaaaaattgtctgataaaaccacatctcatagaaacccaatgaatgcaacacatctaaaattttatctgcaaaaaacgagagaagacttgcccttctgtcagtaaagcacagataaagagaagtaaacttttctggattgaggcaataattgggcatcaagagtccacgtgacaactgaggctggcagttcaaatgtcacacctcttaggaatgactttccttgcacagtgctctcctcagggcacccttgacctctacattcctcaggttgtaaatcagggggtttagcatcgggttgaaagaactgtaaaatagaaaaaggaccttctgctgctcctcaggatggcgggacttaggggccatgtacatgacgatggcgctgccaaagaagagtcccactacgcagaggtgggaggagcaggtggagaaggcctttctgcggccctccccagactggatcctcaggatggccgccaggatgtgtgagtaggagaccagcaccaggcagagtggtcccaccaggatgaacatgcaggctgcaaagatgaccacctggttgagccaggtatcagcacaggccagcctgaggacagacaggatttcacagaagaagtggttgatttcacgaggcccacaaaagggcagtcttaggatgaggctcacatggaccatagccaggagggagccacatgtccaggaagtgatggccagagtgatgcagactttccaggtcatgatgatgaaatatcggagagggtggcagatggccacgtaccgatcgtaggacatcagcaccaacaggaggcattcagtatgtgcaaaactcaaaaagagaaaggtctatgtcatgcagccagcaaaggagatgggcttggctggatgcaggaggttcaccagcatctggggcactgtgttgcaggcataggcgatgttgacgacggccaggtgtgagaggaagaagtacatgggggtgtggagtctggagtccagtgagatgagccccaggatggtcccattccccagcagggtgaagacatagaacagggagaagagcccaaagaggagcatctgaatccttgggcccaggagaaatcccagtaggaggaactctgtgaccattgtctgatttttcaccatttcactactaaaaaacaaacaaagaaacaaacaaaaaacaagcagctgtgtgacacgcttttttttaaagtctattttatttattgttttataaatttttagtttgtggaaaattgttagtaaatgtctttaagaactcattcagttatacataagtaaagttttacttgaaaacttgctgttaattcaagtccttcatatttgtaacaatcactatacctgaaatcccaaatgcaagaaattgtttttcaaatagaaaaagtgtagctgacttcagcaacaagaattgcaatatactatataagtaaccaacggaaggaaattattgacaaatcaataattcaatttggcacttgacaaatggcagcatcaatgaattagcagtaagatgcttagcctgtgagttggtggtgtgctgaattgatgaatttgtttttttgaccttggatcttggatcacagtttccttaatgaacttcaacatggtttttggtgcaaacatttgtcaatgccattgcaagaacaaaataacttgagtcttatctactttagtgagattaaagtgaggaaaggcactgtttttggccagtccctagtttaatttttgtcagtactaactgggatataaaggtgtgtttcccgaggatataagagacagacttgcattctgagaaataaatttgtgaaacccacatgtaactgatgagaataacaatctagaggtgagaaacacgacactttcaggaaacattgagtggagagtttgaggagcctccagaaggccactgcgggtgctttgatgaaatctctgggaggcacagcagaagaatgtgattcattcagtgagcccaagtgtagtcggttgtatggcgtgcctgtctggaggaagactgtaggaaaaagaaggcaggtgaccaatatggagtgtagtcatcaggccagaggggcagcatttggcaatgcatccttaatgacattcagggtaaggaaaaaggggaaccagctgcaccaggatcctagccatctggtgattctatgtctacagtctggatagatggtttgggtaaatagccctagctagtaaaatctctaattagcccctcttgctctgatttcatattcatcaatcaactgttaggtaacaatttatcttcttgagcagttatttctacaaagaagaaatgtgttgagtactaaacttcttgactccttttgcagtcacattttcaagtttaaataaatgaacatttaggtatcctggcttatgcattttcctcttttgcttttgggttgtatgatgcagttcctgaacaaaattcccaaagctgaatctaaaatgtgaggaccagactctgggtcaaggaaacctcattgaagcaagaactggggaaagagacagattcctttctaacagcaacagatgagatatctattttcttataagcattattgataggtgatcaagttaccttgacacaaaaataatctaaataacaaattaaaaattcctcacttgtgaccaggacttattaaattttaggttgatagtaaaaatttctcagtaggtgccgtcatatgcacctgtagttccagctacttgggaggctgaaagcaggaggatagcttgagcccaggagttccaggacagcctggataacatggcaagccctcatctcataaaataacataaaataaaaaatttctgtgtttatcaaactttctaaatttattttttaagctcataaggcatagaaaaatatttgactgtgaaagatgtattcaaacccacccacttataaaataataatttcctttctcaatttttcatttccctcaaaaggaagacataaaggaaaaaagaaacacagtaaaagccatgattttttgaagccaactgaaagacaggtgtaaaagaaggaaaataaggtacctcatagtctgagtattctttcagaacagtagtcctgtttgattcagccttgatttcttttaaagaaatgga

SEQ ID NO: 1882987 - DNA, 4001 bp, Homo sapiens
gctaatttttgtatttttagtagagatgcagttttgccacattgtccaggctggtctcaaactcctggcctcaagtgttccacccacctcagcctcccaaagtgctggggttacggacatgagccactgtgcctgacttatctcttcttttaagtttgttccttcactcagcctactagttaactcccgtacatgagttaataagttttacacaaaatttctcagcgcatgcaacacaactaactaaatccctctatttaacagggaaagtgcaattgtgtgagaatggacaagtgtgctgctgggttttgggaatcacttctttggctgaacctttttattttcttttaaatcttatgacatatgccgttagtgagtttatatagttcggtgtattagtctgctttcacactgccataaagaaccacccgggactggataatttctaaagaaaagaagtttaattggctcacagttccacatggctggagaggcctcaggaaaggtacaatcatggcggaagccacaggggaagcaaggcacgtcttaccatggcacagcaggagagagagagcaaagggagaagtgctgcacttttaaaccatcagatttcgtgagaactcgttcactatcaacagaacagcaagggggaaatccctccccatgatccaatcacctcccaccaggtccctcccctgacatgcggggattacaatttgacatgagatttgggtggggacacagagccaaactatatcatttggttaaagaagtaagtggcctgtatttaacttttgggactgggaaaatgaattaaaataattctttattttacagatattaaagtaattgtgaaataaaagaaaaaattgtctgataaaaccacatctcatagaaacccaatgaatgcaacacatctaaaattttatctgcaaaaaacgagagaagacttgcccttctgtcagtaaagcacagataaagagaagtaaacttttctggattgaggcaataattgggcatcaagagtccacgtgacaactgaggctggcagttcaaatgtcacacctcttaggaatgactttccttgcacagtgctctcctcagggcacccttgacctctacattcctcaggttgtaaatcagggggtttagcatcgggttgaaagaactgtaaaatagaaaaaggaccttctgctgctcctcaggatggcgggacttaggggccatgtacatgacgatggcgctgccaaagaagagtcccactacgcagaggtgggaggagcaggtggagaaggcctttctgcggccctccccagactggatcctcaggatggccgccaggatgtgtgagtaggagaccagcaccaggcagagtggtcccaccaggatgaacatgcaggctgcaaagatgaccacctggttgagccaggtatcagcacaggccagcctgaggacagacaggatttcacagaagaagtggttgatttcacgaggcccacaaaagggcagtcttaggatgaggctcacatggaccatagccaggagggagccacatgtccaggaagtgatggccagagtgatgcagactttccaggtcatgatgatgaaatatcggagagggtggcagatggccacgtaccgatcgtaggacatcagcaccaacaggaggcattcagtatgtgcaaaactcaaaaagagaaaggtctatgtcatgcagccagcaaaggagatgggcttggctggatgcaggaggttcaccagcatctggggcactgtgttgcaggcataggcgatgttgacgacggccaggtgtgagaggaagaagtacatgggggtgtggagtctggagtccagtgagatgagccccaggatggtcccattccccagcagggtgaagacatagaacagggagaagagcccaaagaggagcatctgaatccttgggcccaggagaaatcccagtaggaggaactctgtgaccattgtctgatttttcaccatttcactactaaaaaacaaacaaagaaacaaacaaaaaacaagcagctgtgtgacacgcttttttttaaagtctattttatttattgttttataaatttttagtttgtggaaaattgttagtaaatgtctttaagaactcattcagttatacataagtaaagttttacttgaaaacttgctgttaattcaagtccttcatatttgtaacaatcactatacctgaaatcccaaatgcaagaaattgtttttcaaatagaaaaagtgtagctgacttcagcaacaagaattgcaatatactatataagtaaccaacggaaggaaattattgacaaatcaataattcaatttggcacttgacaaatggcagcatcaatgaattagcagtaagatgcttagcctgtgagttggtggtgtgctgaattgatgaatttgtttttttgaccttggatcttggatcacagtttccttaatgaacttcaacatggtttttggtgcaaacatttgtcaatgccattgcaagaacaaaataacttgagtcttatctactttagtgagattaaagtgaggaaaggcactgtttttggccagtccctagtttaatttttgtcagtactaactgggatataaaggtgtgtttcccgaggatataagagacagacttgcattctgagaaataaatttgtgaaacccacatgtaactgatgagaataacaatctagaggtgagaaacacgacactttcaggaaacattgagtggagagtttgaggagcctccagaaggccactgcgggtgctttgatgaaatctctgggaggcacagcagaagaatgtgattcattcagtgagcccaagtgtagtcggttgtatggcgtgcctgtctggaggaagactgtaggaaaaagaaggcaggtgaccaatatggagtgtagtcatcaggccagaggggcagcatttggcaatgcatccttaatgacattcagggtaaggaaaaaggggaaccagctgcaccaggatcctagccatctggtgattctatgtctacagtctggatagatggtttgggtaaatagccctagctagtaaaatctctaattagcccctcttgctctgatttcatattcatcaatcaactgttaggtaacaatttatcttcttgagcagttatttctacaaagaagaaatgtgttgagtactaaacttcttgactccttttgcagtcacattttcaagtttaaataaatgaacatttaggtatcctggcttatgcattttcctcttttgcttttgggttgtatgatgcagttcctgaacaaaattcccaaagctgaatctaaaatgtgaggaccagactctgggtcaaggaaacctcattgaagcaagaactggggaaagagacagattcctttctaacagcaacagatgagatatctattttcttataagcattattgataggtgatcaagttaccttgacacaaaaataatctaaataacaaattaaaaattcctcacttgtgaccaggacttattaaattttaggttgatagtaaaaatttctcagtaggtgccgtcatatgcacctgtagttccagctacttgggaggctgaaagcaggaggatagcttgagcccaggagttccaggacagcctggataacatggcaagccctcatctcataaaataacataaaataaaaaatttctgtgtttatcaaactttctaaatttattttttaagctcataaggcatagaaaaatatttgactgtgaaagatgtattcaaacccacccacttataaaataataatttcctttctcaatttttcatttccctcaaaaggaagacataaaggaaaaaagaaacacagtaaaagccatgattttttgaagccaactgaaagacaggtgtaaaagaaggaaaataaggtacctcatagtctgagtattctttcagaacagtagtcctgtttgattcagccttgatttcttttaaagaaatgg

SEQ ID NO: 1882988 - DNA, 4001 bp, Homo sapiens
tttttgagacagtgtctccccgtctcccaggctggagtgcagtggcgcaatcttggctcactgcaacctctgcctcccaggttcaagcaattctcattcctcagtcaccagaatagctgggatcacaggcatgcaccaccacgcccagctaatttttgtatttttagtagagatgcagttttgccacattgtccaggctggtctcaaactcctggcctcaagtgatccacccacctcagcctcccaaagtgctggggttacggacatgagccactgtgcctgacttatctcttcttttaagtttgttccttcactcagcctactagttaactcctgtacatgagttaataagttttacacaaaatttctcagcgcatgcaacacaactaactaaatccctctatttaacagggaaagtgcaattgtgtgagaatggacaagtgtgctgctgggttttgggaatcacttctttggctgaacctttttattttcttttaaatcttatgacatatgccgttagtgagtttatatagttcggtgtattagtctgctttcacactgccataaagaactacccgggactggataatttctaaagaaaagaagtttaattggctcacagttccacatggctggagaggcctcaggaaaggtacaatcatggcggaagccacaggggaagcaaggcacgtcttaccatggcacagcaggagagagagagcaaagggagaagtgctgcacttttaaaccatcagatttcgtgagaactcgttcactatcaacagaacagcaagggggaaatccctccccatgatccaatcacctcccaccaggtccctccgctgacatgcggggattacaatttgacatgagatttgggtggggacacagagccaaactatatcatttggttaaagaagtaagtggcctgtatttaacttttgggactgggaaaatgaattaaaataattctttattttacagatattaaagtaattgtgaaataaaagaaaaaattgtctgataaaaccacatctcatagaaacccaatgaatgcaacacatctaaaattttatctgcaaaaaacgagagaagacttgcccttctgtcagtaaagcacagataaagagaagtaaacttttctggattgaggcaataattgggcatcaagagtccacgtgacaactgaggctggcagttcaaatgtcacacctcttaggaatgactttccttgcacagtgctctcctcagggcacccttgacctctacattcctcaggttgtaaatcagggggtttagcatcgggttgaaagaactgtaaaatagaaaaaggaccttctgctgctcctcaggatggcgggacttaggggccatgtacatgacgatggcgctgccaaagaagagtcccactacgcagaggtgggaggagcaggtggagaaggcctttctgcggccctccccagactggatcctcaggatggccgccaggatgtgtgagtaggagaccagcaccaggcagagtggtcccaccaggatgaacatgcaggctgcaaagatgaccacctggttgagccaggtatcagcacaggccagcctgaggacagacaggatttcacagaagaagtggttgatttcacgaggcccacaaaagggcagtcttaggatgaggctcacatggaccatagccaggagggagccacatgtccaggaagtgatggccagagtgatgcagactttccaggtcatgatgatgaaatatcggagagggtggcagatggccacgtaccgatcgtaggacatcagcaccaacaggaggcattcagtatgtgcaaaactcaaaaagagaaaggtctatgtcatgcagccagcaaaggagatgggcttggctggatgcaggaggttcaccagcatctggggcactgtgttgcaggcataggcgatgttgacgacggccaggtgtgagaggaagaagtacatgggggtgtggagtctggagtccagtgagatgagccccaggatggtcccattccccagcagggtgaagacatagaacagggagaagagcccaaagaggagcatctgaatccttgggcccaggagaaatcccagtaggaggaactctgtgaccattgtctgatttttcaccatttcactactaaaaaacaaacaaagaaacaaacaaaaaacaagcagctgtgtgacacgcttttttttaaagtctattttatttattgttttataaatttttagtttgtggaaaattgttagtaaatgtctttaagaactcattcagttatacataagtaaagttttacttgaaaacttgctgttaattcaagtccttcatatttgtaacaatcactatacctgaaatcccaaatgcaagaaattgtttttcaaatagaaaaagtgtagctgacttcagcaacaagaattgcaatatactatataagtaaccaacggaaggaaattattgacaaatcaataattcaatttggcacttgacaaatggcagcatcaatgaattagcagtaagatgcttagcctgtgagttggtggtgtgctgaattgatgaatttgtttttttgaccttggatcttggatcacagtttccttaatgaacttcaacatggtttttggtgcaaacatttgtcaatgccattgcaagaacaaaataacttgagtcttatctactttagtgagattaaagtgaggaaaggcactgtttttggccagtccctagtttaatttttgtcagtactaactgggatataaaggtgtgtttcccgaggatataagagacagacttgcattctgagaaataaatttgtgaaacccacatgtaactgatgagaataacaatctagaggtgagaaacacgacactttcaggaaacattgagtggagagtttgaggagcctccagaaggccactgcgggtgctttgatgaaatctctgggaggcacagcagaagaatgtgattcattcagtgagcccaagtgtagtcggttgtatggcgtgcctgtctggaggaagactgtaggaaaaagaaggcaggtgaccaatatggagtgtagtcatcaggccagaggggcagcatttggcaatgcatccttaatgacattcagggtaaggaaaaaggggaaccagctgcaccaggatcctagccatctggtgattctatgtctacagtctggatagatggtttgggtaaatagccctagctagtaaaatctctaattagcccctcttgctctgatttcatattcatcaatcaactgttaggtaacaatttatcttcttgagcagttatttctacaaagaagaaatgtgttgagtactaaacttcttgactccttttgcagtcacattttcaagtttaaataaatgaacatttaggtatcctggcttatgcattttcctcttttgcttttgggttgtatgatgcagttcctgaacaaaattcccaaagctgaatctaaaatgtgaggaccagactctgggtcaaggaaacctcattgaagcaagaactggggaaagagacagattcctttctaacagcaacagatgagatatctattttcttataagcattattgataggtgatcaagttaccttgacacaaaaataatctaaataacaaattaaaaattcctcacttgtgaccaggacttattaaattttaggttgatagtaaaaatttctcagtaggtgccgtcatatgcacctgtagttccagctacttgggaggctgaaagcaggaggatagcttgagcccaggagttccaggacagcctggataacatggcaagccctcatctcataaaataacataaaataaaaaatttctgtgtttatcaaactttctaaatttattttttaagctcataaggcatagaaaaatatttgactgtgaaagatgtattcaaacccacccacttataaaataataatttcctttctcaatttttcatttccctcaaaaggaagacataaagga

SEQ ID NO: 1882989 - DNA, 4001 bp, Homo sapiens
ttttttgagacagtgtctccccgtctcccaggctggagtgcagtggcgcaatcttggctcactgcaacctctgcctcccaggttcaagcaattctcattcctcagtcaccagaatagctgggatcacaggcatgcaccaccacgcccagctaatttttgtatttttagtagagatgcagttttgccacattgtccaggctggtctcaaactcctggcctcaagtgttccacccacctcagcctcccaaagtgctggggttacggacatgagccactgtgcctgacttatctcttcttttaagtttgttccttcactcagcctactagttaactcccgtacatgagttaataagttttacacaaaatttctcagcgcatgcaacacaactaactaaatccctctatttaacagggaaagtgcaattgtgtgagaatggacaagtgtgctgctgggttttgggaatcacttctttggctgaacctttttattttcttttaaatcttatgacatatgccgttagtgagtttatatagttcggtgtattagtctgctttcacactgccataaagaaccacccgggactggataatttctaaagaaaagaagtttaattggctcacagttccacatggctggagaggcctcaggaaaggtacaatcatggcggaagccacaggggaagcaaggcacgtcttaccatggcacagcaggagagagagagcaaagggagaagtgctgcacttttaaaccatcagatttcgtgagaactcgttcactatcaacagaacagcaagggggaaatccctccccatgatccaatcacctcccaccaggtccctcccctgacatgcggggattacaatttgacatgagatttgggtggggacacagagccaaactatatcatttggttaaagaagtaagtggcctgtatttaacttttgggactgggaaaatgaattaaaataattctttattttacagatattaaagtaattgtgaaataaaagaaaaaattgtctgataaaaccacatctcatagaaacccaatgaatgcaacacatctaaaattttatctgcaaaaaacgagagaagacttgcccttctgtcagtaaagcacagataaagagaagtaaacttttctggattgaggcaataattgggcatcaagagtccacgtgacaactgaggctggcagttcaaatgtcacacctcttaggaatgactttccttgcacagtgctctcctcagggcacccttgacctctacattcctcaggttgtaaatcagggggtttagcatcgggttgaaagaactgtaaaatagaaaaaggaccttctgctgctcctcaggatggcgggacttaggggccatgtacatgacgatggcgctgccaaagaagagtcccactacgcagaggtgggaggagcaggtggagaaggcctttctgcggccctccccagactggatcctcaggatggccgccaggatgtgtgagtaggagaccagcaccaggcagagtggtcccaccaggatgaacatgcaggctgcaaagatgaccacctggttgagccaggtatcagcacaggccagcctgaggacagacaggatttcacagaagaagtggttgatttcacgaggcccacaaaagggcagtcttaggatgaggctcacatggaccatagccaggagggagccacatgtccaggaagtgatggccagagtgatgcagactttccaggtcatgatgatgaaatatcggagagggtggcagatggccacgtaccgatcgtaggacatcagcaccaacaggaggcattcagtatgtgcaaaactcaaaaagagaaaggtctatgtcatgcagccagcaaaggagatgggcttggctggatgcaggaggttcaccagcatctggggcactgtgttgcaggcataggcgatgttgacgacggccaggtgtgagaggaagaagtacatgggggtgtggagtctggagtccagtgagatgagccccaggatggtcccattccccagcagggtgaagacatagaacagggagaagagcccaaagaggagcatctgaatccttgggcccaggagaaatcccagtaggaggaactctgtgaccattgtctgatttttcaccatttcactactaaaaaacaaacaaagaaacaaacaaaaaacaagcagctgtgtgacacgcttttttttaaagtctattttatttattgttttataaatttttagtttgtggaaaattgttagtaaatgtctttaagaactcattcagttatacataagtaaagttttacttgaaaacttgctgttaattcaagtccttcatatttgtaacaatcactatacctgaaatcccaaatgcaagaaattgtttttcaaatagaaaaagtgtagctgacttcagcaacaagaattgcaatatactatataagtaaccaacggaaggaaattattgacaaatcaataattcaatttggcacttgacaaatggcagcatcaatgaattagcagtaagatgcttagcctgtgagttggtggtgtgctgaattgatgaatttgtttttttgaccttggatcttggatcacagtttccttaatgaacttcaacatggtttttggtgcaaacatttgtcaatgccattgcaagaacaaaataacttgagtcttatctactttagtgagattaaagtgaggaaaggcactgtttttggccagtccctagtttaatttttgtcagtactaactgggatataaaggtgtgtttcccgaggatataagagacagacttgcattctgagaaataaatttgtgaaacccacatgtaactgatgagaataacaatctagaggtgagaaacacgacactttcaggaaacattgagtggagagtttgaggagcctccagaaggccactgcgggtgctttgatgaaatctctgggaggcacagcagaagaatgtgattcattcagtgagcccaagtgtagtcggttgtatggcgtgcctgtctggaggaagactgtaggaaaaagaaggcaggtgaccaatatggagtgtagtcatcaggccagaggggcagcatttggcaatgcatccttaatgacattcagggtaaggaaaaaggggaaccagctgcaccaggatcctagccatctggtgattctatgtctacagtctggatagatggtttgggtaaatagccctagctagtaaaatctctaattagcccctcttgctctgatttcatattcatcaatcaactgttaggtaacaatttatcttcttgagcagttatttctacaaagaagaaatgtgttgagtactaaacttcttgactccttttgcagtcacattttcaagtttaaataaatgaacatttaggtatcctggcttatgcattttcctcttttgcttttgggttgtatgatgcagttcctgaacaaaattcccaaagctgaatctaaaatgtgaggaccagactctgggtcaaggaaacctcattgaagcaagaactggggaaagagacagattcctttctaacagcaacagatgagatatctattttcttataagcattattgataggtgatcaagttaccttgacacaaaaataatctaaataacaaattaaaaattcctcacttgtgaccaggacttattaaattttaggttgatagtaaaaatttctcagtaggtgccgtcatatgcacctgtagttccagctacttgggaggctgaaagcaggaggatagcttgagcccaggagttccaggacagcctggataacatggcaagccctcatctcataaaataacataaaataaaaaatttctgtgtttatcaaactttctaaatttattttttaagctcataaggcatagaaaaatatttgactgtgaaagatgtattcaaacccacccacttataaaataataatttcctttctcaatttttcatttccctcaaaaggaagacataaagg

SEQ ID NO: 1882990 - DNA, 4001 bp, Homo sapiens
ttctataagagggttggaggagtggctcccagagagccatttctgtggaaaggcaagaggctttggggccagatggaagaagtgggcagcctgggtgtgaggggtgcttccatccaggagcggtcaggccgagagaggggagccaacagaagcacatggctcctcctgtgttggggtgccaggcctctctgctcttcttagagcacctcccattttcagaactctatcatagaccttgaagccaggtcctgaaaaggaaacacatccaaaataaaggaaacttaaaagaatgcaagcaaaaccacagagctaagaaagaaaggttttaataggacattttaataatagctacatttactgagctcttacttaatgtgccagaccctgcactaagagccttatttgtttggattatctcttttaattaagaccgtcccattgtactcactctgcattccctatccattccttaactatcccaggtgcacagaaacttgcctttgagacattctaccaatgtgtgtccattagttctctgcagtgcaggagaagaaacttgcatgaagatgagggaccaggagaaaatgagaaaaaagagagtgaggagctccagcttaggcatgtgggtgcccacctgcagcaagtctactcctcgtgacttgtcaggtgctctctagccctgtcaagggctcaccctctcacctacaggctgctgggtctccaaggaagatccttttagtcacatcctcaatgacctccttgaccttctcattccggaaggtgaagatgaaggggttgaggaaaggggttaccattgcagtcaccatggccaccgccttgttgaggtatgtggagtggcccttgcctggcctcacgtagatgaagatggcactgccatagcccagaaccaccactgtgaggtgagaggcacaggtggagaaggccttctggcatccagaggaggaagggatgtgcagcactgcagccacaatgaggatgtaggagaggatgataagcagcatggtggtcagcacaaagagcagggacaggaagaggtccatgcgctcaatgtggcgggtgtcagagcaggcaagcttgagcagcggggcagagtcacagaagtagtggccgatgatgttagggccacagaaccagagtcgtgttttctgcagtgtgggagagacaatggagaggaaaccaaccacccaacaggccaccaccagcttcacacacactggaccattcgtgatggttgggtagcgcagggggtggcagatggccacgtagcgatcaaaggccatgaccatgagtatcaggaagttggcagagcccagggagaagtaaaagaaagactgggttaggcatttggccagggacatggtcttgtgagtggatagcaggtctgccagcatcctatgtaccacagtggaggtgaccaccatctccatgagggagaagttgcagaggaagaagtacatgggtgagtgaaggcgggaatcaaggcaaatgaagctgatgatggccaggttgcccagcagcatcagcacatatatcaacaggatcagagcaaacagcagaacctggaactcatggagataagaaaatccaaggagctcctctgcctaggaaaaccagagacctttgttcacttgtttatctgctgaccttccctccactattgtcctatgaccctgccaaatccccctccacgagaaacacccaagaatgatcaattaaaaaaaaaaaaaaaaaagaaaatcccaggagcacaaactccctgacaatgctgtagttacccattgcacttgatgcccattctatgtgacacctgtgagaggttgagaactgttagcaggagattgccatcaacctctctctcaatcaggtccccatagtgctggcctggctccccatgcacactagcctgtgtgcacagttgaccccaggagacacattcccaaaaggcaggagtttccctggggcgaggaatggattactggctgggatgagcagatttatgacttggccacctctacattatcaccattcttaagctcttcctcttctgtcttctactcattgattatattgtacaacacacttaataagctccaactctgtgcaagacatttggctgggtctgaggatgaaggggtaaacacttcctaactgccaaatgtaatggtctgttgttcaaataatagctgatatttactgttctttccctgtgccagaagatgcgctagataccttacacattatttccttccatcttttttgctgaatcttcatcctcttttcttctctataacattttcttctctataacatttcaggctacaaataacccgtttttgaagtgacttccacccttgactgcaaggaccctgcactcttgaatttctcctaccatcctgggttccctcgtctgtctccttctctagctccctgtctttctgccattttctaaacatggatgaccccacatttcttttcttatctttgtttaaaaaaattctctattttctccttcagaaatctcaccttctttaaccaaagcaatctttaaaatgtaaatgaatttcaaatctggattttgtcctcctctgagtcccggcccacatctctaaccaccagattgaccaccaccacacattcaacacatctaaagatacacacctagtcctcccctcccgcaaaggccatgtttatggctcccaattccccagtcatctgggctggaaactggaagcatctagccctcctttgtttatccatatccaccaccctagttcaaggatctgtttcctcttaaccattgcaacaacactcttaattttttttttattggtagattgctcaatcaccaacctatccaggcaccatgctgctattatattttattttcttaagttattgtgtcaatcaactgtttttaataatctgtaacaaggccgggcatggtggctcacgcctgtaatcccagcactttgggaggctgagggcgggtggatcatctgaggtcgggagttcgagaccatcgtggccaacatggagaaaccccatctctactaaaaatacaaaattagccgagtgtggtggtgtgtgcctgtaatcccagctacccaggaggctgaggcagaagaatcgcttgaatctaggaggtggaggttgcagtgagctgagatcatgccattgcactccagcctgggcaacaagagcaacactctatctcaaaaataaataaataaataaaaataacctgtaacaatgagatttcatttataattactttcaaaatcaatcaaactagctagccatctatcttcatccagaaaaagagtaaaaggatgcattttaaaatattaacaatggctatatctgggtgtgggttataggagtttacttttaaaaatcttgtattgaaattatacatatttaaactgttgtattagtctgttctcacgctgctataaggacacacccaagactgggtaatttataaagaaaagaggtttaattgactgacagtttggcatggctggggaggcttcaggaaacctatgatcatggccgaagggggagcaaacacgtccttcttcacatggcagcagcaaggagaagtgcagagcacaggagtgaaaaagccccttataaaactatcagatctcgtgagaacttactctctatcacgagaacagcatggaggtaaccacccccatgagtcaattacctcccactgggtccctcccacaacatgtggggattatgggaactacaattcaagatgagatttgcgtggggacacagccaaaccatatgaaatgtatatcatgaggtttggatagaaatatacatagtaaacttattacgacagtcaagctaattaatatatccatctcttcatatagttaccatttttcacatgtagtgagatgacctaagatctaccctcttagcaaatgtcaagtatacaatacagtatcattacctgtaatccc

SEQ ID NO: 1882991 - DNA, 4001 bp, Homo sapiens; identical to SEQ ID NO: 586784

SEQ ID NO: 1882992 - DNA, 4001 bp, Homo sapiens
gatatttttgatttggaatatttgcatatacataataagatatcttggggatgggacccaagtctaaatgggaaattcatttgtttcacatacaccttaccttacccacatagcctgaaggtaaggttatattatatattttaaataattttgtgcatgaaacaaagttttgatggcgttttaaaaaaaaatgttttcattgttttttttgttttggtttttgtttttttacagacagggtctggctatatcgtccaggctggactcaaactcctgggctcaagcaatcctcctgctcaacctcccgagtagctggcactacaggtgcccaccacaccaggcttgattgtgacttgactgtcacccagtgtcacatgagggcaagtgtggaattttccatttgtggggtcacgtcagtactcaaaaaaattcgaattttagagcattttggatttcagattaggaatgtttaacctaagtttgtaaaggaaattttttagccttagaatagggatgtttcagattgttcaagagacaaatgaaagactaaaacaaccagaaaacattggaatgataaatcattaagtatatttaaatgtgcgttgtttacctcctgcccatacaaaaccactcatgacatacatacaaatgtaaggacaaaactgtagtcacctgattaacaagagccagagttcattgcatgctgatcaacgaaccaacacaacttttatcatacactaaaaaaagggtagaacaaaggccaacttaaagcctggaaagtgatctaatctgttaaattagtgtaccgcagagtaattttgaaagccttctcgttttgttttgttttttttcagagacagagtctcgctctgtcgcccaggctggagtgcagcggcgcgatctcggctcattgcaacctcccccacccgagttcaagccattctcctgcctcagcctcctgagtagctgggactacaggcgcgtgccgccacgcccggctaattttttgtattttagtagggacggggtttcaccgtgtcgcccaggctggtctcgaactcctgaactcaggcaatccgcccacctcggcctcctaaaggataggattacaggcgtgagccaccgcgcccggccccttctcttttttaaaaccaatttcactaacatttacttaaaaatgattttctgcttggcagaagtgacttaaggcatgtgggggagacactgcgggtctgtctcagattcctttagacaccaatgctccacagttttacgactaggtaatagtccgataatcacccatgagttcctggactccggtttgttgtgggattggaaataaacgagaaaggctgcgttcatcatcatggccttaatttcttctcccaacttccggtcgtgcaggtgtcttgggcaggtgatcccgaggccactctgccgtgttctgtgaatcttggcggaagggaggcgagctgtaaataaaagcgtgaccattagaatcgccgctgtgtagtattaacctgttgagcgcggggcttcccggggctggagctgcaccgcgggctctgctgtctgggactctcctccagcgcggacccgacaggacgccagggaccaggccggtccggccgggacagcggggcctcgggcagcgacggggccgggcctccccccagcacgtccccagctcgggcactgaggccttgcggagaccccaggactcgccgcggaggccaccagtgcgcgtctcgcgtggcgctacggcctcgggaattccgtcacggcatagccgggtccagcgcggtgtagaccggggccccgcgccttgctcggccagagcggctcaggtactactccaggtccggccgcactcgcggccactgcgaacagccgggacacccaatcccactccgcccagggccaagaagcccgaggaggccgcagaaccgctcccgctcccactcgcggccccaaggccccacccccccctccgccgcgcgcatgcgccgcccccgagcagccgcatgtggcgacgggaggggcctgccagctcccctcctccccgggaccggctcactccggccccgccgaggggggagctggtttcccctcgtcctcggggccccctcgttgcagagcggcggccacggaaccgcaagggccagagcgggctgccggcgccagctaccccggagccgtggctggcggcagaggcgcggggcgtcactggaggccgggcggctcctcggcgctccccctcggtggccggggcgggatggtgcgtcccgcagggcgcgcgcggctcccgcgcttcgggcgctcggcgcgggcgcgggcgggggcgcggagggcgggggagcggaccccgattcgcaggaccgggcccgggctgcgcgggcagggccgttggcggggcgagtgggggcgccgggcgccgcgggggccgggggcggggggtgggcggggccgggcgccgccgcggagcctcccgggccgccgcgatcatgtcggaccaggcgcccaaagttcctgaggagatgttcagggaggtcaagtattacgcggtgggcgacatcgacccgcaggtaccgcgcccgcccctgccgcggcctcctcccccgtccgcgtccccgtccgtccccgtccccgtccccgtccccgctcctgccgcgggcgcgcgccgggcgcagagcgtcgggtccgccgaggccgctggcctgactgcgctgagggcaggggcgaccgcggggtgggcgcgggaggcccgggcccgggggagtgcgggagggaaggcggctggggctctgtacctcggcccctagtgcgcgccctgagcccccggcctgcggccctggggtcgccgcccccgacccaccgggccgcctcgttctctgctcctttgctgagcgggacgggcgcggggtcgcgtctccccattccccgcgccgggcgtctcggctcccgggagagcagctccgagggcggacgaggggcgccgggatccccagccggggcagctcgcgcggggaccccagcctcgctcggccggcgggggtcgtggccgtgcaccggcttggccgcctccgccacccgggcagctgccgtcctgtgcggggctgaggagcgctcccttccagcctgtgtccctgcacgtgggggctggcattcgtcttccttgattttcccacttggacgattaattttacggtaccctggtaacaccatcacattacacatttaattttgtgtagtttgggctcacgccaaaggatattgtgggttttccttagtattcctataataatatatctgtttgatgtcacacagttatcagtccgtggtaggaatgcatcttagttgaatatcctcttcaggttaatcttcaaaatatttccttcttaaaagtttagctgtacagttgtgttgccttgggtgtgacatcagtggcccccaccttggaggatggggatccccagtgatcagagttaggcctggaagggcggagactcatatttcgcagatgaacttggatggtgtagaaggaattgtagaaggctgagtgatcttggccttcttgaggttcgtccttgtaacaactttttggaccctttttgccctgtaactttagggtaaagagacttcaaggccgggtttacccctgtaatcccagcactttgggaggccaaggcgggtggatcacctgaggtcatgagttcgagaccagcctggccaacatggtgaagcctcatctctactaaaaatacaaaaattagccgggcgtggtggcgggcgcctgtggtctcagctactcgggaggctgaggcaggagaattgctggaacctgggaggtggaagttgcagtgagccgagatcgcgccactgcactccagcctgggcaacaacagctagactccgtctcaaaaaaaaaaaaaaagccttctatctttgaatttacagagtaaaacagttgctgaacacggagcgatgaagatgagtgcctg

SEQ ID NO: 1882993 - DNA, 4001 bp, Homo sapiens
tgggaggctcagtcctctattcctgcagctagtgtcatgagctttccccagcacaaaccccaaacccttatctttgtagttcttcgagtggcacgccttgttactgatgatcgctaagaggaacatggtgttcttcaggctggggagagggcttgatgcatggtacatgaggaaggcagtgctctccagccaacaataaacaaagaaaaattaaaacatggatgctttggttgccaagaagaaatgaaaaagtaacattaagattcaaagacttttttttcatatcaagaccctcaataaaaaccaatttcagccaggcatggtggtgcgcacctgtagtccagctactcaggaggctgaggcaggaggttcgcttgagcccaggagtttgagtccagcttgggcaacagagtaagacctcttctctaaaataatgaaaaatctaacaatgacattttgaaaactttcagaattatttaatctgattagcctaatctgtatattgagattagtaaaggtaggttttgttttgttttccaatcaggaatatcctcgcctctccgtcccccctgtatatacctgggagcctgagaatgtattttagtgctaccatgggaggaaggagaaagaatgactaaatggttcataaaaccaaacaaaccctgaaggttcacgccattctgcccagtgggccctgtggaacttcgtggggcttgtggtttaggcttcagagctttggggcttctggggtttctgtctatattattcctgcctggatgacatagtgaggtcttcactgctggagaagggagggctggtgggccagaggggagaccctgcagaggtgtgcagtgtccttctctgctgttcatctcaacccgctgtgttaggaaaccaggaggaagccctacctggaatgaaacaggtgcctagaatgaagagggtaaggacaaggtttaagactgtgacacctgttgcttaagagacgcatttaggagtgtggcatgtagatcccaaatgtccgttttgtaaaagttgttgttattgtttcacttttgttgttgttgtttgtttgttttgagatagagtctcactctgttgcccaggctggagtgcagtggtgcaatcacagctccctgcagcctcaaccacctggctcaagcactcctcccacctcagtctcccgagtaggcggggccacatgtgtgcactgccattcctggctaagttttcttttaattctttgtagagacagggtttccctatgttgcccaggctggtcttgaactcctggcttcaagcaatcctcacacttcagcctcctaaagtgctgggattacaggcgtaagccaccacgcccagcctgttgttattgctttgaaggagttcaggaaatgccacccccatggcacttgggagtgctgatccctgtgagctgagggcacttgggaatcagcggatgcaggcagaggtttcctctgagctccccttacctgcctgaagacggatcctccaaaaggaactcagctgtcatgaatcgcctccccaggaatctcgtcaatctgggaggattaacacagatcacaggagaggacactggaggtgacatcagcccagatgactatcacccgttctcccgaaggcggctctgagatgtttacgacctcagagacatttcatccacagagcagcacaacctttactcaccagacagtccctccccaggctctcccatcacttgtgttctcacctcccctggaagccccgggaacttcgaagtaggcttctgtggactcctgccacttcatcagtagctggggccctggtaccagcacaaactgcttgcatccaactgacttcaccagacatacgggcgtctttggtaagaccgctctcaggttttgaatctcccaggtttgggctgagattcagattttatttaagtaaatgaatttcatgctcagtgggactgatattgaagccgccatttagggctttaaggcaggagtttcgcgtcatttctctaaagattctgctattggcaggtttgtggtttcacttttctattaggttaagttttcgttcgtcttacttgctcttttgtaaccttttctctcattggacattttacttgctcaagtttgtaaccttttctctcattggacatttttttacttgctcaagtttgtaaccttttctctcatttgacatttggttaaagagaaagcagttttctttgtaaaaggagaaagtgaatgtttgtggcttaagccaaatttgtggctttaaaccagccaggctttggatcttggttaacattgagatttaaagtttcttcctgagtcacccaaaatttgtaaaaggttggaatgaggacgtgataagctgaagacaaaaaggactctttctcccagctgaaaggcaccttaggcaatggaggtaacacaagggtgtggaagctcacaacaaaccccagagaagaactcacagggagagctgcttaacccccggggcacacaacacacaaggggttcgtcacccagtgccttgaactcccagaaatgtctgggtttctctgaggtaggtaagagggaagaagctacttgtaggtgatacctccaggaataatccctactaagcagcacactggaccccaaacacttttcccttttagcctttgggcattttaaaagagaatccaaattatgagcaattatccatctataaccaagccctcattaagcaatgcacctttggaaactccagcggggtttatgtacaagacttatggcgccacctcctgtcgatagttggagaaatggtcttatttgacctaagaagatcctaaattacaatgatcaaagagaattatctttgaaatagctagattagtttatttatatgcacaattttaaaaagccagctatggaatcaaataaaataattaagagagttacttccaatggcacccagaagcatccaaaagaggttttgacagaattcttcccttagaggaagaaaataaaaagcactctaaaaccattactgaattttaaaaaacactgaaatgtcttcttctctccctgctcccctgtctctctaagcctccttgtcagaactacccagccctgattgaccttctcctcctcctcctcctgcccctcctcctgctcccactggtttggctccatttcatccagcatctggtagaggggaacctgctttatcaatcatgatcaaacttacaggcatagttaaaagaattccttgatcttcaccaggttcctattggttttgctaggaaatttgaattaaatatccaagcttatgaccctagttattctgacttctagcaacagattcacatgttagtagcaaaaattaaagctaaaggctggctagacaaagctcactggagaaatctgttagggatcttcataaatgttcagaagaggaccatagacaggcttgaagaacagcaaaggctttgcatcaggctatctcctcagtttttcagagtagtcaactggaacaaaatacaatatcaacaaaattcagatgagtcagtaatatactttgagggctgtggaaaaaattttaaagaatatttagttttatccgaagaaagctgtgctaatcatcgaaatgatactcgactccagtttaacaaatgagttagatgaattggaactaacaatgaaaagacaaagttgggccacttctgatactcatgatttggtcagtctcattgaccggttatctgataccttaactgaagaagaaagagagagggaagccaaacaaaagagcgaggctaatacaattatgaatttacaattaaaacaactattcacacaattttggccttcacaatacccctagaaactccctaatggacctaaccttccactttgcaatttttgcaaaaagcatgattactttcaaaagagttgccaaaaatgaaaaaggaaagaatgttaaccagtggaggcagaaaagaa

SEQ ID NO: 1882994 - DNA, 4001 bp, Homo sapiens
agctggcaggggtggtcaggcagggggtgagcaatgagggctcctgagctgaggaagcaggggcggggggaggatgggggctagggagtcctcagaagttcccggagatactccctcactggacagagtggggttcccgatgacgttacttgaggcctgggagacggcctctgcccctcactgctcctccccctcctaaggtcaacatttatgtgtcctagacctagagaggtcccaggacacgccactgtcccgccttccccattgcccgccccactggccagtccccacgcccacacacccaaggctgccccatctggcgctgattatcctgctgctgccgccaccgctgctgctgctctgcaaaattcagctgctgcctctgtcttgaggaccccagcgcctttcccccggggccatgctgcctgcagccacagcctccctcctggggcccctcctcactgcctgcgccctgctgccttttgcccagggccagacccccaactacaccaggtaggtctcttggcatcttccagacagctccagtgaacttcagacccccgattcctttggggttatgcctggagatattttgggttcccttgctgacacaccactccccagattccccaccgcctcacccttctctggcccccaaatcctccccatctgctgcaagaccttggtctcctgcaggccaccactgctcccattcccccaccttcgtcctctggtctcttaagtctccccacccacccagatccttgaccccccatagaacccaagagagagccaagctcctgaacttgcctggtagctggattccaggaaggaattcgagagggattgtagggggaggagggggcagtgagtggagacttgggagtcagaatctgaagtagtttggaacaggggcagggctaaggtgtggagctcgcggagcctggcctccaggttcaatcagagggccatcgccactgcagctccctccatctctccaccccctcccccccaccgcctcgtggctgtgtccacatctggaagtagttaggcggctcctgtccctggactgccaggcagagtgaggcgggagtctggaaggggggccgaggaggattccgggaattcctgttggggtgggggtggggactcttggggttggagggatggtcgagttgccaggcccacttttcccttatctttgtgggagtctgggacaccccagccctgtcctggctggtggaagctgccccaggtctctcaaggcctttccatttcatcccccagcttccctccttggagtttcatcctcatcacctcatccccatcttgccagtgctcccccgtcccacccgtccctgctctttcctgaccccttttctgttctccagacccgtgttcctgtgcggaggggatgtgaagggggaatcaggttacgtggcaagtgaggggttccccaacctctacccccctaataaggagtgcatctggaccataacggtgagaaacccctctgggcactaccccttgttaaagtctcagaggcaaaaaggcctgactgcgaagggaccccccccccgtcccccccgcaccaccttctcaacctggggcagctccaagtgtcttccctctgtcactgaaggcatcattcccaccgtaacacgcatcatcttaacccttccctcaaatcttcattctccagtccccggccctccctcctcttccaaagcctcagctcttgtcccctgcacaggctaccagcagagctgcagagaccaggccctctgctctgcactcacatggaggccccttcccattcagtccgtttctgcaagaaacgcttggggcaggggagctgccctctggctgggttgtgtggggcctgactctgtgggtccccgcctctgtccccgctatcaggtccccgagggccagactgtgtccctctcattccgagtcttcgacctggagctgcaccccgcctgccgctacgatgctctggaggtcttcgctgggtctgggacttccggccagcggctcggacgcttttgtgggaccttccggcctgcgcccctagtcgcccccggcaaccaggtgaccctgaggatgacgacggatgagggcacaggaggacgaggcttcctgctctggtacagcgggcgggccacctcgggcactggtgagaactccctcacctccgccttccccccctccaggccccgccccggccgcagccccgcccccagccctaacctccgccccgcccaccccgcgccccagtgcctagggccccctacctccctgacccattttcctcactaaccgccccttcagtccctcctccccgtcttctctcccctcctcccgcacccacccatccctcttccagggccccccccaggcgcgaggcggaaatgggtcaccgacccgcgggtggaatgggcggcctggggttactgggacggtgagtaactgccggcccccgtccgcaatcgggctccctccgtcgggcgcgagggggcaccccagggctggggggactaggttcctccaaccccggggggcccctacacccagccctgggctcccgattgcggtcccatcaccccctcctggcggcagaagtctcccttgcaatgtttcaggcggggacctccctaaaggggtcctcgggggctgtgccccaagtcgaggacaccctctccagcctgaaaggggactctgctgcagggccggggagatgggatctcctaggggaagaggcgcggtgcggccgcgggtcggggaggggccagaagggggcgtccagccagttcctcctcccgcttccaccgcccgccagtgcgccctgcggccccagacttccccgagccgcgctcctcccggccgctctctgttaacctgcccccatcttacctccccttcttctcgtcccctcatcctgagccccagacatccgagctgcctgccggggctcccagcctagagttctcctgaagctgaccgagggtctccaccgccccccacccccgctcctctctcccctccccagagcaccaattttgcggggggcggctggagaaggcccagggaaccctgaccacgcccaactggcccgagtccgattaccccccgggcatcagctgttcctggcacatcatcgcgcccccggaccaggtaccgaccctcctccccgggctgccctaggggacccaggcggcgccctccagcttgcagccagcagagatttattgaagatctgctgtgtcccgagcactgcgcttgcgctggtgggcacccaaaacagccccaacccctgcatgcacgcaaacaaaaatgtaaaaattacaactgagacaagtctcaggagagcgaggtacagggtcctggtataacacgcgggcctgtcacttgtgagtgcgccaggacttgaccttgccaaccacgacgaccgacacccctgcagggtcccatgggtgtgtgtggtcctccgtgctgtggtgtgaacgccttcaggaggggggcccagaggacgcgggaggtgggagtgggagctgctgcaggcacccagtaggagatgaggtgcaggcgcccaggggtgtcccgccgcgcagtccccgcctccgcccgccgccaggtcatcgcgctgaccttcgagaagtttgacctggagccggacacctactgccgctatgactcggtcagcgtgttcaacggagccgtgagcgacgactcccggaggctggggaagttctgcggcgacgcagtcccggggtgaggggcgggacctgggcgagtccgggagagagtcggcggaccgcacgcacgcggctgtttggaggggcggggttcagctaaagggacgggatctgaaccccagggctccaaaccggcgaggggagcaggttggaggccaggcaaagaggagatttggccccgggtctggggtccgcggatagagaggcgactggggctctgcgaagttgggacgaagttaaaag

SEQ ID NO: 1882995 - DNA, 4001 bp, Homo sapiens
acagtaagaatcacacaactgaaaagaataacgagacaccattttatttattcccctcactaggtttactttacctaaatcttctctagagttttcataaaagcctttggcagaaatacaaaattcttaggagagccatagtactttattaaatctccaccatggtattcataaacaattttcatatatgcatacagactatttactgtctgttgttttctagttctcaagttaaaatgtaattaccaccagaagttaagtttacattttccagttctagctctcctgctctttctggtgttttacacagaatcctagtacattaagaaaataaactctcagaatgcagttaaaagaaaacgccagttattataaaagtttccaatataattctttttttaacagctttattggggtatagctgatgtatgataaaccatatcttgttaaaaagcaacatttgataaattgttacgtatgcatctaggaaacattacaataatcacgataaagaacatatttatcttcctcagagtttcttggtgccccagtaaaatctctccctttgtagtctccatttgaatacaaaatgtagtgaatgaatgttcaaagagaaggtggcctacaaacatcaagcctttttggtatgtatcaacaaggaattatatcctgtatgcaaatacattaagaatgatattccaaccagatcttgaggacagtcacccagcaaagacaccactatctaaactgccactctattaaagaaaaacacactttggagtgtgtgtggtggtaaaaattactttatccactagtatttgaggagctccatagccagagtgaatcttcttaaccagtgtgagacagcaagattcagattctgttaggataaagctgtgtatatagggctaaaggagaataatgtagattaagtaataagtagcctgcccttaaccatggggactacatttcaagatgcctggttgatgcctgaaatcgaggatagtaccaaaccctgtgtatgctatgcattaattttttttcttcacaactgcacagatgaagtttggttcttacaatgtagatcttagccagcttagtatatatatattttctttccttattaacaacttaaaggaagcattctatggcttctctttggtatatctaattgttagcattactactcttgtgctttgggtccattaagaaatacagtaagagtttcttgaacaaaatcactgaaatactgggacaggtgataaccctaagtgactaacaatcagggagcacctatagagcagatactctgggcagaagaaggtgggactgcccaacatttcatcaggttactcagaacactgtatacatttacaacttatgaattatgtctggaattttctatttaatattttctgaccacagttgactgtaggtaattgaaactgtagaaagccaaaccacagataaggtgggactactgtattatttctcttcttctgtgtctttacctccatgggttatgaaagaaaaaaaaagaatttcactgaagcatacgcatgctgtgaagatacttttgcaggtatagttgctccagaaagaaagctgagactgggtattatgtgtatagaacactctcatatattaaaggcacacatttcagcaaagtgagaggactccaagatatatatgtatgtacacacacatacacacacaaaatttcaggactaaccttctagacggcaataaaaaattgccacaagagtatctgtgtttttggaagcatgttctgaatcaacagtgtctagcaactcaagttgaacatagttgtatgtgctagaggtagtgagttttaactggaaaatctcactgtttgcttgcatgctgtccacacagtgaaggacatggttgaaggcatagaaagaatatggtttactatgtctccatgatggaaagtaggttttcatatcctttaccatcctcacaagttcttcagaaagcttttttttttttttaaattgtgctttttccttctagtgtactttagttatttccttcaatttcctataactcctcattctaaattgttgagtctccactacacttttccgtggctgctgccacactctatgttactctgccatttgtattctggcttcacaatacatcagattattcctgaaggaactcaataccactggattgtggtccattatgttattagggtcatttctgctggaatcattttcacaagatttattgtttggtatctgtagatcttcagattagaccatcctttcctctccagcccttgattctgttgtctgcttcttttttattttagaatcattcactgaatccatttggtcaatactgtttgattagggaaagttattaagtcatcatacactgacaattaattatctacattcttgtcgatgtatttcttatttcctatatttccaggaaatctcttagaaatttttacttatggtagatataatccgctctaccagcagaccatgagattagccagtaaagctagctctgtaggcaaaatagaccatgctaataatatatgctattgcagtaaaatatgctatttcaatagtttctcatggatgataatagtgatttggaccaggattataattaagttgctatgaaaagtgtttgggttatgggtatatttagaaaataaaactggcaggattggatttggggtataaggaaaagtaaagagacaaaaaaatgacaaaaatttttagcttgaatactatgcagaataaatttaccatttcagagatttgcaggtggtaggaagaacaggtttggcagaggagatcaagagtttcattttggagatttaagtttcaggtagttacaggtctttggataataaagtatcacagctaatcctcttttctgagtattattaagatacagtttacctgtctatgaagaaatttcaaaggttatatggaaaatattgacagtcactacattaagtgtaattatgtcggaagaataccttttagggtggtcctggctgactattaggtatctatccttcagtttctttttcttcttagaaatttaaacacaaattaaacttaatcaaatataacattttaaaatcatttaaataaaataactagaaaattttgtacatctctttattcatttcaatatgaatatagaaagataattgaaatgatagtcaagaaatatcagtaacatttagtaaccaagggctggaaattgtggttgtacatttatttatttatttttatggaactgatttttaaaaaacatttctatattttttccatttttttataatgagaacatgttacttttacaatactatatatactaaaatgtaaagaaaagagtaacattactggtatgcactttgaatagaagttatgactccagggagatatgattgatcaaaagaaaaggattggataatcaccaaacttcctccatgccttccctcttggagatacaacctctttccaggaaacaaatgagcactaagaattgtcatatctttaaggatttagaatttttaacataattttaataatcctaccatttgtccacattaaaaaatgtaccatattaacaacagattaatccacaacaaaggattagaaccaaggtagaagagtcaacgaaattagaaaaattatttttcagaatagagatttaaaagaagcagccagtgaagtgagggtaacattgagattttgatgtccatgaagaaaacggtaatgaattcaaaaagaaagtactaagtttctactagatttggtgggctggtatttttctttccaaacaaacaagtctcttggataaaacataagaagcagacaaaaaatcgtaagaaagtgaaatacctaagtgccagaggtaacagagacagaatggtgagtggtatttgataattagtggctcaacaaagtacaaagtctacatacaggccttaaaactgg

SEQ ID NO: 1882996 - DNA, 4001 bp, Homo sapiens; identical to SEQ ID NO: 586802

SEQ ID NO: 1882997 - DNA, 4001 bp, Homo sapiens; identical to SEQ ID NO: 586803

SEQ ID NO: 1882998 - DNA, 4001 bp, Homo sapiens; identical to SEQ ID NO: 586817

SEQ ID NO: 1882999 - DNA, 4001 bp, Homo sapiens
agtgctagaagacgacataccccttttctgtcctagagggctccttcttggttctggagtctttgggctgtgaggcttgttctctgttgtgtgacgaagagaaaaggcctctcgcagtctggaaatggacacgtcccttttttcttctccagtccttaatgaaggggattgatcctgcttttctaccatgggcttttccaaatccgctgcatgcatttttattaagttacctaagcaaacgtggacggagaagagggtcagggactatcctgaaatggtgagaggacgtgcttatgtgaacagatacttcacaaaagaggagatccacatgctaattacacagatgaacacggttcaatgttcaaaataaaactataatatgggccaggtgtggtggctcacgcctgttatcccagcactttaggaggccaaggcagggggatcacatgaagataggagttcaggaccggtctggacaacatggcaaaaccctgtttctactaaaaatacaaaaattagccgggtgtggtggcacatctgtcatcccagctacttgggaggctgaggcacaagaatccctttagcccgggaggcagaggttgcagtgagccaagatgccaccactgctctccagcctgggtgacagagcaacactctgtctcaaaaaaaaaaaaaaaaaaaaaaacaaacccaacacaatgcgatatggccatatactcaccagaatgggtaaaattaaaaaaacaacaaatgctcacaaagatcaggatcaagcggaatgcttgaatacctctggtaggaatgaacctggtacagctgctttgaaaagttctctgggaatacctcctaaatctgaatgtatgcacacctgcaacccagcatagctactcctatcagaagtgcctatcggccggcacagtggctaatgcctgtaatcctagctctttgaggtcaggagttcaagaccagcctgaccaacatgctgaaacctcgtctctactaaaaatacaagaaaaatcagcagggcatagtggaatgcacttataatcccagctactagggagaatgagaatgaggcaggagaatcacttgaacctggaaggcaggggttgcagtgagccaagatcactccactgcactccagcctgggtgacagagtgagactccctctcaaaaaaaaaaaaaaaaagaagtgtctatctctatgctcgtcaaaagacgtggatgaggatgttcatgacggcattcttcattatagcccgaaactggaaacaattcaaatattcacaaattatgatatctgactataacggaacactgtatagcgaacaaaaaaatgaattttgccgcatgacttggatgaatctcacaaacaaaataatgagagaaagaaagaaatcacagaaaaggacagactgaataacttcaaattaaaaacagattaaactatactgttttggtttttgtttgtttgtgtgtctgtgtttctgagacagagtctccctctgtcacccgggctggagtgcagtggcacgatcttggctcactgtaagctccgcctcccgggttcacaccattctcctgcctcagcctcccgagtagctgggactacaggtgcccgccaccacacccggctaattttttatatttttagtagagacggggttttgccatgttggccaggctggtcttgaaatcctgatcttaacttatccgttcacctcagcctcccaaaatgctgggattacagggcgtggacggtgaaaccctgagcaagaccccgtctcaaaaagaaaaaaaaaaacttacatgaccataaattgttatctcattccagtcatagcagagttgtagaatttcattttattctttgaggcattagtcactagttgtactgaaatgccaatggaacttacctgaatcaacagaaatgttaagaacaacaaatggatactggtgtcgattatacacgcggtagacgtcattcacgagtctgcagacctgcacaaaatacaaggagtagaaaagaaaaaatgacaaatgtttccgaccccctgcattctaacaacatactattctaaccaaccagcatgttcttagaaggggatacttttttggttttttttttgagacaaggtctcgccttgtcacagcctggagtgcagtggagcaatcatggctcactgcagcctcaacctcccaggttcaagtgatccgcctgcctcagcctgccatgtagcttggactacaggcaggactttttttttttctttttttctttttttttttttttgagacggagtctcgctcttgttacccagactggagtgtaatggcgcgatcttggctcactgcaacctccgcctccagggctcaagtgattatcctgactcagcctccaaagtagctgggatcacaggcacatgccaccacgaccagataatttttgtatttttagtagagacggggtttcaccacgttggccaggctggtctcgaactcctgacctcagctgatctgcccgcctcgggctcccaaagtgctaggattataggcgtgagccactacacctggcctaaggatacattttttaacagctttactgagatatgactaacatggaataaactacacatatttaaagtgtgcaatttcataagttttgacatatacacaaacacctgtgaaactatccccacaatcaagataatgaatatatccatcaccaaaagtttcctcacaactctcaaagtgttatttctcggccgggcgcggtggctcatgcctgaaatcccagcgctttgggaggccgaggcgggcggatcccaaggtcaggagatcgagaccatcccggctaccacagtcaaaccccatctctactaaaaataatacaaaaaatgagccgggcgtggtggcgggcgcctgtagtcccagctactcgggaggctaaggcaggagaattacatgaacccaggagacggagcttgcagtgagccgagatggcgccactgcgctccagcctgggcgacagagcgagaccccgggaaaaaaaaaacaaaaaacaaagttgtatttctctaatcatagattcctaaaactgagtctttttccaacctaaagttgctctccgagaaattctagtgaaatgcgggcacagcttaaatgttcataaaacacattcaatgtacatagaaaagtatttatgacattaaaatgtaattagaaataaacctaaatatcacattattaatagttataattaataattattaatccatcacataagattccttattggccaggtgtggtggcttacacctgtaatcctagcactctgggaggccaaagtgaaaggatcacttagaccaggagtttgagaccagcctgagcaatacagtgagaatacatctctaggccaggagcagtggctcacgcctgtaatcctagcactttgggaggccgaggcgggcagattgcctgagctctgcctgagctcaggagttcaagaccagcctgggtgacacggtgaaacccagtctctactaaaatacaaaaaaaattagccgggtgtggcagcgtgcgcctgtagctgtgcaggaggctgaggcaggaggatcgtgtgagcccaagagattgaggctgcagtgagttgtgatcacgtctctacactccagcctgggtgacacagcaagaccctatctcaaaaaaaggaaaaaagaaacagaacaaaacagaacaaaacagacttcatcatttaaagacaagcagaaatacttacagacgaatctttttaaaagccaagaaaagagagactccatggagaaagtatcagtttggaagtaacagatgtcaaaggcagacaaagggtcctgggaggtaggggctagaaaatgcccgctggattcgactgcaatgaaatcattggtaatctttacagactgactcagcaacgtgaaaaggacaaaactaaaacactgagaactgaaatgagaaacagaaat

SEQ ID NO: 1883000 - DNA, 4001 bp, Homo sapiens
tgggccccaaactaccttcttttcagaatctctctgatcctttcccttcatcaagtcccctacattattattattattattattattattatttgagacagagtctcaccctgtcacctgggctagagtgcaatggcatgatctcggctcactgcaacctccacctcccaagttcaagtgattctcctgtctcagcctcccaagttgctgggattataggcatccaccattacactcagctaatttttgtgtttttagtagagatggggtttcaccatgttggccaggctggtttctaactcctgacctcaggtgatctgcccgccttggccttccaaagcactaggattacaggtgtgagccaccgcaactggccgtcccctatattgcagcacagtgaacaactgtttcctgaacatcacaagctctcttagacactacagtgtataagcaggtctctgtctaaactgctctcctcttgcccctctgcccaaccaatgtctgctcatccaaagaatgtatcccgtgtgttcattaacttagcaagttcccagtaaacagtttaattgatcactcgttaagagaaggcgggaaacctccatgaaaagagaaatcagtgggtatttcctacagcatttaacacatcgtaggccttcaataaacccttgtgaaataaacaaacctctttactcttcattctatgttgctaagaatctcacctaagtctgtctaccatgtgaaactgcagatgacctcacagaaaatggaaagaagtatctctaaaaataagtttatttggcaacacactacaggctacaggttcacttctgattttttttctttttttttttgagatggagtcttgctgtgtcacccaggctagactgcagtggtgcaatctcagctcactgcaacctctgtctcctgggttccagcgattctcctgcctcagcctcccaagtagctaggattacaggcgcctgccaccacgcccagctaatttttgtatttttagtagaaatgggatttcaccatgttggccaggctggtcgtgaactcctgacctcatgatccacttgccttggcctcccaaagtgatgggattataggtgtgagccaccgcacctggtccacttcagatatttagatacagacggcaaatttatttaaatgtctcaatacatttaaatgtagttacctaaatatatctaatatatttaaatgcagagagcaaatttgcgtttacaaatctgacatggaattcaactgtgctagccaagattcggtgtagcttaccagccagaaatcacataccctaacaggtaaaaatgcattgcattttttaaaactgagcagctacgcaaattaggatgtgtctggacgctctactgtccccaaaataacctcaatttttttttaaaaggccaggcacagtgcattacgcctgtaattccagcgctttggggggccaaggcgggcggactgcttgagctccggagttccagaccagcttgggcaacatagcgaaatccccgtctctacaaaaaaataaaataaaaattaaaaataaaataatataaaaataaaaataaaaggggagagagaacaggtagaaaggaaatgcattcagtctatggggatttcacgttccggcttcaagtccacggccctgtgatgggatgtgggcagggcctgagacaggccgaacccaactcttcacagggccgaattctttgcccgcagcccagcaccccgaaggagcttgcctcggcttcaaggcgcacctaatgggcaccggatcgctggggcgctgaggatgccgctccggggcctccacgaggcggcctcccacgcgcctcggccatgttccccccatttccagggaggttggaagccgtggttctcaaagagggcgcgcgagaggggcgaccgcgagcccagctcacctcgagctctcagctctctccaaggatgcaacaccggatccgcctcggggactgggaaagtgccctcaacggctcccacaggcgccccgcctcctgggctcccattggctgctttcgacgttgtgctccaccctttccgggcggggcggaaaaaatacttcccgtctctccttttcgcctagtggctctgtcaaaggtcgagtccgtgacgtcaaagagcctggaccaatcagagcacaccggactgcgtttttttttttttttttccgaacgcccgcagcagggtcagaagggaggtggtcgccctccgtcgtggtctggcgtgtattccgagccttggtgtctggcggtttccaagcgttggtgtctggcggtttccgaccgttggtgtctggcggtttccgaccgttggtgtctggcacgcgccaccctctcttgctttggttgcgccatgccgatgtaccaggtaaagccctatcaccgggtctgcgcccctctccgtgtggagcccacctgcatgtactggctccccaacatgcacggcaggagcggcggcccagcacttggcactggccacttgcaggtaggagcgcggggccccccgcccactgcgcacgcgcggcggccgggtgctggcccgggtgcccctaggccggatagagtgcgtcccaaccgattcgcggccccaccccggcatctgtgccggccggccaggggcttacccagatttttatgttttaaaagatttattcaggccgggcgccgtggctcacgcctgtaatcccggcactttgggaggccgaggcgggcggatcacctgagatcaggagttcgagaccagtctggccaacatggtgaaaccccgtgtctactaaaaatgcaaaaattagccgggcgtgtgtcgggcgcctgtaatcgcagctactcgggaggctgaggcaggagaatggtttgaaccctggaggcggagcttgcagtgagctgagatcgagccattgcactcgagcctgggcagcaagagtgaaactccgtctcaaaaaaaaaaattattatatacatatatatctttatatatattaaatatacctttattatgcgtattatacatattgtatattatgtgtaatatatgacataatatattataaaatatattgtatattatatatatatatatttttttcctggtcgagcgcggtggttcacgcctggaatctcagcgctttgggagaccgaagcgggaggattgcttgagcccggagagtttgagaccaccctgagcaacatagcaagacccttgtctctatgtttttttttttttttgagttggagtcttgctctgttgcccaggctggaatgcagtggcctgatctcgactcactgcaagctccacctcccgggttcacgccattctcctgcctcagcctccccagtagctgggactacaggcgcccgccaccacgcctggctaactttattttgtatttttagtagagacatggtttcaccgtgttagccaggatggtctcgatctcttgacctcgtgattcgcctgcctcggcctcccaaattgctgggattacaggcgtgagccaccacgcccagctgccttgtctctattttttaaatgttttaattaaaataaaaatctatccatattttttcttttttttttgcgtatggctgcttaaacattttagttcagaattctatcctctgaaaagtgaatagcacataaatgctcattttgaggaattacaaagcgaaccccagggtcaccacctcccaggttgacacacattgtcaccgctccattctttccacttaaaccttccccaccagcaccccagggcctgatttttatggtaattatgtcatgcttgtctctattattttgtcagctaagtatccctaaacaatgtggtctggttttttgtttgtttgtttgttttgtttttttcagacggagtttcactctgtcacccaggctggagtgcagtggcatgatctcagctcactgccaccttggcctcctgggttcaagcaattctcagg

SEQ ID NO: 1883001 - DNA, 4001 bp, Homo sapiens
catcacaagctcttttaaacactacagtgtataagcaggtctctgtctaaactgctctcctcttgctcctctgcccaaccaatgtctgctcatccaaagaatgtatcccgtgtgttcactaacttagcaagttccagtaaacagtttaattgatcactcgttaagagaaggcaggaaacctccatgaaaagagaaatcagtgggtatttcctacagcatttaacacattgtaggccttaaataaacccttgtgaaataaacaaacctctttactcttcattctatgttgctaagaatctcaccaaagtctgtctaccatgtgaaactgcagatgacctcacagaaaatggaaagaagtatctctaaaaataagtttatttggcaacacactacaggctacaggtccagttctgattttttttcttttttttttttgagatggagtcttgctgtgtcacccaggctagactgcagtggtgcaatctcagctcactgcaacctctgtctcctgggttccagcgattctcctgcctcagcctcccaagtagctaggattacaggcgcctgccaccacgcccagctaatttttgtatttttagtagaaatgggatttcaccatgttggccaggctggtcgtgaactcctgacctcatgatccacttgccttggcctcccaaagtgatgggattataggtgtgagccaccgcacctggtccacttcagatatttagatacagacggcaaatttatttaaatgtctcaatacatttaaatgtagttacctaaatatatctaatatatttaaatgcagagagcaaatttgcgtttacaaatctgacatggaattcaactgtgctagccaagattcggtgtagcttactagccagaaatcacataccctaacaggtaaaaatgcattgcattttttaaaactgcgcagctatgcaaattaggatgtgtctggacgctctactgtccccaaaataacctcaatttttttttaaaggccaggcacagtgcattacgcctgtaattccagcgctttggggggccaaggcgggcggactgcttgagctccggagttccagaccagcttgggcaacatagctaaatccccgtctctacaaaaaaataaagtaaaaattaaaaataaaataatataaaaataaaaataaaaggggagagagaacaggtaggaaggaaatgcattcagtctatagggatttcacgttccggcttcaagtccacggccctgtgatgggatgtgggcagggcctgagacaggccgaacccaactcttcacagggccgaattctttgcccgcagcccagcaccccgaaggagcttgcctcggcttcaaggcgcacctaatgggcaccggatcgctggggcgctgaggatgccgctccggggcctccacgaggcggcctcgccacgcgcctcggccatgttccccccatttccagggaggttggacgccgtggttcttaaagagggcgcgcgagaggggcgaccgcgagcccagctcacctcgagctctcagctcgctccaaggatgcaacaccggatccgcctcggggactgggaaagttccctccacggctcccacaggcgccccgcctcctgggctcccaacggctgctttcgacgttgtgctccaccctttccgggcggggcggaaaaaatacttcccgtctctccttttcgcctagtggctctgtcaaaggtcgagtccgtgacgtcaaagagcctggaccaatcagagcacaccggactgcgttttttccgaacgccagcagcagggtcagaagggaggtagtcgccctccgtcgtggcctggcgtggattccgagcgttggtgtctggcggtttccgaccgttggtgtctggcacgcgccaccccgatgtaccaggtaaagccctatcacggggtcggcgcccctctccgtgtggagcccacctgcatgtactggctccccaacatgcacggcaggagcggcggcccagcactcggcactggccacttgcaggtaggagcgcggggcccccccgcccactgcgcacgcgcggcggcccgttgctggcccaggtgcccctaggccggatagagtgcgtcccaaccgattcgcggccccaccccggcatctgtgccggccggccagggggtcacccagatttttatgttttaaaagatttattcaggccgggcgccgtggctcacgcctgtaatcccggcactttgggaggccgaggcgggcggatcacctgagatcaagagttcgagaccagtctggccaacatggtgaaacctcgtctctactaaaaatgcaaaaattagccgggcatgtgtcgggcgcctgtaatcccagctactcgggaggctgaggcaggagaatggtttgaaccctggaggcggagcttgcagtgagctgagatcgagccattgcactcgagcctgggcagcaagagtgaaactccgtctcaaaaaaaaaattattatatatatatatatttttatatatgttaaatatacctttattatgcgtattatacatattgtatattatgtgtaatatataacatgatatattataaaatatatattatatatatatatatctttcctggtcgagcgcggtggttcacgcctggaatctcagcgctttgggagaccgaagcgggaggattgcttgagcccggagagtttgagaccaccctgagcaacatagcaagacccttgtctctatgtttttttttttttttgagttggagtcttgctctgtcgcccaggctggaatgcagtggcctgatctcggctcactgcaagctccacctcccgggttcacgccattctcctgcctcagcctccccagtagatgggactacaggcgcccgccaccatgcctggctaacttttttttgtatttttagtagagacatggtttcaccgtgttagccaggatggtctcgatctcctgacctcgtgattcgcctgcctcggcctcccaaattgctgggattacaggcgtgagccaccacgcccagctgccttgtctctattttttaaatgttttaattaaaataaaaatctatccatattttttctttttttttgcgtatggctgcttaaacattttagttcagaattctatcctctgaaaagtgagtagcacataaatgctcattttgaggaattacaaagcgaaccccagggtcaccacctcccaggttgacacacattgtgaccgctccattctttccacttaaaccttccccaccaacatcccagggcccgatttttatggtaattatgtcctgcttgtctctattattttgtcagctaagtatccctaaacaatatggtctggttttttgtttgtttttgtttgtttgtttttttcagacggagtttcactctgtcacccaggctggagtgcagtggcatgatctcggctcactgccaccttggcctcctgggttcaaggaattctcaggcctcagcctcatgagtagctgagattacaggcgctgtccactgcacctggctaatttttgtatttttagtagagacggggttttgccatgttgaccaggctggtcttgaactcctgacctcaggcgatccgcccgccttgaactcccaaagtgctgggattacaggtgtgagccaccgtgcccggcacctaaacaacatagttttgatataggtaagcatacagcatatattttgatgtatttcaggtaatttagtctaagaacaggaaaggacagaaaatgaacacaatttgtagttctttgttgttaacaaactaagaatactttgcttaaataagtagcaatgagaatgtaactcagtaattcatacaaatagacaagaagacaagaaaatgatttgaggacagcttcaatcgcggtgtgaagaagaaagcaacaaaacgaccactgaaaacaatgccggtgagtcagccagttttgtttttgaatcttgtcagggaagcagc

SEQ ID NO: 1883002 - DNA, 4001 bp, Homo sapiens
ttcaccacattggccaggctggtctcgaattctggcctcaagtgatccacctgcctcgggccaacatggcaaaaccccgtctctacttaaaaatagcaaaaaaattagccaggcatagtgtcacatgcctgtagtcccagctactcaggaggctgaggcacaagaatcatttgaatctgggaggtggaggttgcagtgagcggagaccacgctgttgcactccagactgggtgagagatactgtctcaaaaaaaaaaaaaaaaaaaaaaaaaagtgataggggaagcatgcacttgtaactttgtaactctaagataatcagatagtaattaggtgagttaagactctcatgggtaacatggtctgccatcaagtacaacgtgcaaaaagaaaaaaatttcccattatacagctcatgatttttgtggtttgtttgctgagacagggtctcaatctgccacccaggctggagtgcagtggtgcattcacggctctctgcagcctcgacctcctgggctccatccatcctcccacttcagcctcctgagtagttaggaccacaggtgcatcccagcatgcctggctgcttttgtattttttgtagagtcagggtctccctatgttgcctaggctggtctctaactcctggtctcaagggatactcctgctctaggcccgcaaagtgctgggattacaggtatgagccactgcatccggcccgcgttttcttattgtctctctaaactgcttaaaatcaaagaagccataggaattgaatatgtgagctctcagaaatgaaatgaatgtgtataaaatatggttttgtttctaaattatctaactgaacttggttattgctgcacctaataatcttctattaagaaaactaggatacgggagaaagagcactggcctgggagataagactcctgagttctactatgagtaattccatccacaaagccagtgacctggtcaagtcacccacctgctaaggcccagtctcttcccctagcaactgaggcagcaggagagaatccctgcaggctgttcctgcattactacgattctcccagggcagatctaaggggcgaatcagcagacacttaaatgagagaacagaggtgctgagggacgtttagaggcggtcgaaatctggagcacggagaggaggaggaagggctgttaggggttagcggggagtggagacgacgtccgcagctgagggtggtgacaccctccacgcccccgtaagcctcgtcctcccagatcttcccatgcagcgcctgttccgtgcagccggaccctgccctcgaacccaaacacacgtctctcctgcaagcgatcgggaccctccccctgccccacactcaaaggtccccaacacacggtgacttcacccaggcccttctcgctctgggcccgaaaatcccagacttaccctcctggggctccgcagcctctgccccccggctcccgagaggccggggcggggctgctgtcgctggcgcgcgcgtctgctcgcgaggtcccctcctgtccacctcaccaaggctgttctgctcccgaggggcccgggccgggcctacggggcaaatccaggcgggtgtccttctgggggcccagatccgcctccctggggctcaccatacagcgacggcctagtctaggccgccaaggacacatacgggccaggcccgggtcccgccgccccttcgcctccgccgccacttcgcctccgccgccacctcagccgactccctcccggcccctctggccccagcgccgccgactccggggctcacgctccggggtccccgcttgagcctccacccggcccgcgcgaaccctggtctgcacagctccgcgtccgcctaggtgctggcccgggcggtcagcatccagccccgcaggctatgcgatgctcgtccactgcaggccaaaccctaggaacgagagcaagcggcgacctgaagactcacaggaagcgagggcagtgcggcggcagcgcgcatgcccgaacacgcacgccgggagaggtgcacacgcgcaggagtgcaccggaagtccgcctcccagggcccactgctggtctccggacaagtactggactctatttcccatgagcctatgcgcctcacaagtttaggggcggttttaaatgtctctaccccgcctagaggataagaaactccaggctatgagctttggcagccctgaacaccggactgaacttcacgtttgtctttactcccttttagtccagggctgccttactgggtcctggagcccaagtcctctgggttagaaccgagtttcccataaggagaaggaaaggaaagggtgtctcttggtcactgcgctgaaatgctaagagaagtttcactcaaatactaggacaggataaatgcccagcgatgctttccaaggaacaaaaagaaaaaagaacttgtagccgggcgcggtggctcacgcctgtaatcccagcactttgggaggccgaggcgggcggattgcgaggtcaagagatagagaccatcctggccaacatgatgaaaccctgtctctactaaaaatacaaaatttagctgggctaaattcgagttctctcgaattccacttttgctcagtttttctttgtcagcactcattgtcaggagtgtttaagtgctgtacctggatccactcacctcagcctcccatgttgctgggactacaggtgtgcaccaccacacctggctatttattattattattttttgtagagatggggtctccctatgttgcccagagtggtcttgaactcctggactcaagtgatccactcacctgagcctcccaaagtgctgagattataggtgtgagccactgtgcccggccaactactgttctttttaaattaccaggtctcaggtactgttaaagcagtacaaatgaactaagaaactgactgtagtaaaaatacattaaacttggttattttattttttatttatttatttttattattatcatttttttgatatggagtctcactctctcacccaggctggagtgcagtggcgcgatctcagttcactgcaacctccaccgcctgggttgaagcagttcttcttctgtctcagcctcccgagtagctgggtttacaggcgcccaccaccacgcccagctaatttttgtatttttagtagagacggggtttcgccatgttggccaggctggtcttgaactcctgacctcaggtgatccgcccacctcggcctcccaaagtgctgagattacaggcgtgagccactgcacccatcctaaagttggttattttatttatttatttatttatttatttatttattttgagacagagtttcgttcttgttgcccaggttggagtgcaatggcgcgttcttggctcatagcaacctctgcctcccgggttcaagcaattctcctgcctcagccttccgagtagctggtattacaggcatgcgccaccacgcccggctaattttgtatttttagtgggggggtggggtggtttctccatgttaggctggtcttgaactcctgacctcaggtgatccacctgcctcggccttccgaagtgctgggattacaggcgtgagccaccgtgcctggcctcagttattttaaatagagaaaatcctcaaggctccattatggacccttttcttttcttgtactctttccttctgttatggctttaggtacgattcaattcccatgacctctgacttctctgagttaaactttgcatcttcatgggaatgtttcaaaggcaactcagctgaggccaggtgtggtagctcacacctataattccagcactttgggaggcagaggcaggatgattgcttgaggccaggatctggaggctgcagtgagttatgactgggccactgcactccggcctgtgtgacagcgcaaaatctcctgtcccggactttttttttttaaaaaaaaaaaggcaattcagaccggat

SEQ ID NO: 1883003 - DNA, 4001 bp, Homo sapiens
agaatctctctaatcctttcccttcatcaagtcccctacatcatcaccattattattatttattattattattatttgagagtgctcaccctgtcgcccaggctagagtgcaatggtatgatcttagctcactgcagcctccgcctcccaggttcaagcgattctcctgtctgagcctcccaagtagctgggattacaggcacccaccatcacacccggctaatttttgtgtttttagtagagatggggtttcaccatgttgggcaggcttgtcttgaactcctgacctcaggtgatctgccctccttggcctcccaaagcgctaggattacaggtgtgagccactgcaaccggccgtcccctatattgtagcgcagtgaacaattgtttcctgaacatcacaagctcttttaaacactacagtgtataagcaggtctctctctaaaccactctcctcttcctcctctgcccaaccaatgtctgctcatccaaagaatgtatcccgtgtgttcattaacttagcaatttccagtaaaccgtttaattgataacttgttaagagaaggcaggaaacctccatgaaagagaaatcattgggtatttcctacagcatttaccacattgtaggccttcaataaacccttgtgaaataaacaaacctctttactcttcattccaccttgctaagaatctcacctaagtctgtctaccatgtgaaactgcagatgacctcacagaaaattgaaagaagtatctctaaaaataaatttattaggcaacacactataggctacagtccacttctgatttttttttttttttttgaggcggagtcttgctgtgtcacccaggccggactgcagtggctcgatctcagctcactgcaacctccgcctcctgggttccagcgattctcctgcctcagcctcccaagtagctgggattacaggcgcccgccaaccatgcccagttaatttttgtatttttagtagaaactggatttcaccatgttggccaggctaggcatgagctcctgacctcatgatccacccgccttggcctcccagagtgctgggattataggtgtgagccaccgcgcccggcccacttcagatatttattttcaggagggagcgcatttagatacagaccgaaaatgtatttaaatgtgaatacatttaaatgtagttacttaaatctatctaatatatttaaatgcagagagcgaatttgtgtttacatatctgacatggaatgcaactgtgctagccaagattcggtgtagcttaccagccagaaatcacatatcctaacaggtagaaatgcattgcattttgtaaaactgcgcagctatgcaaattaggatgtgtctggacgctctaccttccccaaaataacctcaattttttaaaaaggccaggcagcgtgcatcaggcctgtaattccagcaccttggggggccaaggcgggcggattgcttgagctcaggagttcgagatcagcctcagcaacatagcgaaatccccgtctctacaaaaataaaaaattaaaaattaaataatataaaaataaaaataaaaggggagagagaacaggtagaaaggaaatgcattcagtctatggggatttcacgctagggcttcaagttcacggccctgtgatgggatgtgggcagggcctgtctgggacaggccgaacccagctccttacagggccgaatcctttgcccgcagccaaagaccccgaaggagcctgcctcggccttaaggcgcaaccaaggagcactggatggctggggcgctgaggacgccgctccggggcctccacgcctcgccacgcccctcggccatgttccccccatttccagggaggttggaacgccgtggttctcaaggaggacgcgcgagaagggagaccgcgagcccagctcacctctagctctcagctcgctccatggactcaatacccgatccgcctcggggcctgggaaagttccctccacgactcccacaggcgccccgcctcctgggctcccattggctgcttttgacgttgtgctccaccctttctgggcggggcggaaaaaatacttcccgtctctccttttcgcctattagctccgtcaaaggtcgagtccgtgacgtcaaagagcatgggccaatcagagcacaccggactgctttttttttttttcccgaacgaccgcagcagggtcacaagggagatgtccgcccccagtcgtagcctcggacggtttctgagcgttggtgtttggcacgcgccaccctctcttgctttggttccgccatgccgatgtaccaggtaaaaccttatcacgggcgcggcgcgcctctccgtgtggagcttcccacctgcatgtaccggctctctaacgtgcaaggcaggagcggcggcccagcgcccggcgttggccacctacaggtaggagcgcgggcccctccttcccccccaccccgcgccaagtgcgcacgcgcggcggccggctgctggcccgagtccccccgggccggaacgagtgtgtcccacccggtttgcggtcccacccggttcgcggtcccaccccggcatttgtgccggccggccagggactcacccaaacctttatgttttaaaagatttattcaggccgggcgccgtggctcacgcctgtaatcccagcactttgggaggcccaagcaggcaggtcacctgaggtcaggagttcgagaccaacctgaccaacacgttgaagcctcgtctctactaaaaatacaaaaatcagccgggcgtgtggcgggcgcctgtaatcccagccactcgggaggctgaggcaggagaatcgtttgaaccctggaggcggagtttgcagtgagctgagatcgagccattgcactcgagcctgggcgacagagctagactccgactcaaaaaaaaaaaaaaaaaatagagacaagggtctcactatgttgctcacgctggtctcagactctcagggctcaagcaatcctctcgcctcggtctcccaaagcgctgagataccaggcgtgaaccaccgcgcccgactaggaaaaaaaaaatatatatatatatatatatatatatatatatatatgtacacgtgtatgtatatatacatatatatacacacgtatatgtatagatatatacgtatgtgtatatatttcttttatacgtatatatataacatttttgtttttttgagacattttgagaataattttttttttatatggctgcttaaacatgttagttcagagattctgccctgtgaaaagtgaatagcacataaatgctcattttgaggaattacaaagcgaactccagggtcaccacctcccaggttgacacacattgtcaccgctccattctttccacttaaaccttccccccaaccccctcaaggtcctgatttttatggtaattatgttctatttgtgtctattattttgtcacctaagtatccctaaacaatatagtctgggtttttatttgtttttttttttgttgtttttttcagacggagtttcactgtgtcacccaggctggagtgcagtggtgtgagctcggctcactgcaacctctgcctcccgggttcaagcagttctcccatctcagcctcctgagtagcttggattacaggtgcacgccaccacacccaactaatttttgtatttttagcagagacggggtttcaccattttggccaggatggtcttgatctcttgacctcatgatccacccgcctcagccttccaaagtgctgggattacaggtgcgagccaccatgcctggccttttatttctttttttgagcccattctctccctgttttatttttaaaattttattaaacatagtcattttataatctatgatagatgattatctaaagtgtttgtgaaataattttgtcagtgccttgtttctttatatgttttactaggtttattgtgagccactcattttccctggagttctt

SEQ ID NO: 1883004 - DNA, 4001 bp, Homo sapiens
tttcccttcatcaagtcccctacattattattattattattattattattattattattattattatttgagacagagtctcaccctgtcacctgggctagagtgcaatggcatgatctcggctcactgcaacctccacctcccaagttcaagtgattctcctgtctcagcctcccaagttgctgggattataggcatccaccattacactcagctaatttttgtgtttttagtagagatggggtttcaccatgttggccaggctggtttctaactcctgacctcaggtgatctgcccgccttggccttccaaagcactaggattacaggtgtgagccaccgcaactggccgtcccctatattgcagcacagtgaacaactgtttcctgaacatcacaagctctcttagacactacagtgtataagcaggtctctgtctaaactgctctcctcttgcccctctgcccaaccaatgtctgctcatccaaagaatgtatcccgtgtgttcattaacttagcaagttcccagtaaacagtttaattgatcactcgttaagagaaggcgggaaacctccatgaaaagagaaatcagtgggtatttcctacagcatttaacacatcgtaggccttcaataaacccttgtgaaataaacaaacctctttactcttcattctatgttgctaagaatctcacctaagtctgtctaccatgtgaaactgcagatgacctcacagaaaatggaaagaagtatctctaaaaataagtttatttggcaacacactacaggctacaggttcacttctgattttttttctttttttttttgagatggagtcttgctgtgtcacccaggctagactgcagtggtgcaatctcagctcactgcaatctctgtctcctgggttccagcgattctcctgcctcagcctcccaagtagctaggattacaggcgcctgccaccacgcccagctaatttttgtatttttagtagaaatgggatttcaccatgttggccaggctggtcgtgaactcctgacctcatgatccacttgccttggcctcccaaagtgatgggattataggtgtgagccaccgcacctggtccacttcagatatttagatacagacggcaaatttatttaaatgtctcaatacatttaaatgtagttacctaaatatatctaatatatttaaatgcagagagcaaatttgcgtttacaaatctgacatggaattcaactgtgctagccaagattcggtgtagcttaccagccagaaatcacataccctaacaggtaaaaatgcattgcattttttaaaactgagcagctacgcaaattaggatatgtctggatgctctactgtccccaaaataacctcaatttttttttaaaaggccaggcacagtgcattacgcctgtaattccagcgctttggggggccaaggcgggcggactgcttgagctccggagttccagaccagcttgggcaacatagcgaaatccccgtctctacaaaaaaataaaataaaaattaaaaataaaataatataaaaataaaaataaaaggggagggagaacaggtagaaaggaaatgcattcagtctatggggatttcacgttccggcttcaagtccacggccctgtgatgggatgtgggcagggcctgagacaggccgaacccaactcttcacagggccgaattctttgcccgcagcccagcaccccgaaggagcttgcctcggcttcaaggcgcacctaatgggcaccggatcgctggggcgctgaggatgccgctccggggcctccacgaggtgacctcgccacgcgcctcggccatgttccccccatttccagggaggttggaagccgtggttctcaaagagggcgcgcgagaggggcgaccgcgagcccagctcacctccagctctcagctctctccaaggatgcaacaccggatccgcctcggggactgggaaagtgccctccacggctcccacaggcgccccgcctcctgggctcccattggctgctttcgacgttgtgctccaccctttccgggcggggcggaaaaaatacttcccgtctctccttttcgcctagtggctctgtcaaaggtcgagtccgtgacgtcaaagagcctggaccaatcagagcacaccggactgcgttttttttttccgaacgcccgcagcagggtcagaagggaggtggtcgccctccgtcgtggtctggcgtgtattccgagcgttggtgtctggcggtttccgagcgttggtgtctggcggtttctgaccgttggtgtctggcggtttccgaccgttggtgtctggcacgcgccaccctctcttgctttggttgcgccatgccgatgtaccaggtaaagccctatcacggggtctgcgcccctctccgtgtggagcccacctgcatgtactggctccccaacatgcacggcaggagcggcggcccagcacttggcactggccacttgcaggtaggagcgcggggccccccgcccactgcgcacgcgcggcggccgggtgctggcccgggtgcccctaggccggatagagtgcgtcccaaccgattcgcggccccaccccggcatctgtgccggccggccaggggctcacccagatttttatgttttaaaagatttattcaggccgggcgccgtggctcacgcctgtaatcccggcactttgggaggccgaggcgggcggatcacctgagatcaggagttcgagaccagtctggccaacatggtgaaaccccgtgtctactaaaaatgcaaaaattagccgggcgtgtgtcgggcgcctgtaatcgcagctactcgggaggctgaggcaggagaatggtttgaaccctggaggcggagcttgcagtgagctgagatcgagccattgcactcgagcctgggcagcaagagtgaaactccgtctcaaaaaaaaaaattattatatacatatatatctttatatatattaaatatacctttattatgcgtattatacatattgtatattatgtgtaatatatgacataatatattataaaatatattatatattatatatatatatattttttttcctggtcgagcgcggtggttcacgcctggaatctcagcgctttgggagaccgaagcgggaggattgcttgggagaccgaagcgggaggattgcttgagcccggagagtttgagaccaccctgagcaacatagcaagacccttgtctctatgttttttttttttttttgagttggagtcttgctctgtcgcccaggctggaatgcagtggcctgatctcggctcactgcaagctccacctcccgggttcacgccattctcctgcctcagcctccccagtagctgggactacaggcgcccgccaccacgcctggctaactttattttgtatttttagtagagacatggtttcaccgtgttagccaggatggtctcgatctcttgacctcgtgattcgcctgcctcggcctcccaaattgctgggattacaggcgtgagccaccacgcccagctgccttgtctctattttttaaatgttttaattaaaataaaaatctatccatatttttttttttttttgcgtatggctgcttaaacattttagttcagaattctatcctctgaaaagtgaatagcacataaatgctcattttgaggaattacaaagcgaaccccagggtcaccacctcctaggttgacacacattgtcaccgctccattctttccacttaaaccttccccaccagcaccccagggcctgatttttgtggtaattatgtcatgcttgtctctattattttgtcagctaagtatccctaaacaatatggtcaggttttttgtttgtttgttttttttgtttttttcagacggagtttcactctgtcacccaggctggagtgcagtggcatgatctcagctcactgccaccttggcctcctgggttcaagcaattctcaggcctca

SEQ ID NO: 1883005 - DNA, 4001 bp, Homo sapiens
ctaaaaatacaaaattagccaggcgtggtggtgcatgcctgtaatcccagctacttgtgaggctgaggcaggagaatcgcttgaacctgggaggtggaggttgcagtgagttgagatcgtgccattgcaccgcagcctcggcaacaagagcaaaactctatctcaaaaaaaaaaaaaaaagaaaaaaaaacagaactggttctggaatcagacttcctagattctattttattagctttataatctcaaaaaaaggaaatttactgtcccttaatttcctcaactgtaaaatggaggtaataagttctatctcataaagttatttggcagattaataatttttttttaattttgtcattttcttttttttctttcctttttttttttttttttttaattttttgagatggacttttgctcttgtcacccaggctggaatgcagtggcacaatcgatcttggctcactgcaacctccacctcccaggtttaagcaattctcctccctcagccttctgaggagctgagattacaaccatgcaccatcacatctggctaatttttgtatttttagtagagacagggttttaccacattggttaggctggtcttgaactcctgacctcaaagcatcagcccccctcagcctcccaaagtgctgggattacagatgtgagccactactccaggatttattttattttattttattttatttttttgagacagagtcttgctctgtccccaggctggcgtgcagtggcacaatctcggttcactgcaacctccacctcccaaatttaaacaattctcattcctgagcctccccagtagctgggattacaggcttctgccaccaggtctggctaatttttgtatttttagtagagacagagtttcaccattttggacaggctggtctcgaattcctgacctcaggtatccacccgccttggcctcccaaagtgctgggattacaggcgtgagccaccacacccggcctgctttattttttaatagagacgaggtctccccatgttggccaggttggtcttgaactcttggcttcaagcaatccccccacctcagcctctcaaagggctaggattacaggcgtcagacaccacgcccagctattctgcaaattaaatatttctgtgcaattcttagcataacacctgcctggcacaccataagaacacaagaaaagctgtcgttattattattactacctagctaagtactaggcacataataggtgctaactttaacttaaaaataataacttattactacatcaacacttgatagtcttatttcaataacaaatgtttcttgactacaacaacattcactgatcatttcttgtggcttaaaactctcccaaacttaccaacattagtggcaccagcatccagactgttttctactatcttcttcatccagtgcttagactcagtaccacctgcccagagcaaatctgatggactgacttccgatcaataggtttgatggccttagcaggttctgtactaaagaaatcagttacaagaaacaaagcaagtattcagctatatattttcatcctgattttaactgtgggaaatgactcaacactgcaaatagtttatgggtctaatctattcatttattatattaacaaatacatttattatatccagaaatggaaacattgttttacaatccttaaacaagtacccaaaatacttctggatagacacttcaaattcaacacatccttactatctagtatccacatggagaaaacatacattgtatctctcaaattaccaaaatctttggcaataatggtgtcttctttcttgaaaactgaaagcatggccggtgcggtggctcatgcctgtaatcccagcaatttgggacacagaggcaggcggatcacttgagatcaggagtttgagaccagcctggccaacgtcgtgaaaccctgtctctaccaaaaatacaaaaaattagccaggcatggtggtgggcgcctgtaatcccagctacttgggaggctgaggcagaagaatcacttaaacctgggaggcggaggttgcagtgagctgagattgcagcattgcaccctaggctgggcaatgagcaaaaaaaaaagtaaaagcaacataatttcccacataattagaaaaaccaacagtatgctgggaaatacacaatgtttaagtcaaaatcatctcagaaattggataccagttatataactattccttatacacagttgcctttgataccctactccaaattgaagctgccagctgctgtcttagcaaagaccctcaaagttcttgctgtacttgttttaagaggttttttttttttttttttttttttttttttttttttgagacggattcttgctctgtcgccctgtcgcccaggctggagtgcagtggcacaatcttagctcactgcaagctctgcctcccgggttcacaccattctcctgcctcagcctcctgagtggctgggactacaggcgcccaccaccatgcccagctaattttttgtatttttagtagagacagggtttcaccgttttagccaggatggtctcgatctcctgacttcgtgatccgcccgcctcagcctcccaaagtgctgggattacaggcgtgagccaccatgcccagcccactttaagagttttataacggtttcatttccccttattccctgctccaacccatcctccactctatcaccagagctatttttgaaatcacgaatctggtcaaataatttttctgcttgaaaaattactagtgccccacttcctactatatgaaacttaaaatctagtcatcactgggccccaaactaccttcttttcagaatctctctaatcctttcccttcatcaagtcccctacattattattattattattattattattattattattattattattatttgagacagagtctcaccctgtcacctgggctagagtgcaatggcatgatctcggctcactgcaacctccacctcccaagttcaagtgattctcctgtctcagcctcccaagttgctgggattataggcatccaccattacactcagctaatttttgtgtttttagtagagatggggtttcaccatgttggccaggctggtttctaactcctgacctcaggtgatctgcccgccttggccttccaaagcactaggattacaggtgtgagccaccgcaactggccgtcccctatattgcagcacagtgaacaactgtttcctgaacatcacaagctcttttagacactacagtgtataagcaggtctctgtctaaactgctctcctcttgcccctctgcccaaccaatgtctgctcatccaaagaatgtatcccgtgtgttcattaacttagcaagttcccagtaaacagtttaattgatcactcgttaagagaaggcgggaaacctccatgaaaagagaaatcagtgggtatttcctacagcatttaacacatcgtaggccttcaataaacccttgtgaaataaacaaacctctttactcttcattctatgttgctaagaatctcacctaagtctgtctaccatgtgaaactgcagatgacctcacagaaaatggaaagaagtatctctaaaaataagtttatttggcaacacactacaggctacaggttcacttctgattctttttctttttttttttgagatggagtcttgctgtgtttacccaagacatgttttagactgtaaattggaggctgaaaaacatcataacatcacttttgccctactcaatgactatcctgttactaaggttgggccaaaattaaagggggggtcataggcccccacctctttttttattttcagacagggtctccctccgctgcccaggctggagtgcaggggcgcaatcatagctcactgcagccttgacctcccaggctcaagcaatcctcctgcttcagcctcccaagtagctggga

SEQ ID NO: 1883006 - DNA, 4001 bp, Homo sapiens; identical to SEQ ID NO: 586823

SEQ ID NO: 1883007 - DNA, 4001 bp, Homo sapiens
atcatagcccactgaagcctccaactcctcggctaaagtgatcctcccgccttagcctcctgagtagctgggaccacaggcacacgtcatcatgcctggcctgttccttttttcttatgccaacataatgaagcaaccaaaaggtgaagaagagaggccctgaagttacacggtgaggctggtcctgaccctgtgagttccgaaagcaaccatccccctggctggagtgtgcagtccttccatccattccccaaaacaagtcatgctctggcatttactatgattttagtgaacgcttagatggacaaagacaggaaacttccattggattttccaagacaaggggttttcagagtgcagttcccagataagcagcatcagaatcccctgggaacttgttagagtctcccacctcccacttactggacccagaactctggaggtggggcgcagggatctatggtttaagaagcccttcaggtgattctaatgcacactcaatttgagggcaactatgctgacagtaaaatctcacacaggtgagaggtatcaagttgaatatccttttttctaaggtggtttctccaggctgacaccacacacattttagggtgcatcattctttcctgtggggtgctgtcttgtggacattgtaggacatcagcagcatccctgacctctatccagtagattccagtcataaccccctttgacaaccaataatgttctcagttattgccacatgtcccttgtggaccaaatggtccccagttgagagtctgctctaaaggaggccgaagtggctggcaagggccagaccaagacctctgcatgccaacctgggaacaataagagccaatggttatgaggttttccaggtgctgagctttggaccaagagttttacacaaattacctcatccaattctttttattttgagacaggattgcgctcagtcgcccaggctggagtgcagtgatgcgatcaaagctcactgcagcctggaactcctgtgctcaagcaatcctcccacctgagcctcccaaagtgccgggattaaaagcgtgaaccagcgcacctggccagatccctttttttgttttttgaaacggagtttcgctcccgttgctcaggctggagtgcaatggcgtgatctccgctcacctcaacctccacttcccaggtttaagtgattctcctgcctcagccttctgagtagctgggattacaggcatctgccaccacgcccggctaattttgtatttttagtagagacagggtttctccatgttggtcaggctggtcttgaactcccgacctcaggtgatccgcccgcctcgggctcccaaagtgctgggattacaggtgtcagccaccgcacccggcctgaatcccacgtttaagtacagtaataaactcattttccagatgaggaaacagggctccgacatatcaagccactcgcccacagatacagagtgagcccaagctctctcccctggactccttcaacccgcaggcagcgaggagccactgcggcttttacgcaggccgctgacagatcggaggggatgaaggatggaggtggagggcgagagacaaaagaggaagctgccagatcccagaggaaaagggctatggagaaccagacactctgggttcgaatacaagcgccgccacttcctgtgtccggggcaacttgctcgcctccaagcctcagtgtcctcatctgcaaaatggacacactcgcgactgcctcgcggaacggccttaaatttggctgacacaggccgagcggacgatcaagcaaaagctgtttccctccaggggcaagagatgggcaggagacaccccagaatgcgacagccgcaggcccgcgcacctcggcccgccgcagccggcgtcacttacttcttctcgccctcgaagagcaagaacgactcgaaggctggaggggcgttcacgctcccgcctccgttgcgtccagaccccaagtgtctgccgccgccgccaccagagccctaataagaggcctcttccggattactccggcggggcaaacccgcgcaaggatcggctcatcgccccctttcgggctggaggatcttgcgcaggcgcgagaaaaccccgagagaggccagtgcctctgtgcatgcgtcagtggcgagcgcaccgcccccacccgcaccccggcttggctttcccccgtgggcgcttttcggcgcatgctcagagcgccgggagggctgttctgcccctacagaggcctcctagtcctggctgagcgggaacctcaagctgtacctttctcctttccccatgtcccttgatctctctttggaaacgtgcacccccttggagtgcgcagcaggaggcccctgaatagagagaataaagctaaggggtagtggacagctgccgctagcagccgtagggggagcagaagatctcgtggctagaggcagatctatgataagccccctgcccaggctgcctataccgactgctgcaggacctctgcctggggggtgcagctggcttgttagccgggagggacaattgggtgagggatgcagaaggaggcaggtgtatacagcagtgagaggggagcccgtagggttacgtatatctttttatatattattattattatttagagacagtgtctccctctgtcgcccaggctgaagtacagtggcgccatcatgcagcctccaactcctgggctccagagatcctcctgcctcagcctcccgatagttaggactgcaggcatgtgccatcacacctagctattttttttttttttttggagatggttgtgggggggtggcctccgtatgttgcccaggctggtattgaactcctggcctccagcagtcctccagcctcagcctcccaaagtgcagttggtggatgtgggcagcaagccacccaggtgccgaggcaagagaccgagggcatgagctgttccagtataataaaatatataaaataagaatagttatactagatatagatcttagatatgattatatatgaatcattaatcattagtttgtagtaattattctttattccaatattataataatcctcgctctacaatcataacctaggaaaaaccaggccatacagagatgggagctgaggggacagtgaggagtgaccagaagacaaagagtgcgagctttctgttatgcccggacagggccaccagagggctccttggtctagcagtaacgccagcatctgggaagacacctgttgccaagccgaccgtggtctagcggtagcgttagtgtcaaggaaaaacacccgctacttagcagaccgggaaagggagtctccctttccccgggggagtttagagaagactctgctcctccacaggcccgcccacagttacccggaggcctaaccgtctccctgtgatgctgtgcttcagtggtcacgctcctagtccaccttcatgttccatcctgtacacctggctctgccttctagatagcagtagcaaattagtgaaagtactaaaagtctctgataagcagaaataatggtgtaagctgtctctctctctctttctcctctctctctctgccttggctgccaggcagggaagggcaccctgtccagtggaaacgtgacccatgtggccttacctatcattggagatggttcactccttatcctgcccctttgtcttgtatccaataaatatcagcgcagcctggcattcagggccactaccggtctctgcatcttggtggtagtggtccccccagcccagctgtcttttatctctttgtcttgtgtcttcatttctgcactctctcgtctctgcacacggagagaaacccaccgaccctgtggggctggaccctacaggtggataagtgtatcttaccctttttggtttggttgttttgcagactacagtttagcataaaggccctccttaagctgtttgaagcaacagggactggggtctcagggga

SEQ ID NO: 1883008 - DNA, 4001 bp, Homo sapiens; identical to SEQ ID NO: 586837

SEQ ID NO: 1883009 - DNA, 4001 bp, Homo sapiens
tacgtatacctctattagacatcttcatcacattctacagaacatggatacttacaggctaaacagattatgagaaattttaaaagattcagttggtagaaggtaagaggaaaactaggaccatgttgtagcacaaagaatgttttcaaaaatatgagactaaaaatgtccttttgggttagcaataaagagttcttcagtggtttttctaagggcagtttaagtgtaatggggtggtggggggcaggggtgggatggaggggtggaagtcagaagtaagataaacagttttcctcagcatttgttcattcaacaaatatttagtacccacagaggagtgtgagactgactgggcaacatagtgagaactcgtctccacaaaatttttttaaaaaattagccgggtgtggtggcctgtgcctgtagtcccagctacttagaaggctgaggccagaggatagcttgagcccaggagttccaggctgcagcgagctatgatctcgccactgcacttcagcctgggcgacagagcaagagcctgggagaatgtgtttaaatggtgacgggaaagaatgaataaaagaaggaaagcttaaaatacattaagagaaaatatattgatgatgatggaagggagatgaaattggtcagggtccaaagcccatgtggagggcttcacataaaaaggaggaatagtatttctcagccggatgcagccagagatggaaggaggatagcatctaaaccttccctatagttttcctcaaatggacagctcctgagttcatgcacttgtcaccccggcttctgcgtgggatataactacagggatggggaggggaaacaggagatgggctaatactgaatgcttcctgttgattaaaaaggcacttcaaacatagctggctgggcacagtggctcatgtctgtaatcccagcactttgggaggccaaggtgggcggatcacaaggtcaggagttcgagaccagcctggccaaaatgggaaaccccgtctctactaaacaaatacaaaaattagccaggcatggtggcctgcgcctgtaatcccagctactagggaggctgaggcagaagaattgcttgaacccgggaggtgggggttgcagttagccgagattgcgccattgcactccagcctggtgacagagcgagattccgtctcaaaaaaaaaaaaaaagttagctatatcctcctgcaaatatgtatataaagaagatattttagttcaaattagccttggaaatattcatgtaattctttattacatttagtttcacactaggatgatttcacttaaatgattgaaggcatatatctggaattagcagagaattcatgtttaacaatttatcattataaatgataaattataatatttatcaattataagttataataaatattaaataaactataataaacctataaaataaattataataaatattaattataccacaaaatcatggccctataaaacaatgacaaggttaatcaaatctgtctgtaaatagcaagactcaatggtggcattatgccaatgcccgaaattactataaaaactcccaaataacattgttatccttgtaaatgcttccttgtaaagactgcagtaggtgcctatttcttggaggaagagaactggacattaaaagaaaggctctgcctacaggagcttcgaatctaccaaagggaagctcaaatcccgcccagcggacccgcccgcttcccctaagcttgcctcccgccacgaaagctggaaagtcactgggggcggagctaaggggagctgcgagaattccgggggatgtgaccggactgggcggggcctgtaccttggccctgcgctcccgttgacgtcgcatcctgtcagtatttcgccaaacctccaggcgccatcagtgtgtgaaccgttacgcagctggtccaccgcgggcggagaacaagcgactatgcccagggatcctgcacgcatgcgtggagctgaaccgtcagcgtgcgtgtgacgtcacctgcgcgcccgcctaaactcttcctagggttctttctagagtacgggtgagtgaaatttgtaaggtttggtgtgttcatttgagtgggtgccagacgtaacgggcccgggattgaattagtttagatcaaaatttgatgtaattatcgcagagaaacgctttcttacgagtgtttatctcgagcctgctgtgttcagcatctttcttggtgttttgggagaagcagacaggagttaagtccaagtccccgccctcacagagctcaggtggcttgggggaaggttggtgcgcaaacattaaaattagatatcgacactagtgagtgtccccgtcaagaggtctgtgaaataaggttgagcctacgatgcagaagttaatctcagttcagtaatttttgtttcttcatttatttagcgggtgaagggagggggccacagaaacatgttggagtacgatgcttttggtgcacagtttgtctatacaatattacagctcccgtgggggttaaaaaaaaacacgatttttcagcctccctcttccccaataaattttacattttaaagcacaatgttaaaagcgtttgttagtgacgttacagatcttaaaactggctttttggaggtactttacgcagctaagtagaaaatggttaagtttcagttccttggaagaatgttttgtattgatctttgcaataaaattgtaaaataatccatcctcctgtcaccccccaaccccgaaccgtgttaactataataaggaaaagcataactaagtcaaagagacttaaagcaaattattgacttcattttgggtaaaacactggttttgtattttcagcagcaagttgtcagattccctagttgaatttgctttggacatcagtgtgaagcagaactgatatgccacttgaattaataaaggaagtcaatggggtgcctgaagttcagccgctgagtaaattacataaagtagatttcggatccctacagccaggttacaattatagcaagaaatatattcaggtaagaatttctataactcagaatgctttttcctactaaaaggaatgcagtttttaagtgttgagtttatttatgagaactggtttaggtatggtttttatctttgtcataacatttgagattgaatatttcaataagttattcttattcagtacttatttagcgaacaattatcaaattcgtgtgtgaaacattggagtaagtttctgaggtacaaagatgaataaatatagtcccggaactaaagataatcacatttctgtggggtctgacagatcaatcacctgatctccaattaaaattaataggtgtgatattagcattgtgatgtgtgaacatgagagagcttttggttctgacagatcacgaaagttgagctggaacttacgggataacagactgtgctgtaccttcctttgaggtaaaaagcagtccttatgtgcatgttgaggaatttggatattactctaaaagctatgggaagtctttagtaggttttagcaggagaaagacatgatttactttgagttcaaaaaactttgctcctaggtagagaatatattggcgaatgcaagattagaggaaagatgtttagttaagaggcaattacagtaatttaggtgagagttgatgatgatctgggccagtggcagaggggatgatgggaaggatattgaaaaaagatagtaataataataactaaagttaacattcattgcatttttttccatgcgttaggtagtttttacgtatattatttaatcatcacaaagacctatgacataggtactgttattaaagacactgtgtttcagaaaggttaagcaatttgcctgagatcatattgatgatatgaagtagagcaggaatttgaatatagatgatttcctttagacctgacaggataaagaagcagaatcagtaggtcttagagaacaatta

SEQ ID NO: 1883010 - DNA, 4001 bp, Homo sapiens
aggaaattctcaatctatgctatttggtatccagagaataattctataatttcctatatgaatttttgatcaacatagatgttagggaaatgccttgcaattaataaaaaatattttcttttcattaaatataaataattgtctatctttttcagagagcattctgtatgtagatacttaaattgttcacccaaaattcatggaccaaatccatagtcaacattaagatccaactgaacataatttaatcatttgttgaggatgaagaagtttattttgagatattcctgaaactcaagaaattcattatgatttcaacttgtattgcatgaaagaaatgcaaacatggcaattgacagatgacctaaaaatattgtaccaatgggcagtgtctgtaccggcagttcggagacagtatttcccaagcagtcttctcacttcagaagttaaaaaaaaaaagaacacattatgaactcttctcactttaggtagtctacaaacaaggagagttacttctggatgcatagttaccccacctatcctttaaagacatactccaaaaatcaaaatcaagaccaacctgaattttaaatcccatggtggtaatctgggataagacagggtttctctttaggctgatgagtgagaatttttttctccttaaaaagaaaatcattattgtcttttaggagagagataaaggcaaaagacataaagtaatcaacttaaaatggattctcattttttttaaaaaatgtgctgggtcagcagaattactgaagaacagttgtgtgaaatttagttataaatgaataaagaaaccgataagataaagataccacattaatgaaaaaatagttattaaattcctgtcctttttgatgttttctctgataattaatatttccttcttcataagatagtataatctctaggcaaatttccaaagaaattaagaaataaaatatgatttgaagggaagaaggaaaagagagagagagaagagagactgagacaaaaaatgaagaaaggaaagttttaaaagtggcatttttagaagagcttccaagacttgaattaggtatggcattaatttttttccacctagtcttagtcgtggcaggtttctgaaaaaatgcaggaatttcatggatgtgggaactggtgatggaaaatgcattatttccaacacaacaattgttgtacttgagagaaactatatggggaaaaaaataacaccctagaataaatacaaatgaaattcatgtatcaaaaccaatactgtgaaaatagtttaaatgtttcttgaatttatatctagtcattaacctaaatgcagattttagttgaagccacacttctgcctcatggtcagaaggcctgaaaacctgtggcgtggaaaattggcaggaaggagaatattgaattggtctccatggaaaaacagattttggcagccataacctcctccccggcaggtctctctcccactctctctttcttcctccctgtttcactcttgtcccaggaaagaggctgaggaaagaccatgtatcagctacaacagcaagcagttgtcaatctgaccattcatcgaacaacctttctcattggcattgaatcctgtggtttaggttaaagccccaaaattgtcgcagccctagactcaccctctgagagcacggaggccataaattccatttctactggctttggtttccttctcccctcaaacaagaaagtggggtggaacacctgcctcgctcgatgtccctgaaagaaactgcaattcacaaatggaaatgataaattcattcttagaaatcctaaaaatctattcctctctttccccgatccccatcctgtttactctcctattctgtctggttacctcagggaaagcagatatttcctgagttttatttagtctagagggcttctgcgaaatcatttctccaccccagaaggtcctaacagcccacctcacccctgaagttcaggctcgttccctcctgggctagccctaaacccagactccaccaagctccccaacattttccttccagcctcgtttccatcatccccctaccccagagcttccgggggaatgttcgccacgcccctccggtgggttccaggccctttgcatgagcgaattgaggcgagaactacctccccagagtcaatgttgtgtccgtgtgctgtgcctgtgcctctcggtggttttcacggtgatcttttctctctttgcagctggttaataatccactagcaagtcaggctgcagcggctgcagcagccatgagctccatagcaagctcacaggcctttggcaatgccctctccagtcttcagggggtcacaggtcaactagttactaatgcacaaggacaggtgagtgggagatgggaacaagagtgcatttttatggcagattgaactcggaaaggaattgaatttcttttgcatgacagtgatatgtaaccgcatctattcgaggcaaataaataatgtttactagcaatgtcaagaataggagaagggttgggaggtgtttctatgttttagaagcaagatttttttcctacctctagattgccaaagttttattttgtttttatctctgtactatgactcatgttatgaccttatatgaagaagttactttgcattacagggggcattctttcaaaaagaaaaaagttacatcttaaaaataaaatgtcagttttgcttttttttacttttcacttaaggaaaaacttggataatgagggaaactgatcagtttccttccataattgctgtgagagagatatcaaaattagtcttaacaaagccaatttttgaatgtatgggaaggtgatgaagaagtcttgtaaaagcaacaaagaaaaggggtgagttagaatgaagccaattgcaagtcagccccatggtccctggcctcctgccaattcctacggaagccaggcaacctctggcatgcttgttgatttacttcagtatgtcaggggtagtaaactttcctcatgtcatgagagagggtctgtcccctcaacgctgctaatgtgccacataatgttcatactagatcctggaagagcttcagacaacccaataaacccaaaagctgcataaaaagcaaacgagatgaagctgatgatgtcggggtaccctccatctgaaggcctgtctcagagcccagtggttaggacacttggttctccagtgtgactgatcatgaaatccaagggagaaggagctagcattctcacaaagacttttccccccagccttatctatttgcccagcagtgtgtttgcatactccctgcttggcctgttctgtggagagcaggcattttgatgtcttgaaccctgtttttattttacataaagagtaaacaaagatgcattataagctaaatcgtctctgtctacattccagggaaaaaaagctgaccttgttttatttcctgggcgggtgtggtattgtcccgtcagaaccccgagggctgaacgatggagcttgtcaaagagaggccccatgtaatgaatcatcttatcacaggtgcacaccgcacatattaaaggagggttgtatgaacactgtgccctctacagtaacctttcaatgtctgctttaacccttgttccaatcccttttcatcaaaggatcattttatgcagccggctctaaatggaggctctcaaaagcctattaagatttctggagggacggggtattggtgtagaggaaaagttggttttaatgtctgtaactcatactcacatcaggtcgctgcttcgtagagctgtgcccagaaataggacaccctgcctcactcctgccagggagctggcccttgagatgtaaattttaggagttcaagatagaaaccatatccaccgacagatatttccttctgatttttttgttcctacatctaagtaaaatacactgatatgctccatcacttgaatacttgtgatgcagaa

SEQ ID NO: 1883011 - DNA, 4001 bp, Homo sapiens
gttttctccttctgggtcacccagtggaatgagggccctcgccaggggctcttcccagacgtctcttcacaccaaccggcttccttctgatggccccattttcctttaaaaccagttctcatcaaatagggtgttttatgcaccctggcaaatgatcattttgacaaggattaaaactgtaagctaaacagatgacacaaatgacaattgggaataatttttagtggggacagaggctaaatactaccccctccccttttctacttctaaccaatatcttgagcattcagtgggacaatacagtcttgctgggtctcttgaaatcctctagcaagaagccagccaggagaagacccagaagtcccacacctgtggggccaggatggctgcttggttgctaaacccagacagggtccttccagtgcatctgcccctgtcaggctctgtctcgagactggggatcttccaggctggcttcattctggaccagagagcagaggagaaggagaaagaatataaacccacccctatgagccagggaaccacccaagctgtaaggattttgtgcaagctgctggaactcgggttggaaaagccacccggcaagcagctgaaaggaaggatgcttctccctgcgtgggcgcacgcctgcttcctaagagatgatcctttgggtgggctgatcatgcctcctcctctggggagggagtcctgcgaaagcacgcacctcaaaaggagtaaaggccctatggtgtccccaaagcgacccctgtcgcgttctttctgcgggtggcctccctgcattactgattactcggagcggctgagctgacgtcagcattctgggagcgccaatgacctttggggtcatcacatcctcagaaactagagcaggaggggaagcgacccccaagccagcactccccctactttccaccagggagccgaggtcgcgccatcctggggcgcatctgggggtgggggacacaccagccccctcccccaacccctctagggccctcggcagcaggcggtactggatgcccacccggggctctaaaggacctgggccgcaccgggaaccctcgcccgggtcttcgagccctccccttctcccaattctttccgcagtctcaggagccccacgtttcccgcggcgtggggacacgcacttaccgcggatccactgcgcaaaccttgatgaacctgaaaaaagcagggtggggtggggtggggtgagggtgggggtggctagaccctgctcgcacccagcgccacgcaccgctctctgggcgggttcgagtgcgcgcgccgggcggggcgggacccgggggctgcggtgtttcgagaagcacgtgctacttcgcgcgcagcgcccccggagactgtgggcttcctcgctgcctggtctacggcagggcgggcgcgggggcgtgtttcaaagggtagggcacacagtgagacgccgggaggcgggatggatccgaaaccagctcgcagcgagtcccaagcggctgcggccgccgcaggggtctgggcgcggcgacgagggcggcgtggggcgacggggagcgggacggtggcgctgcacgccgcgcacttcctgttcaacacgcgccgcctcccaccacccgcgctccccgagcttgcgtcggtgccaggcccggcccctcactgtccccttgcggtcccctggggccgcggcgcggcggggggcgaggagcgggcgccctgcccttcttggcccgctggactccgggcgccccctccggcgcgcagggccgcgagcgccgccgccagaacttctgccagcggccgcccgtagcctaattgcgcagagggctcgccttgcacctcctcttcccccgccgccctccctctcgcccagaaaggaggacggacccagctgcaggctccgagctggtttattctgcggccgaggattacatttatgcacgaacgggcttactggttccagattccccacttgggcacaggcataggaggcttgttttccaaattgctggttttaattgcacctgcctttcagattacctctgggaatctgtgggaggagccgagagggtggaaaatgtttcttagctttgcaaaaggaagaaaactttgtcacccagcgggagacctcagccacgagtaacccggggagacaccagaaccgggacgggctttgactgatttgcctacgagggttccgtaggaaaggacgcttgaattcggcgcttcggcggcggcggcggccgcgcgagttccctgctcaccctccctctccgcggaagtccccacgaggtggcttcagggtgtaacagagcgcgcggctccagtccgaaggcagcggccgggggagggaaggaggggaccgaacccccgaggagtttcgcagaatcaacttctggttagagttatgggaagcgcggttatggacaccaagaagaaaaaagatgtttccagccccggcgggagcggcggcaagaaaaatgccagccagaagaggcgttcgctgcgcgtgcacattccggtgagtcccagcactcggtcccctgctccccagccctcctgtcgctcccgtccccggcgccgaagcggttaacgctggacgccccgcgcgcgccgtgcgtgcccctcctgtcacttcgggcggcttggggaaagggtagagggacagggcccgagctgggctggcggagccggggctcaatctctctctctgcccgcgtgcagccagggctggggctccgcctggggcgggggctgggcggctgcagactagagggggcgccgggcgcggcgggtgggcggctgggcgtagcccggtatccagccgggtgcgggtgcggggggcggtgcgttgtgttgttttgctgaaaagggacggtgtggactgcgctccggggaggtggagcccgcgctcggctgctggagacggagagaggggaggggagggaggagaggggaggggcggtgggtggggaaagcagcggggcgggggttggggggagctgtgtagctgcgtcttccaatgcaccccctccgctccagtttctctccgggcgtttctgggcctggagcgggggtctcctctgccgccgttcccttcccccgccccgggagtgtactttgggtctctgtggtatttgggggctcggagctccctaatccgtgcaggctgcattgaacttcagccccgtccgcgccagccgcccgggaggacattggcgactcggatctgcctgcggcttcactttgtccagccagaggggcggcgggccgcgtagtggttctcttttcggaaggcgccccggtagcccgcggccactgttcctcgcctccacgtagcggggtagggcggtgggaggtgtggcccactgggtcacaccctccgcctcagccaaccaagtaaatgtttgtgtacacacacacacacacacacacacacacacacacacacacacacacacacaccagagtgctccgtagagaaagttattttgctctcccggggcagggtgggagtgcgcagtgaatgggctgtccggacccctcattaaagctaatccttcccgacagggtcaggcgcagctggcatggccgaggcaggccactcacttcccactgtgaatcccagggcgcactgccccgtgtttgctgagccacccttcttttagacgccccgctaaggtcctcctgtgtaaactccggcccacacgtgcctaacgcttgggtgaagagggtggagtccaggggcgggtctccagacacctgatgccaagtagccccacaggggccctgggccagccctccctggctggaaagctctggggctggaaacttggacccctggctgctgtgtggcccccacggtggtgactcgattatgcaggaataagtgttctatttgaaaatgaaacattcttgtttacatctctcatgtaagacatttaaaaccatgttcgtgagttaaaagttagatgttgctgccacaa

SEQ ID NO: 1883012 - DNA, 4001 bp, Homo sapiens
ccctaaagggtttaaaaaggtaaggcacgaataatccaccccttgtttagcatatcatcaagaaataaccacaaaaatgggcaaccagcagcccatgctgctctgcctatggagtagccattctttattctgttactggtggagggtgtccaggttcttggcatcttgaacaaagaattggacaaaatgcacaaagccaccgggcgcggtggctcacacctataatcccagcactttgggaggccgaggcgggcagatcacctgaggtcaggagttcaagaccagcctggccaacatggcgaaacctcgtctctactaaaaacacaaaagttagccgggcatggtgacgcacgtctgtaatctcagctactcaggaggctgaggcaggagaattgcttgaacccgggaggcagaggttgcagtgaggatcacgccactgcactccagcatggacaacagagactctgtctcaaaaaaaaaaaaatgcacaaagcaaaaaaagaatgaagcaacaaaagcagaaattttttgaaaatgaaagtacattccatggtgtgggggcggccaaagcatagaggctcagggccccattacagaacttgtgaggtttaaataccctctaggggtttctactggttacttggtgtacgccctatgtaaataaagaggatgaaataaagttacaaaatcatttactcagtgtacaccctatggagagggtatttcctgtcatagctgaagtgttccctgcctccagaccctgttttcctgcctcaattcctttacttttctaataaacttgctttcactttgtggactcgccctcaattctctcttggggtctggatcgggacccctttctggtaatatagacagaaaatacggccttgacatggttgtcaggaaacgacagtaaggcctccgagggtggggttctgaagggatgttaaacgccccaccccgaggaaggctctggaggctccaatcactttcagcctctgctaccaagatgtccgaccctaccaataaaacttccagcagcggggcgcggtggctcacgcctgtaatcccagcactttgggaggccgaggaaggcagatcacctgaggtcaggagttcaagaccagcctgaccgacatggtgaaaccccatctctactaaaaatttaaaaagttagccgggcctggtggcgcacgcctgtaatcccagctacacaggaggctgaggcaggagaattgcttgaaccagggaggcggaggctgcagtgagccgagatcgcgccactgcactccagcctgggtgacacagcaagactccgtctcaaacaaaacaaaacaaaaaaccttccagcttggagaaactgagagtgagcagtagggagtgagggggtccctgggaggaaccagaactcatcccgcttcagggtggggctggcccccttcttggccttggccggggcttcgtgtcacggagcgcccgagggacggtcggagcccaccccagcccgcccgccgcctgagcctggccgagctctctgcacctgcacacgtctgtaaaacgcggatgaaacgcttctacggaaccgggtggctgagatgaagtgagttatgggtataaagcgcttagagcgatgcctggcggacactcggtgccaaataagcgttcgctgtggcgacgatgacgcctccagcccaaagcccgtggtcgagcagggccgggctcccagcgctagggggttcctaggcgcggcgcttcgggggtcctggacacagacacgggggacagagctcctaccagcgacgatcccgagggtctgcagcagaggggctgaggcccgggacgggggtggtcgcagcgccctttcctgaaaaaacggggttcggctctaaggcgcccccaagccctgccggcagcgcggaacccgagccgctcagaagcccgggagccccaagtctccgggaccagaagcgccgcggccctgacttccggaaggtggacggaacccgcggacggggcgggcccgcgtggcgcacgcagagccacttccgggcgcggcgccggcttggtgagcgcgggtacccgcgggcttccccgggcggctgcgtccccagtagcccggccggcctcggcaccgcgtgtcgtgggggtcccgggccgcggctgcagggccggggcggcggcgaggccgaggggcgggaagccactgcccggcctggcagtgtgaacgtgcaagtcgatcccctaacccagaaagccccaggcgcggtctctatgggcggccccgctcctgcttctgttttatttttttacggacagggtctcgctctaccgcccgggttgtaatgcaatggtgtgatcacggctcaccgcagcctcgacctcccgggctgaagcgatcttcccgcctcagcctcctgagtaactgggaccacaggcgcgccctgctggttttttttttttttttttttggtagagatgggggtctcgctatgttggccaggctggtctcgaattcctggcctcaacgatcgtcctgtctcggcctcccaaagtgccgggatgacaggcatgagccaccgcgcctggccccttcttttgaatgggcctccttgcgtttccgtttcaatgccccgtgctacttttttgggagccccaaggctgtactgtttgattgactcctttttttcccctttctttttaacctaaattaaagctgccactgcagagccccgccatggaagacacgccgttggtgatatcgaagcagaagacggaggtggtgtgcggggtccccacccaggtggtgtgtacggccttcagcagtcacatcctggtggtggtgacccagtttgggaagatgggcaccctggtctccctggagcccagcagcgtggccagtgacgtcagcaagcctgtgctcaccacaaaagtccttctggggcaggatgaggtaaagtggattggccgggaactgtggctcacgcctgtaaccctagcactttcagaggcctaggcgggcagatcgcttgaggccaggagtttgaaaccagcctgggcaacacaacaacacacacacaagtcactacaaaaaaacaagtgcctacacaaaatatatatatagagagaggctgggtgcagtggctcacacctgtaatcccagcactttgggaggctgaggcgggcagatcacttaaggtcagaagttccagaccagcctggccaacatggggaaaccccatttctacgaaaaatataaaaattagctgggtgtggtggcacatgcctgtaatctcagctactcaggaggctgaggcagaagaatcgcttgaacccgagaggcggaggttgcagtgagctaagatcgtgccacagcactccagcctgggtaacagatagagacttggtcttaaaaaaaaaaggaaaagaaaaggaaacaaaaaattagctgggcctagtggtgtgtgcctgtgctcccagctacttgggaggctgaggtgggaggatggcttgagccctggaggttgaggctgcagtgagccatgattgtgccactgcgctccagcctgggtgagagagcaagactctgtctttaataataataataataataataataataaagtggtcaggaagggacccccagggaggagcataaacctctccagtggctgtgatttgtcagtaaggacatggggcatctggcggacaaatacccctacagcgatagcattttccgggcatttgtgggtctcaaggcgccctgcttgccctcagtggatgctttgtccagcccgcaggcattttatccagcagacaagcagaagcagcagttttgtcattcgagccgcctcccctgccatggtacattacgtgagcaggcggctggctgtgctgtgctctgtggagatcacacgtgagattcgacagcactcgcttctgcaggcttctctttcctgggttcttttagatgagagagagccagaagaggcggggctgcggaa

SEQ ID NO: 1883013 - DNA, 4001 bp, Homo sapiens
aggactctagcccaggccacagcagggagcccggcagagggacgccaggtcaaatcacagggacttttctcaggctgaagccccaggaacccttgctgctgtcctaggacatggtgggattgcagcagggaccatcccgctgggatcccccaattctgtctaggaagccacaggtgtccctcaggaagctcccccaaccccccgccaccccaagaagccaggacagatctctaagactgggacactgccctctccctgggccaaacccagccctgcaaggaggccccaacccactctggttctcacctggcttctgcctcccaggggtggagacttcctccccaatctcttcacccccaaagaagcacagccaaggcccatgtcagaggaactgtgttgctgacttagtcacagcaggaaacgactggaatggggtactgttgctcacacactcacacctgtgcccacacacacccacacatgcacacacacagaccacatctgcagcaggtgggcctggccaggcacctgtgggacacttattagaggcccaagaataacgtaagggggtggcacccaggaggcctgggaaggggaaagcccagtggcctcatggtctctctcattgaactcctaagggtccctccatggccctgggccccaagggtcagggaaaagagtgaggccaggaccagtgcagggaggcctctgcccagcctaagcgtagagtccattctcaacagagacaaagctgccatgtgcagggatggatgtggaggcccaggcagcagggccctggggccagtgtgcggtgtgggtggggagtgatgcccaccaggacggccccctgtcgggggtgagctgtgtccaaagtagctgggcagcagctggtgttgatagtggcataagggacgtggagagcagcctgggaggcctggctgggtgcctgcgcgggggaaggaggatcaagtgagtctgtacagcttgggcccagccctggccccccctacccctgccacctcatccccaaagcagcccccctcctcacccatgctcgtgctctcagtgcctaggagctggtgtgggatggctggagcctaggggcagggctgggagagagcaaggatggtcagagctctgcacggcatgtggccagcccagtgtcagggggacgtggacagggcccaggtctcaccggtgcttctgtcggcacagcagatgaaggaggtagccacagtcaaagagaaggactcctgagacccccaagatcccggccaggtctgcccgcagaatgggggcaggagtcggcgggacagagagccctgggcacagaggcaagaatcagatggatggccagttcccgagcccctccctgccctcctggacccctcaccccggccccacctgggtctgagctgggcgggaggctcccacaggcctcccaggagccctcagggaaggacgcaaacttgcagcagaaggtggtgttggcgcaggggctgctggccccagagccttccaggatgagagagatgctgctctgggtttcccagcgggcctggcgagcaggggcccattgctggatgccaagttccgggtgcaacacagccagcgtggtccccccagcaccatcggggccccccctgctcacagtcaccagggagatggagccagactccaggaacccacaacggatggtgaaggacgagagctcggtggcctccatccgaacttgtactcacacctccggggtccctgtggaacagcagcaaggtgggtgggctgtcgtcctacatcaccctccctgcagcccctgcccctctctggtgccggcactcacctgcagtgacacgcagggtcagcagcacccagggcagggccagggtccggcgccccatggccccctccagtccgggttctgggggctgcagggccggcacctgtgcctctgttctcatcgcaggaagtcttcatgttgtcagcagccaaacagccacttccttctctcctctcacaccttccccagaggtggtgagcacaaagtggctgattcccttcttaaagtgacagtgagggcctgctcagtccccaaggctgtgcttccaggtaacaaggcagggcggcacaggtgggtgagaactcaaccctggctaggcctggggaggccaggggaggggcagagaagctgtcaggggctagaaggactccccttccctggacagcagggggtgccgggcttccctaggaaagggctctgtcctgcccctcacccagctaaggaatctgggaggagaaagcccctgggagtgggaagccagcagggaggacctgagagccaccccagcatgcatgacccaccaccaatctgacgtgggtcccacgcttaaacctgcaacccaggcctcccccacaacccccagcctggctcgcccactgcccactcatacctcctgatctaccctgaatgcaccccatactgggctctgccccaggcgctgtctcccttgtcataggtgatggcaacggcttctggctgctcaggcccaaagcacaaccaccagcgcctcttccctttcacctccaatgcaccaggaaatcctgttggcttcccaccctgaccaaaggaccacttcttctcaacatccccctgcaacccccagcccctgctaccttctgactccagacctaatctaatattctcctacctggaagagcaggaacaatggagaattggcctggctagtttcagttctcaccgcagtggccagagtgaccctttcgaacccaagtcaggcaggccactgcccttcttgactctcacagcccatgacacccagagccaatgcctcaagggccatccatgtcctgccatccccacttcccctgccctcctacctcaagtgcatacctctgagttgaattaaaagcagcaagatttggaggtgaccgggaggaaacaggctggcccttgccgtgaggtgtgcacagacagggaatgagaggccagcactttaggatgagtccaggagttcaagaccagcctgggcaacatggtgagaccctatcgctacaaaaaaaaaaaaaaaagaaagaaagaaagaaaaagagagagagagggagggagggagagagagagagacagagaaaaagagagagaaagaaagaagaagaaagaaagaaagaaaaagaaagagaaagaaagaaagaaagaaagaaagaaagaaagaaagaaagcaagcaagcaagcaagcaagcaagcaagcaagcaagcaagcaagcaagaaagaaagaattagccaggagtggtggtgggcacctgtagtttcaactatttgggaggctgaggttgaaggatcgcttaagcccaggaggcagaagttgcagtgaactgtgattacaccactgcactccagtctgggtgacagagtgagaccctgtcttgataaataaatgttgctctgaattgcttcactgcttatgtcactttgaggatgccaacctaccagaatgctgctaggcagcaacaagtgaccctttccagggatcagtttgctttgtgtgctgtgagccagaatccagggtccagtgagagcccagggtgctgtcttaaggttgatctcgtccacggtgtggtaaggactgaagagacagccctgtcccaagtcacctctctgggtcctggtttgcccctgtgtcaaagactcatcatgtctgcttaatcctgtggtgctggctggatgtggtggctcatgactataatcccagtacttccggaggctgaggtgggtggatcacttgagcccaggagtttgagaccagcctgggcaacatagtgagaccctgcctttacaaaaaataaacattagccgggtgtggtggctttcgcctgtagtcccagttactcgggaggttgaggcggaaggatcacttgagcctgggaggtggaggctgcagtgacccaagatcacgccactacactccagcatgggtaaaagtgagac

SEQ ID NO: 1883014 - DNA, 4001 bp, Homo sapiens; identical to SEQ ID NO: 586877

SEQ ID NO: 1883015 - DNA, 4001 bp, Homo sapiens
gcgtgagccaccgtgcccggccctcctaggttctgacaagcagtacagatgccacacacctggctttcttctctgaccccgggggtacctcaagtgggctccaaggaaggggacaggtgcctctaaggtgccccacttgccggcctctcagagccccacttgccggcctccctccttacccaccttggagctgggcgtcttcgcgaagctgagggcctcggtagtgagggagaagtagagcttcttgaaggaggaggacatgagggggcccttgcccttggtcctgtggatgaagagtggcccctccttcacaggtggcgcctgcaaactcagcgtccgctgcaggtccagctctgccaggccagggagggaggggaatagagagcccagggaatgagggcgggactggggggggggggcggagcagtgggcggggccatggggctcaagggctgagcaaatctgaacagcaggcagtggacgtagtcatggggctcaagggcggagcaaacatcaacagctggtggtgagcggggtgacaggtggactgaggaaggcagggccatgggcttggaggcgggacacgcgtcagtagcaggtggcggcggggctatggagctcaaggatggagcaaatgtcaacaggcacagatgatgggaggtgaggccatgggtctaggggtggggcaaacgtcaacagcaggcagtgggcagggtcacaggaagcacaaacagtggtgcgtgggtctatggcctgggggcctggcaaatgtcaacagcaggcggtgggtggggccacgagaggaacaaacagcggtgggtggggccgtggggctcaagggcggagcaaacgtcagcagtaggctgtgggcgggtctgtgcagggcggcgctcaccgtccttctcctcgatgtccacgagcttggtgatgaagtccttcagctgcgccacgccctggcgcacggtgggctgcagcggctccatccaagcctccttggccctggaagccggcgtgtccatgttgcccacgttctggactgcctggaggtgacagcaggaaggaccaggttctgctaggttaggggcctagccactgcaccccctcccaccccccctccccaagtctttgctactcagctgtagcgatggaggcagaggcgacagaggccatgcccacgggccccctccagccccactagggatcagggaggagaggatcatgaagtttgatgccttatgataactgagaccacttgggccttcctctgtaggtttaactgacgctgctgcactggataccccaccccggtgccgggcacataggtgcagcctgagagtaagcagacctgggttggaaggtcccgcgattcaccaccgacaggatgggcggccttggcaacccccgacccctcgcaggcctgttcccttatccatgagatggaactcggacaaggtggccacaggaaggctttgcaaactgtgaagtgcagtgcctacgtgggcgtgccagtggcctcgccggagccggtagggaacactctgcagtccaggccagggccccggtaggacacccagctgtgcatcccgcccgtggccgcaaggcccgcaccttggccaacaggagcagggtgcggctggtgcgggcgtccgcgtggcgctcccgcaggtggaagagcttgggcgacatgatggcgggagagaagaagcgcaggcacaggaagctggtgacggcgatgaacggtacattctggaggggtgcggaagagcgcgggctggagtcccccagaccagggctcctggcagccccctccccttaggctccgtccctgaccctcgccgggacacagcctccctggtcctccccagcgctccctggttccccaccgctcttcgcccgcccctcgccccagcccagtccaacccggcccagcctagcccagcgggtggagggcgcacctcgtgctgggcgccggggaagcgctcgcgcacgcgccggaagagctggcggaaggtggcgcgcaccacggcggggcacgcgggaaccgagcggctgagcgcgctcagcagggcccccaggtgggcgcgcagcgtctgcgcgctctgctccagcacctcggcctcggtctgcgggcggtgcagcccggaacacctgcgtggaacggggcgggttggcagaggaggtcacggtcagcgccagggccacgacaggaacagtggctctcacagcagccgggacacggacacaggggacaatacacgggtgggcagaagcacaaacacacatgctgacagggcctgatcccaacccgctgccgctgcgccccgcacccccccggagttacccccggcctcaccctacatccttaacttccactttgctggggtccagctccacgtacttctcctcaaacaccttgttgatgatggggcccaggacgccgtgcaggtactgcatcccggccacctggggaccaccgcaggtcacattgatcctgtctcccccagtcccactccagctgcccaccttctcccggcagccgcccttgcaccgtttgcctgccgtatccgcccaggagggggacaggtacacaagcagggcaaactgtttattcatgaatgaatgaatgagtgagtgaatgaatgactagaattcttagcccttgtaatcctagcactttgggaggccgaggcaggaggatcacttgaggccaggagtttgagaccagcctgggcaacatagtgagactgtctctaacttaaattttaatcacacacacattcttttggggggggggggtgcggggcacggagtctagcacggggcccaggctagagtgcagtggcgtgagctcactacaatctctggcttctggttcaagtgagtctcctgcctcagcctccccagtagctgggatcacaggtgcccaccaccatgccaggctaatttttgtatttttagtagagatggggtttcgccatgttggccaggctggtctcgaactcctgaccttaagtgatccgcccgcctcagcctcccaaagtgctggaattacaggcatgagccactatgcccagccacattcttaaccttaaagggctctcaatatggagatagaacactggagtcgaagtcccagccccctctgtcgctctctctgaagctcagtgttgtcatttgcaagatgaggacaatatagcatgcaacctcaccttcagaaaagactccatggactttgaggccagagagttgctccggaacagggtgttggtcttttgttacttggtcataagtaggcgttttccttttgatttggttctaggaggttagtgtgcattggcgttctgttgcctgcttccagcccctattctcctgcctcaggttcattagaaaagactgagtttggggccgggcagggtggctcacacctgtaatcccagtactttgggaggccaaggtgggcagatcacgaggtcaagagatcgagaccatcctggccaacatggtgaaaccctatctctactaaaaatacaaaaattatctgggcatggtggcacgtgcctgtagtcccagctactcaggaggctgaggcaggagaattacttgaacttgggaggcagaggtttcagtgagccgagttcgtggtcactgcactccagcctggctacagagtgagattccatctcaaaaaaaaaaaaaaaaaaaagaatgagtctggcccctttttgtctttctctcatcctctttgcctttcaccatgttatgatgcagcaagaagcccctcatcagatactagtgccatgaccttggacttcccagcctccagaactgtgagaaaataaatttctgttctatgtaaattacatagtctgtggtactttgttatagcagcacaaaacaaacaagacaacaagcaacaatcatgtgaacagaaagaaaaatgggcataacaaatgaaccatgtttttgtccaaattaggttcacaagcccttatctgcaccat

SEQ ID NO: 1883016 - DNA, 4001 bp, Homo sapiens
caaacaaaagaaaaaaaaaaaaccaccagggctggtatttttgaagtcactgagacagaaagtaacaagggcggctccagcgtgtgctgttactgaggctggggccaggaggctcagtgtggtaagcagtgctccgtgggggagcaggactagacacgcttgctgtgcccaactcagcatgctcctctgagatctcaggtggccttgagtaagagccgagtgccccaccattggagaggttaggaaccagcaaatgggacacccacaggctgcagcatctagaggtgacagagtcaggggcggagtgttcagacagggctacaagtgacagttaaggacagagcacagagtggctgcagatgacaggtcagggaccaggtgcacagatggagctgcaggtgacaggtcagggaccggaagcacaggcagggctacaggtgacagtcagggacggagtgcacagacagggcttcaggtgacaggtactgagtgtacaaacccactgcaggtgatggactgggtgcacagctggggctgcaggtgatagggacccagtggacaaataggactgcaggtgacattgagggatcgagtacacatatggggcttcaggtgacatgggcagactgagtgcagagaagggtctggggacgtcagcatcagggactggaggacacagctgcttcatcagaagacagagacagtgcctgaacacggggcccagagaactcaaccagtgcaggtgcctcctggagacagggccaggcttggagctgggaggaacccagaacagcctggcctaccaggcacgggcccatcccaaaaggaaacagcacctctagctaagaaagaactttattatttctaataaatgcatctgggggtggggtctggagagggcacacggccgtcccctgccaatgcgttgaggcccacactccttgggagtggacagggaaagccccatgttccccggagcctgtcgccgtggcctgcagccctggacgcctctcacggaaccgcaggtcttcctccccggctttctggtcgcgtggccaccacagccccatcaatacagccagagcccggggccaggtgtgagtctgcccgcagctctccgtctccgccagccccgactcctggggaaggggataaagggggacttcctggtgctggctagaaagggtgatgctcttcagccaggcagccccctggtcctctgtgctgtcgctgtgcctgggggagggggggcatcggggacgctgtccctgtcccgcagcaggtgccctgggggttccaggtgtgtggccggcctcgaagccaaggggcccagcagcccaacccatgttctccaccctctgaccctcgggaccccaccagtcatcctcccacccctgtctggtcccttgtccttatccagttccctgtgctgggtctgtagtgcctcatctttctgtctcctctattcctttccctgcgtccctgacttcctctcttcccgtccatccccccgcccccagtccccttcctcgcccctcccctccagcatggggcggttgaaaccttggagcaggttctgaaggccttcctgggtgttagcatccgggtggggagcggctttggcggtggggaccggggcggccgggagcagcagcagcagcagcaacagcgggggccacatggcctgcgggcagggcggctgtcgggggacaaggtgggcgttaggggccccgccccctcttcacgccctttcctctctgccctctggcttctgcgtgccaggctcgcacgtccagcacccttcacctgcccccacggcccgcctatgtctcccgagcagccctgagttagcccacggaccagtcaccggtctccggctccccagggattgttagatccggacagttctgccccagagctgccctggagctcggacgcctccacgagcctgagccacgccctcgagcccgagccacgcccgcccactgttaacgcctcacccaaacccctacgcatgaccacgccctagtacagagctacacccattctcggccacgcccccagagtcacgcagagtctccactcaccagccaagcccccactgcagaagaccacgcccctgagcacagccctggagacccacgcgggcctggccctcttccgtgatccccagtccagccccagtgcaacagcccaggcccccgagttgagcctcatccagcatccaggccagcctctgccaccctcagcatggaacacagtcgtttccggtccctcactctcgttcattctccattcttcttgaacatacggggaatattcatagtagctgttttaatgtcctgatcactaattccatcatctatgccatttctgggtctttgttatttttctactcattatgggttctgtttttctgcttctttgcatgcctgtttttttttgtttttgtgtttttgagacagggtctcactgttgcccgagctggaatggagtggcatgatcatagctcactgtcgcctcaaattcctgggctcaagcgatcctcctatctcggcctcctgagtactggaaccacaggtacacgcagccatgcccagctaatttttaaaattatcttttgtagagacggagtctcactatgttgcccaggcaggtcttgaactccgggcctcaagagatcctcctgcctcagtctcccaaacattaccaatatattcttatttctttgagagtctttagcataggtggtgcagtttgttctttggtgactgagttcctcaaatgtctggttatttttgccagaactcattttctccagggaagtgctgcaatcttgcctggaaagaaaaaataatcacatagctacttcctggtacaggttaaccccatttctgctttttagagggggtttatagaggatgttggctgggctcagtggctcacgcctgtaatcccagcactttgggaggccaaggcgggtggatcacctgaggtcaggagtttgagaccagcctggtcaacatggtgaaaccccatctctactaaaaatacaaaaattagagccgggagcagtggctcatacctgtaatcccagaacttagggaggccgaggcgggcggatcacgaggtcaagagatcgagaccatcctggctaacacggtgaaactccgtctctactaaaaatacaaaaaataagccgggcatggtggcgggcgcctgtagtcccagctactcgggagactgaagcaggagaatggcatgaacccgggaggcggagcttgcggtgagccgagattgagccactgcactccagcctgggcgacagagcaaaactccatctcaaaaaacaaaaacaaacaaaagacacacacacgaaataaatagagatggggcctggctgtgttgcccaggctgctcttgaactcctcagctcaagatcctcccacctcagcctcccaaagtgctgggattacaggtgtgcctggtctgcttcccttctttgaagagcctagcatcctcatatctggacataatttgggatggaataaggaacagtgggtgaatttttggcctcaggtataaagtagtagtcttgcatttgtgtcttttgccataatttagagacaacattgaaaagttcgccaaccccaagccaagcaccagcaaatgtgggcgtggggggagaaaatctgtgaaatgggcacttccggtgggggtgaagggcgagcccctgccttgcttacatactgcctggtggttctggccaaaggagtgacagagcaaagggagccattgtgggggaatcacacccccaagtcccaaccaactcccagattccccctccttcagcaaagcattagtcacctgttcacacttcagctcagcttaaccctcaatgagtaaggtggaatgaaaagcacatggccggacgaggtggctcactcctggaatcccaggactttgggcggccaagttgggtggaccacttaagcccagga

SEQ ID NO: 1883017 - DNA, 4001 bp, Homo sapiens
catgccacctggcgtccccacatgacctggtggtcaggaaaatggctctgggcccgcctgagtagtccaccatggctacttactaaagtgacctcaggtgagtgacctcacctctcccagcttcagcttccctatctataaaaggagtgcttataaggaggccggcactcgtagtgacaaatatcaactgctgctctgccatggctccagtcacaactgtgcctcctgggcctgctaccctccaagcacgcttccaggaaaccctgcactgtgagagctacagcagtgggacaagctgcagaggctgctcctcacacagaaggtgacggagcagatttctcgactccacttcatcagggaagacatgagagctggactggataaattaagaggcaaaggtctgcagacaagctgaggaggccgagctcctagagaggaagtggggagcatggctggtttatcagttgctctccaataaccctgatcacacagggactagaaatggcctcaatagagcaaagaggaaatttatgggagccacaagtgtagaatattttaaaagttattgagtaaagttgtaaaatttaagagtacagagattagatacagtggaatgaataacagcagcagctaccatttattgagtgcttatggatgaaacatcttagttatcaagtcatttaatcctcctaacagacttttcaggaggatcctgtcaccctcgggtaggggtggtggtggtgcggtggcgggggggcggtgcacacagctaacaagtggtgggacaggcatctgaacatggccatgctgctccagccagcccctgctaaaggcactggactaagggcctgtttgtcaccatctagtgacatattttgggcaaatccttcagccctagaatggtgcagaacagggcaagctgtggtccggccagcctcacaaggggctgggttgtgaggatgcaggcgctgagcgcactggtgcacacacaccgtaacaagtgtaacgaggctgttggtgagtctgggggaatgcggtgaagcctctcagcagtaggagtgctgaccagagtcccttgagggtcctccctgcctcacatttctggaagcctaagtgatcaccagatgtgcaattatttgataaggcttagctccaggcgctatgacaacagacacaaaatcaaaaccactgaaatcgagagaatagccctgtcatggaatctcccatggaatgtgctactgcaaggaacaattaaacaaaaaaagaaaggcaggcaccactgagagaagagcgtatctgtgtgagtgcctgcatttctaacaactggccctgtgggaatgagcatctttagaccctcagcaggagagactatcatgctcctccaggtccctcacccgcctttctgctaagcggccagagtccctgggcaggtgagccaggcggctccacagtcggctttaagaaacacaatagggaccctgtatgcacagcgagtcccttagggtcctgggagtctcttgctgggatcattacatcctcagtcctctgctaccagaataatcatgtgacaagctaaatctgatcatttcactaccctgtttaatgaccatggatagacttcctgctgcaatcaggaagaagtccacgttcttcacacaagggacatctcccccacgagctggccctgaagcttccagcctcctcagagctcgccctggaaacacacgctcccctctactttaacactctgtgtcctcttccggaagtctcttcatgctctaatgcagccttcaaggtccaacagggaagtggttcctttgtcccccgccctgcccccagctagctctgtcatcatagaatgcgatccactcccccaagcccaagtctcctacccgagtcctccacgtggtgggcttgtcagctcactggttactcaacacttctttttttgttgttgttgagacggagtcttgccctgtcgccagcctggagagcagtggtgcgatctcggctcactgcaatctctacctcccgggttcaagcgattcccctgcttcagcctcctgagtagctgggactacaggcgcgcaccaccatgctcagctaattttttttgtattttactagagacggggtttcaccatgttggccaggatggtctcgatctcctgaccttgtgatctgcccgactcggcctcccaaagtgctgggattacaggtgtgagccaccgcgcccagcactcaacacttctacttggatatctaaaaggcaccccagacaaaagatgtctgaagcaccacttctggcccctgggctcccctgtatccctgaaggacacagccacccactggctgctcatgcaacaaaacccaattcctcctttctctttacccccactcattccagcttgtcctttctgttccgcctccaaaatgcacctcacatctaacccactcctatctgggtccaaaacccagcctagatcccctctggctgggccatggcggagagcctggacttcaggccatcccacccctcactccctctcatgctgctgcctccagccataccccgcagataccccagacccttcccacactggggtctcagctcctgtgttcttacctcaacagcttgtccctggctctttgaacgcctagcctcttgcttataatttggacaagtcctgaatcgtttgtggttcttcagagacactgaagagccacctgggcctttagcagcaccctaaatgtttctcatactatgcctaatgtaggaacctccctacctcaggaaatccaagcaattacctagggccagaatctgaattatcatctggtttcatctcccatcatttacctgttttaggaaaaaatacaaactttattctgaaagagaaaagtcatccttggccccaaacacgtcacattttatagctacacagaaacaactgtggattaccaagtccccagcagcttctaagcttctgggaggaaatctgtagccctgacccagtgtgcctccctctctagtttattccaaggggtgttctcaagcctctagggctaggcaggacctgtagcaccaaggacagtgtcttcctcctccttgattaaccctacccactgaccacactgacaacctttcaatgttgttcttgcttaggaagtgtcaaggacgagtcccattcctcaactggggatagttttctgtctggtatgttggcccaagcctcactggttgcaacttaccagaccacactgcgaaaccacactgctcagcttcaacactccggcttactgactggccatggcatctcatcaacagccatccctcaatcctgactacataaacgggaaacacccagaaaaggaggataggaggtgaaaaggccaaattcaaaagcaagttcaacatgaagacgggatctgtgtagcccctaagggtggtaacccccagtggttttctaaagaatgctacaaagatgaccatctccctgtgccacagcaaccttagacaatgggtcacagcccactggcactctggctctgtgtgtgccacttctgtggccggctgctgcctcttctcagggtggggatgatggagaaatgcttgcagacctgtccactcagcagacacaggcacctgaggccatgcgggcccacgctgctaggaaaaaccgttggctttctttccccttttctaaattgcaaagttggcagattctgtacctacgtgccagcccacactgactttttctcaaatctagactccaaaaatccctatcttgttctgaaatcctttggaatcacctcagaggctacttgaccaggttaccctcacacccgtccctctaaaagggcagccatggagcacatgttactacttagcttggagcagccaatctctggcctaaaggagagatgacagttttactttcattttttttctttttttttttttttgagacagtctcactctgttgcccaggctgcagtgc

SEQ ID NO: 1883018 - DNA, 4001 bp, Homo sapiens
tcactaataatcagggaaaggcaaatcagaaaatgaattatgtttcagccagacgcagtggctcaagcctacaatcccagcactttgggaggccgaggcgggcaggtcacaaggtcaggagttggacaccagcctgaccaacacggtgaaaccccagctctactaaaaaatacaaaaattagccaggcatggtggcacgcgcctgtaatcccagccactccggacactgccgcaggagaatcgcttgaacccgggaggctgaagttgcagtgagccaagatcgccgcactgcactccagcctgggcaacagagtgagactccgtcacaaaaaaaaaaaaaaaaggaattatgtttcaaaccactggggtggcaaaaaaggcaagtatgtaagaaatgggaaatcttatacattgctggtttggatagtaacttggaaaagatattctgaatagcaatcagcaatacgccctaaattacaaatgtacattccctgtgacttagcaattccacttccaggtatattagctaaagaaacctctgtgtgttctccaagaaatatgcataatagaatatacggacagggatggtggtcattacagcaaatatgcaataaaagcaattggaaatggccttactggacttcaataaaggaataaataaaattcatatgatacaacacagttaaattaacgttaaatgaaagtgtgataccatttatgtaaattcatacacaaattttaaatacatatttaaatattaaattaaaaaatacagccaggcgcggtggctcacacctgtaatcccagctcttagggaggccgaggtggatggatcacgaggtcaggagatcgagaccatcctggttaacacggtgaaaccccgtctctactaaaaaatacaaaaaattagccgggcgtggtggcgggcgcctgtagtcccagcaactcgggaggctgaggcaggagaagggtgtgaacccgggaggcagagctggcagtgagccgggatcgcgccactgcactccagcctgggcgacagagcgagactccgtctcaaaaaaaggaaaaaaaaaaaaataataacgttctctttgcactatcaaagtacctaggacaactgctacccaggcccttaaggattcacagagccctggcggatttgtcagaaatttctgtaacccgcacgccgcgcacgctccacgttggctgcaagtggcccaagtcttagagccctggtcccgttccaccgggagcagaaccacctcgacgcggggacagcggcctcgctccctgcccagcgcccggacccccgagccgggccagcccccagcgccccgcagaaaggtctgacgcacttgcggcgccctcgcgagtgccgggtgacagtcgccaagtttcacggaacaacacgcgctccagatgtgaggggagaggaggaaaaacgccgcccgcctgggctggggttcacaggcacgggccgcctcccgccgctcctccaggccgcgctcgggtgcacggacaccgcctccgcggcggcctcgggcccgagggagggaagcggcccgaggggccggctcgcgaaacttcgcgaagtggcgggagggtgtcgctcccgcctcgccaccgcagggggcttggagacgcccagcccagctccccggcccgatcccgcccgggcctcggccgcgcccctcagctctgtggtgctcacggcccgcgcccccgcccccacccccgcagctcaacggaggcgtcacgcagggaggccgcctcgcctcacagacccgcccagaagctcgagcgcgccccgcagccgacactcactcgccactcaactcgccggctagccaggcgggttcggcgaccttcgctaccacgccgcttactcctccaaagctgcagctacgagctccgtggcagccgctgcattccttccggccctgccccggcgtcacctcgcgcaagcgtacagcgcgcgtacagcgccccctcccgactaacgacaggaagaaccatagaggcactccgggtgctgcggaggagggaccggggggctcaccatagagagggcagcctagccgcgcctgcatccgggctctccgcctacggagacttgactcccccacgaggctggaggatgaaaggaacggagacccccaatccccgaccccacaggagccaccatctccccagagctgaaaagggtatggggcaggtggttgtggatgtttactcgatatctacttatttgccctaattcctttggcaagtcattcattcattctgcaaatatattctgcggatttcctgtgggccatgcactattctaggaattggggaaattaagagaaaagtgggtctcacggctgggcacagtggctcacgcctgtaatcccagcactttggtaggccaaggcgggtggatcacttgaggtcaggagttccagaccagcctggccaacatggtgaaaccccttctctaccaaaaataaaaaaattacccgggcgtggtggcggatgcctgtagtcccagctactctggaggctgaggcaggagaatgacgtgaacccaggaggcggagcttgcagtgagcagagatcgcaccactgcactccagcctgcgcgacagagcaaggccctgtctcaaaaaaaaaaaaaaaaaaaagaaacagaatctcgctttgttgcccaggctgatctcgaactcctgggtccaagttatccttccgtcttgccctcctaaagtggtggtatggcaggtgtgaactgccacgtctggctaggaattttttattagtaaaatgggaattttaagatattatctattgcccggtgttcttgcaaggatgaaatggggtcatatgtgaactgagaggctctcattggagttatttgttgacatgttcttgtctcaggcatttttggagtcataaagacaattatcctatctctgcatttctcccaatgagggtgagaggaagctactccttccttctaggtagtctggaatcattcaggttatttttgaagcctctggcttttttttttttttttttttttttgagacgaagtttcactcatgtgcccatgctggagtgcaatggcatgatcttggctcactgcaacctctgcctcccggattcaagtgattctcgtgcctcagcctcccatgtagctgagattataggcgcccgccacgacatccgcctaatttttgtatttttagtagaggcaggatttcaccatgttggccaagctagtctcgaactcctgacctcaggtgatctgcctgattcggcctcccaaagtgttggcattacaggtgtgagccactgtgcccggccctgtttttttcggggggcggagggttggggtctcactctgtcagtgaggctagactgcagtgactcaatcaatcatagttcactgcagccttgacctcccaggctcaagggaccctcccatcccagcctcctgagtagctgggactataggtgtgtgccaccatgcctgactaattttttaagtttttttgtatagatagggtctttctatgttgctcaggttggtctgaaactgctggcctcaagtgatcctcctgcctcggcctctcaaagtgctgagattataggcttgagccaccgcacctggcctgtttttgtttgtttttttgagacggagtttcactcttgttacccaggctggagtgcaatggcaccgtctcggctcaccgcaacccctgcctcccaggttcaagtgattctcctgcttcagcctcctgagtagctgggattacaggcatgtgccaccacacccagctaattttgtatttttagtagagacaaggtttctccatgttggtcaggctggtctcgcactcctgacctcaggtggtccacccgcctcggcctcccaaagtgctgggattacaggcgtgagccaccgcgcccggcctgttttctttgtcttaatgttaaccagcaccaagaatcagaaaggg

SEQ ID NO: 1883019 - DNA, 4001 bp, Homo sapiens
atttagcagttagtttatatcactgacaaatagcaagaacatttcatgtgagaacaaggaagtaccttggttactgtgcagttatcagtgtacacttcaaaacctgtgctattttactacctctgttcgtaaaattccttcattaaaaatgtaattgtaagccaattttcaagcctgttctttagatagctaaagccccatgctgctgcttttcatcctttctctatctaataaatattcaccacgagaccaccaccatgcattaaagattacagtcactctgatagaaattacttataggacttgttatggcacaaattagagagaagagattgaattctggagactgaaatgacccatgaaggtgtatttatccagcacatatttatgaagacatcttcaccaggagccacagtgggctctgataaaagctatgatttatcagtaaatgctactctcaagaagattgttatttctagaggtggaaacaacacaaacacacaaataactataatttaggacgtgaagtgataaatagtataagacgaatggagtttaggagcggtagtgaccattttcagctagaggaattgagcatttcagcttagaagggtcagcttagaagggtcattgaactatgccttagagaatggactataatccatttggacaagggctgactggggagggaggtaacatgatgcaaggaacaccttgaacaatgacatacactctgaccaggagaggcaaatcaactgcttcaaacaatagtgaatagtcatgtgtcattgtatttcctgcttgggtatataaaatgtgcatatttcattgaaataatgaaaggtataattatgaaacatatgctctgttatttgctacttcataaatattcaaaaatgaccaacagaaaatatattgagagtaaaatagtactttctgaagtccttttaattgttttccacatttttcttgtcaaagtaagctgttagctcagctattggattagtcagagttctcctgagaaatagaaccaataggacgtatacatgaatacatatatgtatgtatatatatccatatacacataagtacaaacacaaatatgtatgtgtatgtgtgtgtgtgtatatatatcctatttgttggacagagagattgagagccagagcgagagtgagaatgagtgagccagagagagaatgagtgagccagagagagagagagattgtaaggaattgaatcacacaattatgggggctggcaagtctgaaatttgaagggctgttaggtagggaaaattctggcaggtgtttatctcacagtcttgagtctgatgcaatttggaggcagaatttcttctttgaggcgggggaaacctcagtcttttctcttaaggccttctactgattagttgcccacccacattagccaattcaagttgacacatgaaattgaccgtcagagctgtcatgaatcatgaagacatggcagtaatgaaaacaggggaaacagtaaagtctttcctttgcttacacagctcattatgttttataaatgtttttgcatatataatcattaaaaatcctgtgagaaaagaaggtagcatattattataaacagtttctaaatgacaaatctgaggcacagagagattaataatctggaagtttagggaactagaagtggcacagctgatgttagagttagaactgatgtcttcagattcattatctagtgttctttctgttgtgccatctactagtgccaacccaaatttctatagcattcattatctgtaacgctctcttgaaacttagtgcaaagtacctttatggatatatattctatctatccaactaaattcaaagacatgccttttttttttttttttttttaaatatggaacgcttcacgaatttgcgtgtcatccttgcgcaggggccatgctaatcttctctgtatcgttccaattttagtatatgtgctgccgaagcgagcaccaaagacatgcctttttatggccaaccatattatgtactacatataattgaatatgagtaattttttttttaagatggagttttgctctttcaccccggctggagtgaagtggcatgaccttggctcactgcaaccgctgccccccgagttcaagcgattctcctgcctcagcctcccaagtagctgggattacaggcacccaccaccacactcggctaatttttgtatttttagtagagacaggattttgccatgttagccaggctggtcttgaactcctgacctcaggtgatccacccgcctcggcctcccaaattgctgggattacagtcaggagccactgtgcctggcctgaatatcagtaagtatttttttcgaagaataaattctgctatatattctgtttatgctggtaacgatttgtttatgcagcttgtggtgacaggctccttgaattagttttcacagcatgtagaatggtgccacagtgtttttcataaagctgggaagtccgaaaggcctgaattccttatatttaaaagggcttatgagtcatgtcaacatgggcatgttgttcaactttaagttctaatttctttatctgtaaaaagagaatgataatagaacttcagtaattcatcatgtaaatagaaaatgatttattgtctgtgtaaagttatgaatagcttctttacactcaagatacaagagatggtatgcttctttattttctaaataaagccatctccaaatcataacttatcagggtcaatgataagctcaatatcagtgattaattggggttatcctcactggaatttacaaaaaccctggggcttacatattcccaggaaaaggggaagggcctggttcttggtccacagggatagccatttaccccttggctccacttgggtgctgtgcacagggccattttgtatacaaccttcacagacatggatggcagctcagtcttccaaatgttcaacagtagttgagcatggtttctttgccatgcactggagacggcctccttgggtgagctggcccaaaacttcctcaaaattcctctctgctgactgcttagtcacaaatgtcttaaaaagatgctcaagacatagcatttaatggccaattctcatctgttccaaacacctgttcccatacaaggacttgtaacctccagaatgccaagtccaagcacgtgaagaaattcacaattctcccaatgtttgcatctgtgaaaccaactgcaaggttgggccaatctcccaaagcctctattttcatcttctttgggacagtccagtttaatttcttcattggctgagagctttgaaatgagccctatgaactctcactctgaggacaagggaactctagacctcaagggcatagagccctgacctcattgtttcactgatgagaagaaaatagggggaaaaaaatcaaggtatcaataaattcttcaggaagtcacactgttacacaggcagatcacatagcacatagaaactgctcacattagtttgctttttatcattatttagaacacggtacgtatttattggttatgctccactgaatcttccacctcttgagatgccttaagttgtggaagtaagagcctggcttttggagtcagacagctctggttctgattcctggctttgcctcttatctctttgcacttaggtaaattaccttgctgaggttcagtttttcttctgtaaaattaattgtgaaggttaaatgcactgaacacagatagctgtagctttatctgccagggcatacaaatagtcacatatataataatagtccaaatctcaaggcttggagcccacacctgcttgactgggtcttttagtagaagcccctcctgttaatttattctgtctgggaggtcccatgggtgaggtttgcccacaatttcctttattctcatgccctgtctcatccccagactgctgatctcttgcttttctccctctctgact

SEQ ID NO: 1883020 - DNA, 4001 bp, Homo sapiens
aaataatttaaaagcctggattcaaatcctgtctcctcttttatgagctacatcaccttggctaaatagcttaacctctccatgcctctgtttcctcacctgcaagatggagaatcatagtacctgcttaatagggcaactggagaattatatggataaggtacataaagtactctgcaggtgcctggctctataaactttagctatcagcaaatgttatatacacatcaactccacaggggtgaggcggggtgcaggataggggtatctagtgttagaggcttcagcgaggaggggcaagggcatgactggtagagagagcaacatgagcaaaagttgaggagtatgaaactgcatggaccagataacaggaccccaagtgttacttgacagagctaggactttatcctgaggagaaggggaggtactaaagggttttatgcagggcgtgtatgtcagatatgcattattctacatttgcattctggtaactgtgtaggattgaaattggagatgatcctgaaggcagggatctcaatgaaaaggctgcaatgatccagatgctctgggaggaagatgtataaaaccacagcagtaggagaggaaaggcaggaagaataactttaaacgagtcaaatgaaggagaaagaaagattaactgaatctaggataagtcccaggtttctggcctgggtggccaggtagatggtgaggccatcagcctgaatagggacccagaagggaatgactggaaggcttgctacttaggatgatattcagaaagatatttgggtctggggctcaagggagtggaccgagttggacatacatgagttccctgcctccaggattacctccacagcggaggagactgttgaaggagatagcatgtacaggctatgtgccatagggcaggacctttgaggaaggcagaggtgggcaatcagtggagaggagtgagagacgtggaaggaaaagcaggataccacgatgtcacagaagtcaaggtggatatttacaagaaataacgaatagagaagcatgcatgtacccgaagatgccaaacaaggtgaggtctttagaatatccactgcggtaacatgatggcagcagaaggctgcctgcacaaaattgaagggttaatgacatccagagtgaagtccttagttacagaagaaaagaggcagacgacagagacaactgaagctgctctctctgcctaccatgcctttcccacttgcctctaactctgcccagaacctctggcccctttaaggcttctttggaaaatagtgggtacagactgtgcttgaaggcatgggggcagcaaagacatgatggaaccaggatccggagaggatcaaagtggatgggatcaagcgcccaggtagtgagattagaagagcactgactccaaggctacagactcagaagtgaagatgagcacagaaaaatatagattaatttgcaagtatatgttgtagagatgcactgatggaattcacattcaaaggtttattcacttgattaaaatacaaacaatattatcattaacaggggcaatctctggtttgtgaagtctaaagcttacacacttttttttttttttgagacggagtctcgctctgtcgcccaggctggagtgtagtggtgcgatctccactcactgcaagctccgcctcccgggttcaggccattctcctgcctcagcctcccgagtagctgggactacaggcgcctgcaaccacacccggctaattttttgtatttttagtagagacaggatttcaccgtgttagccaggacggtctcgatctcctaaccttgtgatccgcccgcctgggcctcccaaagtgctgggattacaggtgtgagccaccgcgcccagccaaaaaaaatatggaatgcttcacgaatttgcgtgtcatccttgcgcaggggccatgctaatcttctctgtatcgttctaattttagtacatgtgctgccgaagcgagcacctcacacacttttaaaaagctgacaaataccacaaaatgcagaaataaaatcacaatattttgattaataaacggacacctccactaggaaactcacttgccctgtgttatttttgagcacatactcgttgactgtctttcatctgacagcaatttttgaaatattttctacaggaagataacatggttgatcaaagattatttttatcaacagctgtgatgcagaaaacatgtcacttcacatgtgatcactgttggtggtagtgctacaggttttagccataatcaaatagaatattgataaaatctattttggctgattcttataaggctgattctttccttatagaagaaaaattgcatggttatttctatcattaaatatgttgcattatcaagtatattcttttttttttttttttttttttttttttttgagacagagtcttactctgtcgcccaggctggagtgcagtggcatgatctcggctcacttcaacctctgcctcctgggttcaagtgattgtcctgtcttagcctcccgagtagctgggattacaggtgtgtaccaccatgcccagctaatttttgtatttttggtaaagacgggatttcgccatgttggccaggctggtcttgaactcctgagctcagatgatccacctgcctcggccccctaatgtgctgggattacaggcatgagctaccatggtcagcctcaaatatattttcttattatgaaaaaacttccatcttaactaggcattgatgagaatagaaacatttgctttcaaggtacatgtctgttgccttgaagaattctcctcagactagcctttggctcagtatgtttcaaaccttgtttctcctccactacccacagactttggtgccagagaccataggacatggtcatattgtgaaatgacctctgaatcccaggtaagtcagcacagtgctggtggaagtgaattcctggaggccatttctacacgggggtagccaggcataactatgttaaggggtttctcaatctgggcacttttggcatttggagccaggcaattctctactgcagggggctgtcctgtgtattgtaggatgtttaatggtatccctaggcttccatccactggatgtcagtagcaacatccctctcccccatattgtaacaacccaaaatgtctccaggcatcgatgagtgtcccctgggggataaaatcatccctaatcgagacccactgatatatatgtaaccagtgaaccccatatagagcttataaaacccaaatgaactcaacatccccttagccagatctcaaaaatgcccatggtcactccattgccacctgacacgagaactgtgatgggtgaggtggaaggttaatcagctgcatttaaaatagctcacctccacaattaaaaaaaaaaacaccagatgaccatattgctagagcctctcccataaccttggtatgcgatgggagctgaaagtgaggagctctgaagcttaaaactcattagacacagataaatccacttctgatcataattttagtcataagcaatgacatatttttaaaaattctctttttatactgcataactaatgatatgacatgtttcatacacatactgcaaatctcaagataggtaaaaatacatttcaaatgacctcattaatcattataatatgacctatggttaagtaaagcacaaaacaagtattctcaattctctagataaacatcacatgttttatgacatgaatgtgttatataaaagaatatctgtgtgttatgtatgcaagcaactaaaattttaacatttcatttatctggtaagatgaatgaagacttagatgtaactagatttcctggattacttacatttctctttgtaagctctgcaagtgtattattttaatcacttgaattttttcttgcttgtgtcttattatcaattgcctttttcctgctgttatgatccctatgtttatca

SEQ ID NO: 1883021 - DNA, 4001 bp, Homo sapiens; identical to SEQ ID NO: 1883019

SEQ ID NO: 1883022 - DNA, 4001 bp, Homo sapiens; identical to SEQ ID NO: 1883019

SEQ ID NO: 1883023 - DNA, 4001 bp, Homo sapiens; identical to SEQ ID NO: 1883019

SEQ ID NO: 1883024 - DNA, 4001 bp, Homo sapiens; identical to SEQ ID NO: 1883019

SEQ ID NO: 1883025 - DNA, 4001 bp, Homo sapiens
tttaactggactgcaaagaatattaaatgaaataggtcatatgaaaataccctgtaccttataaaacacaatacaaatgtattcctttgcaaatatcaaatggtgactatggccaatagactgttactctcttgcaatatcatttaattgccattattcctgagatacagtgacagtcctgtgttcatagctggtacgtgatcatagcaacatcagttggcttgaacaatcactgtaattaaggcatatctattattgaagaagcagcaagctagctgtacgggaaaagcctcgggacttagattgaggagacccttaagtcttgacttcctgattcagttacctctcaccaggttccccctcaacacctgagaattacaattcaaggccgggtgtggtggtttttgcctgtattcccagcactttggagcccgaggttggcggaccacctgaggtcgggagttcgagaccagcctgaccaacatggaggaaccccgtctccactaaaatacaaaaaattagctgggcgtggtggcacatgcctgtaatcccagctactcgggaggctgaggcaggagaatcgcttgaacctgggaagcggaggttgcagtgagccgagatcgcgccattgtgctccagcctggggaacaagagcgaaactccgtctcagaaagaaaaaaaaaaaacaaaaaaccccacagggaagctcttgggaaacccacatgtgccctcaaggtgccttgggttactttcacctataagaaaaatttaaatattcttttgttgtatacacatttgtggcagtcacactgtactgcaacaccaccacaatctcatcaaacaacactttgcctcgaggctgttaggaatgtatacttccatgtagcgaagagggaaggaagatcagtgtaatgaccctttgtttctgatgaggaggcagctgcgtggctttctaaaggctacataagaacctaagggctgaaccaggattagaaagtggctctggtgcctcacgtggtgagcatcccgcaatgtactctgccctcttccgccttctctattttcaaactcttggacttggtttgtcttcctccaaaatactttctctctgaaaatgttcacatctcttagcttcaaaacttaactggattgtcgactttgaaatgcctcttaattttgtccattgagtgttgtatcatcaaataccagtccttaatcctactgatattaaaacattaaaaaaatcctggccgtgcgcggtggctcacgcctgtaatcccagcactttgggaggttgaggcaggaggatcacttgaggttaggagttcaagaccagcctggccaacatggcgaaacttcggtctttacaaaaatagaaaaattagccaggcgtggtggcgcgcgcctatagtcccagctactcaggaggctaaggcaagataatcgcttggacccacgaggcggaggttgcagtgagccgagatcacaccactgcactccagcctgggtgacagagactccagcctgtctcaaaaaaaaaaaaaaaaaaaaaaaaaaagaaagaaaagaaaagaaaaagtacaagaaaaagaaaaacccctattcaccctcatcccatttcctgtctttgatctcttaggacatactataccatctttaccaataattggtccgtagtatctattactatttatttgatttttgttttctttttccttcttgtctgtgatgggttttcccaaatttactgtttgtttctggaagaaaagaatagtacttcgttttccccctgtattccatgctttatttaatgatgctgactttcaacattttaaaattgagatgaaaacaagaaacgagggatgccaggagagtggaaactctcgtaaaagactagtcaagtgcagtagtgagaaggggggaaagagtagaacaaggagttcgatctgtaactgactgtgaacaatcaattgagataactcactaccttcggaccagccaataagtcctcctactgtttgaactatttaaagcccccaaatttgttcattttccccttacagtgatattctggtttcagtttactgatgactatatttacaatattaatgatatatatatactctaagaattccctggcacatctatttatcaatagctggaaaaacgtactgaataacaagaatcagacgtgttgctaagcatcctgggaaagagatatgcaaaattagcatttcgtcatcagggcgtctttcccccggtttgtcttgagtggctcagccaccgcaaggtaccagagagccgcccaatctgcgctggcctcctttatctgtttgctgtgtgaccctccggacagctctgtgggacctggaggaaactgtgagccctacagataaagtctgtgcttccagcgtcggtaaatcccagcaagcgccactacctggaggctgacactttcccatcttggcagtcagctccctacagaggtgcttctcccactgcccaagatccctgcctcctccttaaaccccaactgatagaacagaaaccaccacctaaggaacgtgaaggggaagcatctgaaacaccagaagatcttggattgttcctgaggacttcagaatctacagggacaaaaggcagaagcaggaagtccgaagtaaagatgactaagaaaaggcgggtggaaaagatttctgtgaaagtgtcagaggcaaagctctgaaagacctgaaactcatgccgaaagcaaagaacagcaaaaagacagtagggatgtgtctggagcaacaaggatcgggctgttcctggggcagccgaattcacagctctgttttactcctaatggaggatcttcctgctgcagcggcgagtagaccttactgtaaaggtgcaggcaaggggaggggaagggcaggcagctgcccattggagttcacatctccaagcctgagaaaatgtgttcctggatgccccaagccaatggaaaagcagaatcattgactatgtttgactccttctggtacctagcacagtatctgggacacagcaggtgctatgtaaatgtgttgagtgaatgaatgaatgaatgccattgaggagaatgaataaccccagaaaactagacatgggtagatgttgtcctaatttcaaaagaggggaaaatgagagtgagagtttcataaatgacaatctctaaacgatgttgctctctagcaaaattctagaatggattattttaagaacaaagcaggtaaacattggcagccaacttgaaattaataagaaaaaggtgtgcgccagaatagttttatttccttttgtttttcattgtacagcttgatttgactaagttgtttatacctttcactctgcctttgcatgcactgggggtgatctagtctactatgtggactggaagtccacccagtggccaggctcagaggcagggaaggggggttggtgccattctgggagaggaggtttctggggctgtttctcagccagatcctgtctcatctgtttccaacaaccccacaaatgaagacactgaagctgactaatcaaattgactgatgccccaataggtgtcatgatatgcagtgagaatccggcaggcattagagatgaacagcacgggctgcagccacattatctcagcttgagtcctagttttcaccagctactagctagctatctctggtcaagtcacttaccttgcttgagcctcagtttctccatctagaaaatggtcataatcgaagtatctatcttatagggtgttgggaagattaactgagaagccacatagagtttactggcacattaaaaaaagaaactataagaatgttagctgtccttttgcacggcaaaaggaacagtaagcagagtaaacagacaacccacagagtgggagaaaatcttcccaatctatacatccgacaaaggactaacatccagaatctacgaggaactcaaattagcaagaaaaaaacaatccc

SEQ ID NO: 1883026 - DNA, 4001 bp, Homo sapiens
ttagtggagacggggttcctccatgttggtcaggctggtctcgaactcccgacctcaggtggtccgccaacctcgggctccaaagtgctgggaatacaggcaaaaaccaccacacccggccttgaattgtaattctcaggtgttgagggggaacctggtgagaggtaactgaatcaggaagtcaagacttaagggtctcctcaatctaagtcccgaggcttttcccgtacagctagcttgctgcttcttcaataatagatatgccttaattacagtgattgttcaagccaactgatgttgctatgatcacgtaccagctatgaacacaggactgtcactgtatctcaggaataatggcaattaaatgatattgcaagagagtaacagtctattggccatagtcaccatttgatatttgcaaaggaatacatttgtattgtgttttataaggtacagggtattttcatatgacctatttcatttaatattctttgcagtccagttaaattagtatgacagacattatcattttacaaatgaagaaactgaggttctgagagagatcacataagcagccgagagtcagccactgagttcattgcttgcagagccagaataacctttcttccccaaaagtattctctctgctaccccgcaaagaaaaaccagcaatcaaacaatgtcaacaaagccatgaaaccaattgctgtactattccagtcagtggaaacattgctaaaaactaaaagatagatggatggatagttaggagggagggagagagagagaaaaaagtatgtagttgatggtggaataactgttaatatggacactacgaaactaacacgagagcagagtcaatttctctgactttaggttgatttcattccacagatatgagactgcacaattctatcagtcttgatgacatatgtatcctatctccagaaacttcctaaccagataatatctgcaaagcaataatgaatgcccagtgcaactataaggccagctcagagtaatatgataacttgaggaagaaaagagtttggcattagttctttcctaagacgtatttgaataagataggattgtcagataaaatacaggatgcctggtcaaatttgaacaatagtgtaaatagatttttagcataagtatgtcccaaatattgcacactatatcctactgtcattgcacagacagtagtttgaagccaaaataattttgatttgcaaaagcgcggcatttgcgaagagaaaggggatattttccaataccaaaatctttatgttttacaagaaaagcaaagcttggtggatccaggtttagagataataccatgaaccatcgtgtccgaggtgagcagtttccccaccacacagtaaagaggaaagcttcgtgtctgcatcatttctaggttaacagcttgggattttcttcatctttgatcttgctaatactgtattaacacagacaagcttaagcacagatgtgcaaagtgttttacttttcagtgtgaaatagaatcatgctatgtacattactttgcaatttgaaaagcttgctctcttaccactgcactctgcggacctttgccctctcctggatccctcttcttcatgcctgacaccgtggataaggaggtgcgtgagacatggttcattccttaggtcacctaaacctatggttctccttattctcaaggtacaattcagagacgaggggacctcccttttcaacacggagcatgccaggctcctaaaaacacttaatgtgctctgtccactagtcatcttcactggcaagtagtggtgtgcttaagaaaaaccttcaggcaggatcttggctgttctgtattggggaacagaaaatgctttcccaccccaaaaccacagcaaaaggctagtcaagtgaagcagtgggagtggagaaggaacaaagaaatctgtaactggttgtgatcaattagttgtaaacaccactgcactcggaccagccgaaacacaaaggcacgctgctacttatataagcctcgaaagttccatctctaccatagttacggtgactattcacaggagctaaaaaaaaggaagagtataaatacaccccaaatagaaagcaaatgtttaaaaaataaaactgttaaacacatagactttgtaagaaaaaggtccttctctcttcagtgacattaaaggagctcgggcaaccctgctcaaagcattgtgggtgatttgcatggaaaccctgcatcagccacatccatcaaagactcccacggtgcccccggcggggcctcagtctcacagggccaggacgtctagagcgggaggggacgtcctcttaagaaggaagaggcaacccgccgcgggggtggggccgggcgggcgggggccccttggaattcagtggcccccccgggatcaggggtccccgcggttcggtggtcccggaccccacgcagggctggcgcggccccccacgcccgcgcccccacccccggttccccgtggagggggagcgtgtgtcctgcgaggagccctgcagcccggcgtcccctccccttttccttcccaacgaccctctttaaaaatgaatgaatgaatgtatgaatgaatgaagtcccagattctggtgtcacccacgatgcttttcttgagctttccaaggtttgttttgttttgtttgagctctttaggaagctttcctggcggtttcgccatagtcctgcgctcctgttaccaagtggttttgtttcaaagcggctgcactggggaccttgagctattctggaaggaggttaggaaccccactctaaacagaaagggaaacattcggtccgtggaagctaacattttaaaatacataattagcaattatctttttaaaaagtgacgccgtggaggaatgaggcgcacagagcctcggagagactcccgggggctgaacgcgcacctggcttctcagcaggggcagcctgggcccccagccctgggccgcacagcgggtcccaggagctgccgggtggggcaggacccgacacgaagggcgaggggagcgcagcctcgggggtctttgcctttccaggctctgcagtgggggcccgaccccttgacccccagagcgggtcattttgaacaatcctcttactacaaaattattttcagtaaaacgcatgaaataatcagtatgtatcactggattttgcgattagtccattaattttaaaagaagcaattaacaatttaaaaaagaagatatgtccattttaaagtttttttttttcaaatttagaaaaagatttcatgttatgaaatgaactttccacctaccaagtattatatcttgtgttccctgcgtaaaggctgtgtgttttcacttttacattaaacacacttaaattttctttcctttttttctttttttgagacagggtctcctcgctctgtcgcccaggctggagtgcaatggcacgatctctactcactacaacctctgcctcccgggttcaagcgattctgccgcctcagcctccggagtagctgggaatacaggcacccgccaccatgcctggctaattttttggtaattttagtagagacgggatttcaccatgttagccaggctagtctcgaactcctgacctcagatgatctacccgccttggcctcccaaagtgctgagattacaggtgtgagccaccatgcccggccttaaattgatttttaaaatataaaattttggccggaccggtggctcctgcctgtaatcacagcactttgggaggccgaggcgaaccgatcatctgaggtcaggagttcgagaccagcctggccaacatggtaaaaccccgtctctactaaaatacaaaaattagccgggtgtggtggcagatgcctgtaatcccagatgctcgggaggctgagacatgaaaatcgcttgcgccaggaggtggaagttgcagtgagccgagatcgtgatactgcactccagcctgg

SEQ ID NO: 1883027 - DNA, 4001 bp, Homo sapiens
atgcacatcctcccatatacttataaatcatctctagattacaagtacagatttagataatacctaatacgatgtacatgatatagaaatagttattatgctgtattctttaatgaataatgaccctgaaaaagtctatgttcagaacagacaaaactatctattttttccccctaatattttcagtcagcggttggttgaatccatgaatgtggaacctgcagatgcggagggccaactatctttttttttttttttgagatggagtctcattctgtcacctaggctggagtgcaatggcacaatgtgggctcatcgcaacctccgccttccaggttcaagcgagtctcctgcctcagcctccagagcagctgggattacaggcacccaccaccatgcctgaaaaatgttttctatttttagtagagacagggtttcaccattggcaggctggtctcgaactcctgacctcaagttatccacctgctttgacctcccgaagtgctgggattacagacgtgagccaccgcatctgaccctaactatcgttttaaaggcacacttgtccccctccctgtttcctcctaaaacagcgagccggcatccctgcctcctcctaggcgttcttatttggtgtaggatggtgataaagccaccccattcctttccttacacagaatccctccccttttggggtcggcattttcttggacaatcaaatgttcttggagctgctgactgcctcagggatctttttttacaagaaatagtggtgatcatgattgggctacaacagctgctggggtggtcctgatccctggggccaggactgggaggactgagaaatgtggccaaggcatcaaggctcaggggtcgcaccctcagccattcttgagaccctctcaccagcagcacaaggcgatgctgcctctcaggcccagggcggctgcccaggaatcagctttctgtggccgcttttcttccttttccaggaggcctttgttgttaaccctttggtgcatcaggaagttgatcattccattccgtagagacggaagcaaacaaggaaaggaaaaaaataactctgatgctgaaacaatgttgatgaaagcttaattgagaagtttcttggagagactccaccgaacagaatcggttgagcagaaaattgaaacagacacaaacactgtctgttttggatcggactggtttttattctggagataaagtgcagcaaggattgtgaataaatatgagggctgggggacacagcgctgtcaagttaaccgttctgtgcaaacgcaaagctggcggacaggggcctccttgtttgaggacaacggccccgactgaggctctgggctgacaggaaacgcacctatagtcccagctacttgggaggctgaagcaggaaaattgcttaaacctgggaagtggaggttgcagtgaaccgagatcgcaccactgcactccagcctgggcaacagactgagattctggctcaaaaaaaaaaaaaagtacattcaggctgggcacagcggctaacgcctgtaatgccagcactttgggaggccaaggcagcaggataacttgagccaaaggagttggagaccagcctgggcaatatagtgagaccctgcctctacaaaaaaggaaaaaaaataactggatatggtggcatgtgtctgtagtcccagctactcaagaggctaaggtaggaggattgcttgagcccaggagtttagagctacagtgagctatgattgtgctactgtactccaacctggacaacacagtaagaccctaaaaagaaaaggagggggacatttatgtaagaatgctttccccccaacatgaatattttgtaaagttagcttgtttgattgaaatacaaaatcaaatggtaaaaagccagtcaaatttagcagtggggggttgtataccaactttagtgacactaatgttaataagttctgataacccactaccatcggaccagccagaaaaactgctttcactttcattttataaatctctgaagtggctactctaaataagttaggatgagttattttaagaattctccaaaaagtctgatattatatgacccctacaaaataatactgcaaaaagccatacattatctgattatcttcctttaattttaaatagcttaatgcaaactgatattcaaaataaatgtagttgcatgatgggaaatagacgtaaattaccaaatggaagcctcttgtcctttgcaaatacctgaagacattcatgaatcaaagaaaagtaaatgaacatatttgtgtcaaatgcccagcaatagaaacgttgaacatttaatgtcaacaaaatgagctttggtgtttttttttttgtcgtctccctgcctgtgatctgcaaaatgccttcctgaatcaaggcagcagcagatggcagcagtgcccagagcatgcactttccatccactttcccacggagcctggaccagagaactcctcacccacgaacacactgttttcacatcacccacaaacacgctgtattcacatcacccacgaacacgctgtgttcacactggttgtttcctgggacttttcctgataatccttaatagttcctataaatcacatgggtacgccaggtttaatatgctcagatctctcacctttcagacaggttgctgctggcattgagaagttgccataatcctgaaaacagccttttaccaatggttttatcaatgaaagccaaatccctctcaatgattagatataagcactctcactgagtttagtaagaaatcccacattaaccagaaaaaaaaggaatgaaaaggattagaaagtgatcaataaaccttaactattattatctttgcctatcaaatctcaattttcctgttttaagtcattcatattttaacataccaaatgttaaagtattaggttggtgcaaaagtaattgtggtttttgccattagttttaataataattggaaggtttcaactgacagaagaaaatgtatgttcaagattatgattaacttgaatgcttaggaaatgtcactttctttctttcttttctttcttttttttttttttgagatggagtcttgccctgttgcccaggctggagtgcagtggcctgatctcggctcactgcaacctcctcctaggttcaagccattctcctgcctcagtctctcaaatagctgggactacaggcacatgtcaccatgcccgtctaatttttgtatttttagtagagacggggtttcactgtgttttccaggctgatctcgaactcctgacctcaaatgatccactctcctcggcctctcaaagtgctgggattacaggcatgagccaccgcgcctggctggaaatgttactttctaaggcataacattccccaccttcatatgtattgagctcagctaatcccaggaatttttttaaagtaattggaatgagaattataattgttctgggacctgggcttagagatgtgaagggctgaggcttccggagagagagtgaagaatacagaaaagacacagtccctaccctcaacttggtgattgctccagcagtgattaggacaactttccaaagtagactagctgagatttcctggagggctggccagctgctctgcctcccgggttcacgccattctcctgcctcagcctctggagtagctgggactacaggcatctgccaccacgcctggctaattttttgtttttagtagagacgggttttcaccgtgttagccaggatggtctcaatctcctgacctcatgatctgcccacctcggcctcccaaagtgctgggattacaggcgtgagccactgcgcccagccacatctcttgttaaaacataaataatcaacttctgtttaacatggtaggctgcccaccagcaattgcctcaattccttttggaaccattaaaattagactgaaataataaaaaaggagcagagaagaga

SEQ ID NO: 1883028 - DNA, 4001 bp, Homo sapiens
ttttgtatttttagtagataccagggttttaccacgttggccaggctggtctcaaacttctgacctcaagtgatccgcccacctcagcatcccaaagtgctgggattacaggtatgagccaccgcactcagtgatatatattttttcataaaaaattatttcactctaaaacctgatcttactcattgtcactcttgggtttgagtcataggttgaaattatatatacaaaagctaagttctggtccatttccttcacggtggacctcatttctaattatttgtcacctgaagtggatattgaagtgcctatcacatttagcacattgaacaagattctgggccgggcgcggtggctcacgcctgtaatcccagcactttgggaggccgaggcgggtggatcatgaggtcaggagatcgagaccatcctggctaacaaggtgaaaccccgtctctactaaaaatacaaaaaattagccgggtgcggtggtgggcgcctgtagtcccagctactcgggaggctgaggcaggagaatggcgtgaacccgggaagcggagcttgcagtgagccgagattgcgccactgcagtccgcagtccggcctgggcgacagagcgagactccgtctcaaaaaaaaaaaaaaaaaaaagagattctggtattctaactttgtagactaccagccattctagaatttgggggctttgtatgtcaaggcttttacattcaggactcaggtattaatagtttaagaaggctgacagacacaaagtgcccgttttcagcaagctctcagcagcttgtgaatgctcctcaggcccttattaacaaatgatgcccttttcttctgtcgagatttagtaatgatagggcccttttgccaattttttcaagggcatttttttggagcaaatttacaatagagggtgcatatttttcaatagtgcagccaagtttatttgctaatgaagaaagccagtgtgttggacttttttgattgaatctgagtgtcaactctaagcaactgctggctgacaactgcagacggaaaggctggatgaatgccagcgaggaagccttgccagggaggtgaaaccgatgaacacctccattcttagctggttataaattggatattgatccgaatctgtgaacctatatattcttaaatttttttttcttatagctttcagattgtaaaacctatatattttatatgtgaaacaaacgaacaaacttatgcaaaaaatgtacattatctgctcactcacacctacacaattattgaatttatagcaacaaactgtttataacttttttatttttcatttttgagacaggggtttcgccatgctgcccaagctggtctcaaactcctgaactcaagcgatcccctcccactcccacctcgccctcccaaagtactgggattacaggcgtgagccaccaggaggtggaggtttcagtgagccgaaaccgcgccattgcactccagcctggcgacaaagcaagactctgtctcggggtggtgggggggaaagtatacatacatatatgtatgtgtgtgtatatgtgtatgtatgcgtgtatatatatatatatattttcacatatatagaaaagtaaccttgattataaggtttattaaaaaccgaatacaatatttaatacattcaaaggtaattaaaacaaaattattcctttcgtgtaaattttcttctcaggcattttgaaggttaatacttcaacgctgctgggaagttaatcttactaaaagaagcttataaccaataggcttccttgaaagtttttcaaatcaactaaaagctactctttcgttcaaaccgtcaactaaaggttacttttatatgcgtttttattgatttatgtaaacgttgtctactactgttattagtgcaaaacagcaagctagtcaagcgcggttgtggggggagacaatgttaaatcaacttaacaataacccacaacactcggaccaactgtgttatcctgtgagtctcttgttatttatagtgcctacttagggtcttttctaggtaaggagacttttcagagcctatgccatgatcgtaaaaataaaatgtgtaaaactttttgattaaacacaatgaaaacaaaaccaaatgctctctcttaagagagtttgtaagaattatgttaatcaaccaaggtttttctgcatttcacttttacaaatgcattgtgggtagcgcctagctaaatatgaaagtaaacccggcgcgtggttcgcagccacgcgggctccgggcaattgcgctttagtctgggtggacagcttcgccggagctgagagcccgcgacctgccggaccagggctgggccgcgggtcaatgatccaggaaatcccgtcactcgcgtgcctgtggctgaagcgcggcagcttgtcttgtccgtttcgtgtcagtttcagggctgagtggcagcgtctggactttgcggacgccgagggctcagatgctgggctctggggagggagagggcgccggccggcctgtccctctccggggatttgcaggtaccacctgtcggctttgtttcatcatcaggagcccctttgcccagaaatcccgatcgtctacacccaggtctctactgatcagagattgagagtgagtcaacaggagtccaacacgtgacccccataagtctaccctcttttcccccaatacttgtagataccacccagtaacacccgtgtgtgctaaaaatcctattctgggagttcttcggcagtttaaatcgcccatgaattactcatattttctcaatccaccgtgagcctggcacatttcttttcagtaattgattgggaaagtgcaagccattggtgacctttagaagttttaaatgtttataacgaaagggctaaggacagaggagattacccacacttaagtattttgcaccttaaaaatgctagcaaaaatatgaatttatattccttcagggagaagatttcgtctgaggacgtaggccgaaccttgtgttttatatgtcatatgaattacgctctgaaactaaaatatgaaatagattccataattaagccctttggaatatcagcctcatctgaattatttctaaggatatttttgccttttttggtttattaaaaacttccttttggggaaacttgtatagattttctgcacttaggcaaaataaagcattttattcaaaatatttcttagggttttcctagaacttactcttctttcttcctgtaaagacaaacctaggaaattgttcagaaaaaggcccaaggtgatttcctcataacctatagtgattagtgagaaaaagtttggatattggggatttcggggttgatttgataatttcaggaaaatgaagaaaacctcaaatttaagatattaaaatgtttaaaaattgtcctagagaaaacgatggtactaaaagcttaaaaatttctaaagattaagagagctgacagtgatttaaaaaatacatttaatctaggaaaagcagtagattaagaaagatattaggaatgttgtcaaatgctgtcttttaaaggtggataattgctttagtgacacttatacttttgggatttttgtcttatgattaaggtggcaattacataatagtcatcattctagattgtataaattatactttttacattatttcattatattatattactggtatctttttctttagaattgatagaatgcatcagcttttaatctccctttgtaatagttatttaacctaagggagatcagaatatgccatgccaaaatgtgacactttgtcatcaggattattttgagctgaaggtaattgagaatgaacatatagaaagaaactttctcagagcttcccttatctgactaaaagcagtgacttctgagaaaggaggctgctataaattccccttttgggttaggtctactcataaatgcattcatcagggaagttttatggccctga

SEQ ID NO: 1883029 - DNA, 4001 bp, Homo sapiens
aggatggggaagacattggtttaaagtttacataacaaacggtacggtacctctgtttaaaatacttttcctggtaattttaaccagtttgtaacctatgcctttctttgtctcagcaaataattctgtttaggtacaagttctgtgtcttttagatgtaaattttttactttgtttcatctaatagtcttttgaaagtgcaagcttagggttgcctagctactaattacttagggtagtggaaaagataatcaagagactgatcctctaaagtggacgatcactaagtggaggatcactaagtagacgatctaactggatgatcacttcagacgatcatctgaagtgggcatagactattagaaaactggctaatgaagaatcttataaaagatctgcttctgtttgtctgtatgcctatgtttatatgtgttacaggcatgtgacatttcattaccaaaatacatgaaaaagctcaaattaattggcatcaaaatatgccaccctgacatactgatgactctgagctaaaagaaacagaaccagccaacacaggaaaacttcacctcgccggcaactgctccccttttgtaaagagaaatttacatctttaaaggaaatttccatgagtaaacgtatctgtatcagaaagagagctgcctggagacagcttttatcacctgggagcctaacaaagcaacctttattcatcatacattttgacccttccataatttgtctccaccacgccccaaaaggcccatgctcctattccctggcccttctttcagtctcccacttttgtggccctccagtgcatgggtatgtaaaaatagtttttctcttgttaatctgtcttatgacaatttaatctgtggcccagctaaagaacctagaagcgtagggggaagccatatctccctcccccacctttgaatcttctttacaccacactctcccgggtcatctggaccctccttgaactggagccacgggagcgcaaggcctcccaagtcagggcccgaattccgcgtggtgccaaacggcagctggctccctgaatgcccaccctgaaccctggtaaaaaataaaaaaaacaacaacaaaattccctccaacccggagaaaacaagtccgcctctgttctacctagcagcgccgtggccagtccccgccgcccattctctcttcttccgggcctcgccacaccaacactgcaggacccgtgtcctcgtcccttctccgtagcagaggatgaaaagaacggggtttctccatgtcgcagtggcccagggaactcagaggtggagcgcgggggcagcgtgctcggttgaacttgcctgttcggtccacaaatgccgagcaagcgccaataactcttggcttccccaaaagaggcgacgcccacaccaaagcgggggcgaggagcgcaagccgctgccgcctccccgggccgaggcccccgcccacccgcgccgcggcctccagggcccctccgtggccgggcgggcctcgctccccacccagtgaggactagaagtcccgtcgcaggcactaggttcctcacaggcccgcacccctgcctgggtcctgggggcttggaggacccagcccagcgcccaacacggcgccgggcgcccctgttcccagaaaacgggcggcgcgcggactgcggcccagacggctgctcgagactcacaaggactccaggcgcttgagctgctgcagctgctgggcgtcgtgccgccgccgcttctgctcccgggcccgctgcagttcctgatccagcggctcccgcggccaccacgcgcccccagccctcgcatcctcgcgccccggccaggacgacatcgcggcacctgcggcgcggctctggctgcggccaagagggcacttcctccgtgcggcgccccttcccgccgccgccccgcgactcgcccgggaggggccccgaagtcccggcctcggccgccagatgcccgcctgcccgcggccggccccaagtcagtgcgcagagccccagagcccagccgccggtgggcggggagcgcccgctggcggcggctggagccgaggcggggcggggccctggttgggagcctggggaagcttccaggagcttcagggttcccgccaggccacactcatctccctgcccctttgaggttcccgaccgaggcaaggggtcttgtgcaagtcaggtttgtagatccctagtgaccagacccacgggagctgctcattacatagcaataggattcagccatttttggaagaaagcaatactctgcatataaattctccaattttcagatcatatgatccatgcttaaaacatagtcaatgtatattgtatttagcaaggtataggttctggagatgaaaataaaagctaccatacacagcacttgttatgtaccaatcagctaaacccttaataagaatgtctttaatcttaaacttgtgttattaccacccttatagtgatctacacattcagtgcaatccctggcaaaatcccactgacttttttttttacagaaataggaaaaccaatcctaaaattcatatggaatctaaacggacaccttaccctgggcctcttacttgttttgcagcaagtaggtgcaagtaggttaatgtggcatattacatttattgatttgtgtgtgttgaaccatccttgtattccaggaatcaattccatttggtcatagtgcattaccctgttaataaggtattcaacctgttttcctaccattttgttgagaatttttgcattaatgttgataagtgatttgggggtgtagttttcttataatgtctttgtctggctttgtatcagggtaatgctagcctcaatatgagataggaagttttcctttctctttaatttttttggaaatgattgaaaagaattggtgttagttcttttttttttttttttttttaagacagagtcttgctctgttgcccaggctggagtgcagtggcgtgatctcggctcactgcaagctctgccccccggggttcacgccattctcttgcctcagcctcccaagtagctgagaccacaggcgcccgccactgcacccagccaattttttgtatttttagtagagacgggattcaccatggtctcgatctcctgaccttgtgatccgcctgcctcagcctcccaaagtgctgggattacaggcatgagccactgcactcggccaaactggtgttagttctttaaatgtttggtagaattcaccagtgaagcaattaggtccagagcttttctttggtggtaaattttattttttatttatttttagagacttgctaaagtggctcatgcctgtaatcccagcactttgggaggctgaggcgggcagatcacctgaggtcaggagttcgagaccagcctgaccaacatggagaaaccccatctccactaaaaatgcaaaaaattagccgggcgtagtggcacatgcctgtaattcccagccactcgggaggctgaggtaggagaatcgcttgaactcgggaggcggaggttgcagtgagccaagattgcgtcattgcactccagcctgagcaacaagagtgaaactccatctaaaaaacaaaagaaagaaagaaaaaaaaggcaataactacagttacaaaccattgttacaatactaggttttataattacccgactatttatctttattgagatccttatttcttcatatagcttctgcttactgtctagtgttcttttatttcttctttttttaaatttatttttgtctcatttttccaagaaaatctcactctgtcacccaggttggaatgcagtggctcaatcttggctcactgcaacctccgcccccagggttcaagcgattcttgtgcctcagcctcccaaatagctggaattacaggcatatgccaccacgcccagctaatttttgtgtttttagtagagacggggtttcaccatgttggccaggctgttctcaaac

SEQ ID NO: 1883030 - DNA, 4001 bp, Homo sapiens
ctattttccattcactgtattagatgctcaatacagaaagataaataacacatgtatcctgtatatagaagtacacaatctagggaaggaaatcagcatgaaaattaatcattaaaacacattttaataaagttagtatagcctgtgaaattcattattgtaaaattatcatttaggatgctgtatactacgtcacagaaatctctttattcaaaatttggaaaggaatgtcaataagacttaggaatactatgtccttctaaacaactggcttcggtgcatcttaaatactcttaatagtataattggtttctctctcctgttgaattagcagcttaaaagctgaaagctaatttgcaacaaaactctagtaaataaataggaacctatcttatcaattctattgatctcccaccttgattcaactaacttcaacctaattttgtttacttttgttgttgttgtcctcaaatcttcttaatgatgaagtggagtataagaaaataagtgaatactgactatagtgaataataacttaattgtatatttttaaataacttaaagaatgtaattggattatttgttacttaaaggataaatgcttcagtggatggattttttttaagtgaataaactgcaatgagagaagtctgttcaaagttttctgagaacccaaggtggaagaatatcacacaggcagggaatgtggctgggaggagtgagggaaggagacacaggagagataggaaaaacatccttagaataatggcaataaccactgcaacacttcaataatagtaataagaaataactgtacctcaaaaaaataacaaccataacttcattgttgggttctccctgggtatctaagggagatacaaacattgtaaacattgtaaacaattctcttatcctcacagcaacccgtgatgtagctattaatgtccccattttacagataaagatattgaagcttagagagttagaaatttgcccaagatgccacctgaaacccaggttgtcttgcttcaagtgctgcaccatttacatactgaatctctcgtggaaagataagaggtctgatagagggtcactgatcaaagtagctccaagtatgttcaacgtagagggcacatgtggtgatgcagccaaaggtgaagctacagaaatgagtgagggcaaaatcaggaacagtatatgtttaagtaataggaaggtttcaaaggattttggtaaggaagttatgtaacaatggagaaacgggaaaacaggcatcaaactctggtccttccaaaacagggtggcagtgttagagtttacagctcacatgctttacaggcacagatattattagttcactgtgcaccacagtcatgatgcacaaggccttggtgaacaagagcattacaataacgttttatttccagtgggaaaataattttacatagatggttgtactttgaacctcttacaaatgagtttcattaacaaagagcactgttagaagcactcccttcctaaacagcaccaaaggcagttagagcaaggtcccagtgcttctgaagttccccagtaaagcctttcttatggatgaaaaatgatgacagtaatggtggtgattaagatgatgatacaagctgctgctaattattgagtatgtctgtactcaaaaccatgtgctaatattcattatttcacttaatcctcacaaccaccccaagaaggaggcattacgctgctattacagattaagacactaagactcagtttcaataactcaaccaaggtcacatagctagtcaagtggtagagctggaatttgaatacaggactgattaactgcagagcctgtggggcaggcagctaccttaccctgtctcccgtgaggaaagaattagatcttacggttgacttaccatgtttctgggaactgctttgaaatgatctgattcatagtattggaaattggttgttgagatgttgctgcttctgtctcctttcctttctgaagctgtaagtggtttatgttggggacgtgcagggtgtatacacacaataagtgtgtgtgcacatgccaatgtgaaattgtatatccaaaagaaaaaagtgtgcagagattcagtttagaaataaacccggccaagtccagcctttccacttacgagacatgtgatttagagcaaataatccgatctctccatgtgtcagtctcattgcctttaaaaggtgaataattggaatgcaagtctgggttgttatgaaacttcactgaggaaaactatacatagtaactggccaagagttaagtactcagtatttgtcagtttctcttccattccttctctcctcttcatgcttgcctgccataattctatgtatcaatgtatatgccagccctctcatgggatgtttatatcctagagaaagagcagcataggcccaccactaaaagcagatttgttggtttctactctccccacagataaggaactctgcatttcaaacagcctgctatacagaaattcacagtttgcttggactataagctctcagtttagctgggcaacagttgcttcaagccactctgcgtctgatacctacaaatttgccctctcaccatgtagaatatgaattctctacttttgcttgatttcagcatcaactgtcctacatatgtattctgtaacttctgcaaactctttctcctggatcccagtctctcaatccaggaccaactctaaaaagtgcagactctggttgctatactctatcaatgaatttacctcacatttatcctgttggatatggggactttgcaaagctcaggtgatgctcttttcttcaataccattcagtataaatttcatttcttgaccacttagtttcatgcatattaaactcatctcaaatgaacacagtagaccagaaagcaagtgcacattctagttcttttggctgaattatgcataatgtaaatagaataacatatgagagagcctttgaaaactcagcacttgtcacagaaatgtgtgttgtacacaggccagcccagtcaggagcctgaccgcgtgctgggtgaggcacttgactgtaatcagataaggtggcccttaatcacctgctctccatagagccatacatatggtcttttaaataactttgccccacggttatcctaatctgaaattttcttttttagccacataaatagaagaacacagtttgaaaatcctgtcctggaagcaaaaaggaagctacagcaacataacatgccccacacagaacttggaacaaagcccctgcaggccccaggtttccgaggtatgatacctgtcagcatgtgatgtttcaaagggaaaattgtctgtcaaactgcctgctcttccaaatatgtctgtagcttggaccattttgaaaaattgatttgctttctccagaccttcctattagctttagctggatgtttgcattctctctaaactaatgcctttagcaaccgcagatgaagttatagccacaggcagtactttataggaatgtacagcatgtcaccacgtggagattaatggatttttatagtggcactgtaaactgagagattcatagagactcataagtttgtccttaaaagaccaagcacaagaatgaggcttgttctcctttgtgacagtagacagctcctcatggacattacctaggcccaaatccatccgcccccgtgctgccccggagaggtcgcgcagcgtgaatgacttgtcttactatcagcgcgacccagcagggaggccctggctgttcggtatgtcccagggctgcttgcgggacctgactacacctgggagccacgtagtgggatgagttgctgcacaaacttttcacagctagtgagcttctaaataaaagcacaaaacagcctttagagtcgggaggcctaggcttgcctgctggtagttttcacgccatatactgcagcataattaaatgaatgtaaaggtctcctg

SEQ ID NO: 1883031 - DNA, 4001 bp, Homo sapiens
tttttttgaaacagagtcttgctcagtcgcccaggctggagtgcagtggcgtgatctcggctcactgcaagctccgcctcccgggttcacgtcattctcctgcctcagcctcccaagtggctgggactacaggagcccgccaccacgcccggctaatttttttgtatttttagtagagacggggtttcaccatgttagccaggacggtctcaatctcctgacctcgtgatctgcccgccttggcctcccaaagtgcagaactcttaattcaaaacaggattcctacccgacctcatagttccttgtggcctcactaaccctcctggagtcaccagaaggctctcattagctcagaagactcattgatagtctcctgattctgaaaataataatctacctgacttccctttatctcccttcactggcccaaggagcagaagctgaaaactcatgatactaatggtggccacatgcagactcagcacttttcccagagcttgaagctccagttaaacagattcttttgctcaaaggaaaaatttcccacaatgggagctggcaaaataggcaagcaaggccagctctacataaatcacgagtaaataagtttcccctaaagcatttcagtattcttgcctctcttacccaagtgactctactatcatattgttccccccatctgctttttccatggccaaaacaggttttcaagaaagatctgatttccagtgtgtgacagataaggaacaaagtgcaaatcctccctagatcatttccagtccacatgggtacaagccctgaaacctcaaatgtacatcagaattacctgtggagttgtttttttttttttttttttttttttgcaagcagataaaggcttattttactttaatggctgatctatgtaatcacggaggccagtatgtacacacaaaggggcagcttttatttcttggtctcttcctccttggacaaagtcttgatgatctcctccttcttggcctggaggtgctcttcatagctcttgtgtgcttccttggtcttagatctgcgggcctcagcctgatcagccaggagcttcttgcgggccttgtctgccttcagcttgtggatgtgttccatgagaatctgcttgttttttaacacattcctcttcaccttcaggtacaggctgtgatacatgcggcgatcaatcttcttagattcacggtatcttctgagcagccggtgcagaatcctcattctcctcatccacgtgaccttctctggcattcgggcattggctgtacccttccgcttacctatgcccatatgcctgcccttccggcaggccaaggtgtttttccggcatcaagcgggggaatggaccatcacaggcttgcggatgatcagcccatctttgatcagcttccggatctgctgacgggagttggcattggtgatttcattggtctcattggggtctaaccagatattcttcttgccacagcagaggacactagaggcaagcctcttctgaagcctgagcatactcaaggctgcagccacagcagcgaaaggaaagagctcccctgtggagctttttaaactacaccagaggctactgaatcaaaatgtcaggtggggcagtttctctagataatttttaaaagttctgtgggtgtttctgatatacaggcagggttgagaaccactgctttaaatcattagtcatttggcacaaagtaagacaagcatttaggaaggatcaaagggattttctggtatgccagaatttatgctagcctggcagctgcctaccgtaaagccaactcttacttcctgttcagcactccaagttagagaggcagcatcatcctgaaactgctatacagtgggatgggaagactaaccacattgctaggtagaaagtttaacaggggccaggcatggtgactcatgcctgtaatcccagcattttgggaggccgaggcaggtggatcatttgaggtcaggagttcgagaccagcctggccaacatggtgaaaccccatctctactaaaaatacaaaaaatagccaggcatggtggcaggcggctgtaatcccagctacttgggaggctgaagtgggagaatcacttgaaccagggaggcagaggttgcagtgagccaagatcgtgccactgcactgcagcctgggtgacagaaaaaaagaaagtttgacagggcaaggcttgtactcaatccaactgagtcacaaatttgactctgtgcccccaggaagccaagtcaaaaaaagggaaatataatcagtaatgattcacattgtcaataacacaaagcagcctgtacacaatgagtgcacaatatttatggaatgaataaatgaaaaaaccagagcttaaactcctaatcactcttcattaggatacagttaattgttttttaaaagatctcctgctaggagtcaaataatagaagcaaaaatgaccagaagacagagagacaaaagtcaacagtggagatccccaccaactctgctaacaaaaattaaaactggccaggtacaggggctcacacctgtaatcccaacacgttgggaggccaaggcaggcagatcacttgagcccaggagttcaagaccaccctgggcaacatagtgagactctgtctctacaaaaaaaaaaacaaaaaaacaaaaaaacaaacacacacacgcaaaaattagccaggtgtggcgggctgagataggaggattgcttgagcccaggaggtcaaggctgtagtgagccgtgatcatgccactgcactccagcctgggtgacagagcaagagcttgtctaagaataaataaataaacataaataaataaaaatagaaaagtcttggggaataattgagtagttaaattctatgtggtaaagcggcagcacagtggtaaagacgaaaagatgcctgccataaaatctagtgttctttaatctgtcatgtatttagaaaaaaaaaaaatcttctcttccttttcttctcagtaacagaacccgttttacttagggtaactatgcatcagctaaatgatgacatttctcagccttctagctagggatggccaggttggtgacactttgaacaatgtgatacgagccttttatggtgcttccagaagtctccttaagggaaagggaggcattcttctcgatttgtcctgcatctggctacctggagccatcttgagccaggagggtgccacatccaaggaatggcatcgaggagagccagaaggacttcagggcccaccataccaagcctgaactgtccaactttggacttctttcatgtgtaggaaaaacatatttgagcaatctttcaaatcacaacaaattaatcctaactgatacgattaccgtaactgggaggttcaggtttaggggagctataaaaacaccaatggtaacaaatgcccaaaatacagctttcctaatccatatgtgggtgccttgatcaacacactgcagccttgaactcctggcctcaagcaatcctcctgccttgacctcctaaagtgctgggattacagacaggagccacggcacctggtccatttatcatttactaagcatttactatgtaccaagcactttagataattattatcctcatgctataggtgatgtaaaagaggctcacagagtttaatagcttccataaagcaataaagttgttaacagttggatctagggatgaaacccaagttgaccagatgccaaagcccatgctctttccactaatcatgttgaatctacaaggaaaattcaataaatttatcttgagtagatacctaggttctaaagttagtagcattttgcaaacagttatggtctcactgacaaggctcaccttttcttttgttttgtttttttggctttcaacaaaattttctccccttttgcaaagtaaaaggtacttgggagatgctcaataaatactagttctcttataaatataattgcccctttaattt

SEQ ID NO: 1883032 - DNA, 4001 bp, Homo sapiens
aagaaggtggtgaggccagaagagaatgagccaggaagaaatcatttaagataaaatgagaaagggaggaggctgtcaccagattttagcctagaagaactgaaactcctaatttgattcaaacctcagctgcaacactcagccttaggtgctgaccaggtgtaactcactgaacaacaccattgttgcctctgacaattaccgccaccaagctgatgaatttgtagtcaagaggctccctaaatcaacaccgttatgccttattacctccaagcaaatcagcataaagggatagaacagaccattaaaaatgagccaacagtttgctaggtgactgttcaataagattagttagctcttacgtggatcagcttcctgtatgttcaccattaggagcctgtcccatttaataattctgggggctctgcataaaggtttgcctccatcctgaccatgtcgattcagagccaggacaaaataagaatgcactttgaatgctgctcttaagagaattaaccaggttgggtgcggtggctcatgcctgtaatcccagcactttgtgaggccaaagcaggtggatcacttgaggtcaggagcttgagaccagcctggccaacatggtgaaaccccatctctactaaaaatacaaaaattagccaggcatggtggcaggtgcctgaaatgccagctacttgggaggctgaagcaggagaatcacttgaacccaggaggtggaggttgcagtgagccaagattgcaccactgcactccagcctgggcaacagaatgagattccatctcaaaaaaaaaaaaaaaaaaaaaaagagatgagagagagatttaacctgaagacttggcttttgcccagatcatacatctctcactgtgactgaagggtgtgagactcaccagctgtggacagatgtgctggcatcaggttgccatgtcaataccctctctaggcattcatcgtagggagccatggagaagcagaaccacctgacatgcctccttcagtgttttctagtggtgttcctttgaccagagttcctgagcactgaaaagaagcagaatatgaaggaagaaatatgtcttccttggccactttcgctgcttaaggtaggcattggactcacaatcatttaatcatcacacagagcagtttcttaaacacatactcttcttttggataaaaaactcagagaaatggtcatgccacatagacaaacatgtctattggtgttaggataagagtttttttccctgtggattattttagctgtaggctactcatgaattcccctccattcttgccccagagctctcctacttttgaatgaatagtgaaggtttaacaattacctgttcactgttgcctcagtccctcaaaaataattttgtaggacattaaaataacataagtatttacaaatcggcttctattaaagtgttttgacactactctttttttttctgggaacaaatactttttaatgggtttaaaatttttttgtttgttttgttttgcttttacaaatatactggagaatcacgcaatgctgccagcatcggacacaatccgggggccacaagtctgcacactcctttgctactggtcctgtaatggcagaacctttcatctggcctttattgcccactatgaccactgcattatcttcaaaagaaagaaacacgccatcttttctctggtatgactttcattgtcaaatgaccactgctggatgtaccttttttctgagctctagtttccctttcttgactgtagccatccccatgtcacccacaccagcagcgggaagtctgttcagccgtcccttgatccccttcacggagatgatatacaggtttttggctcctgtgttgtcagcacagttgatcacagctcctaccggaagacccacagaaatccggaagttcacaccagaggacccaccacgtcctcgcttccacatcttgaacgctggaaagaaggaaaaaggacatagattttgactctattcttaaacaaattataggcaaatttatcctgtttttaaaaaaagaatagagttctcacctctacgatcagcaactccacatattcagaactttgaatatctttgccaatttgttaaagtataagcaccagaaataggctcatgagaaaaaaagtatgtggctagtaacgagtctagtaatattctttaaaaattcaaaactacggtattctctagtactgaatatttgcaacatgttcatgaaaaaaagacttatacaatctaatatgattaaaactcacttcaagattaaaatgttcatttaagtggttcatattgcctgaccttccttcggaaagtctaaggctttttatggaaaagcccttcttagaactccctaaattgaatagtcaccgttgaatagccattttctacattccactcagtcaggttggcctgaggttttcagatgtcatcagcttgtccggcaaaaacatgcctctttggattgctccttcctgctccgtgaacatgtaaagttaaagccaccctttcaatggagcttccttctctgggaaggttggcctggtccctttccttcctaagggcaggaccatcaccacctgtgaagaaagatggaaagggataggagagggaaaaagaaattccctgccccaggcttacataaggaaggggaaaatttctcttttcttagcaattcagagatcctgactggcatcacctcccaggactccaaaagcttcctttcttgttataatcctcttaagttctttttttcccattccccctgtgattctgtcagtgtttcccactcattcttactgggcttggcgcccctcctccacactgcaaacctcacccagaaacagggaaagaggcctgggggctttcaagtttatggcccattataggtgcatgctgggaggtgttgagcagggctgcggaactaatcagttatcttaacactgcggacagtagggctagcatttgtgaattaccaaatgtcactgcctatttcaactgtggaaaaaaaaatcagctttatgaattactgatcagtgctttgaatccccccctcaaaaaatctacaaaatcacctaccagagctaaccaattaaagaaagaaagaaagcaaaaactcaaaagaaaattctttgctcagtgaacaaaactaaaggcaaagtaaatcaatgctattgcagaaattgtaaatgaaacaaagagacgtgctttatgttccaatgaggctcatatgaaaccgacactaagattccatactcagggttaatcacaaaaccatagaatatggattaagctactgtgaaaggtaaaatacaaagcaacagaatagagaaattttaatcaggaacaaagatcgccataatccccaaatgggtttgtttttgaaagaagagacatttgtagaggacaaacattcttaaaacaataggagtggtgtgtaaaattaacccaagtaagatctaggctaatgttggggtgaatcagggtaggtactttccacaagtcatgtgttttgcacaagactgactctatgcatctgttcactacggtctaatctttctaaaattagaatgcagttctttgaaggcaagaatttcttctttatgctttatagcttcttgtacccaaggattatctaattttagaaaattagtccactctcctaatactatcttttttttttttttttgaggcagagtcttgctctgttgcccaggctggagtgcagtgacgtgatctcagctcactgcaacctccgcctcccaggttcacgccattctcccacctcagcctccagagtagctgggactacaggcactcgccaccacgcctggctaattttttatgtttttagtagagacggggtttcactgtgttagccaggaaggtctcgatctcctgacctcgtgatctgcccacctccgcctccgaaagtgctgggattataggtgtgagccaccg

SEQ ID NO: 1883033 - DNA, 4001 bp, Homo sapiens
ctcaagctcctgacctcaagtgatccacccgcctcagcctcccaaagtgctgggattacaggtgtgaaccaccgcccccggccttgtgtgtattttttctaaggaaagttaagtggttccatcagattctaaaaggtgttcctggctgggcatggtggctgatgcctgtaatctcaacattttgggaggccgaagtgggcggatcacctgaggtcaggagttcaagaccagcctggccaacatggagaaaccccatctctactaaagatacaaaaattagccaagtttggtggtgggcgcctacaatcccaagtactctggaggctgaggcaggagaatcgcttgaacccgggaggcagaggcagcagtgagctgagagcgtgccactgcactccagcctgggcgacaagagcaagactctgtctcaaaaaggaaaaaaaaaaaagatacattcctaaacaaaagctttaaaatgagacattaaagaaaactaagggccggtctgagtgcagtggtgtttacaactaattgatcacaaccagttatagatttcttcgttccttctccactcccactgcttcacttgattagccaggaaggaaggaaggcagggagagaaggagggagggagggagccggggagggagggaagtaggggaaggaggaggaggaggaggaggaggaggaagaagaaagctaagagcagcttgggtacttttccacacttttaagaataacatgaatggcatttataggctgcctctcaaggggcaggcaaggacccacagtatacatccatctctatcctccacaagactccctttggggtataaatatgtgttgaataaataagtaagtaaacattatttcacccagtgttttttgatgacacttatcagagagagagacttgtaggcttgaaacaaatccagttcgaatcatacccagtacattcatgtcttttttttttttttttttgacagtaataggctttaattcactttatttttcttgcataaaaaccctatgttgtagtcacagctggagcctgggtcctctgcacggagactctggtgtgggtcttggcgaggtggtcagtgaattcctgatagggagacttggtgaatacagtctccttccagaagtccttcaggggatcaggtagctgtagatgttagagacagcatccaaggtggcgttggcgaagttgcccagggtggcagtgcagcccctggctgaggtgtagcagtcgtagataccagctatcatgagcagcttcttgggcacaggagctgagacgatgccagtgcccctgggcgcggggatgaagggcaccagcacagagccgcagcggcctgtcaccttgcaagggacggtgtggagcttgccgatcttgttcccccagtagcctctgcgcacggtgacaatggagagcttggtcaggatgatggccccgcggatggcggcggccacctccttggagcacttcaacccgaccagcgtagccattgtagtccctgatggcaacaaacgccttgaacctggtgcgctggccggcgcgggtctccttccgcacaggcataatcttcaaaacctcgtccttgagagaggcccccaggaaaaagtcaatgatctcagattccttgatgggcagcgagaagagataaatctcctctagggacttgatcttcatgtccttggccaggccgtccagcttggtgacgggcatccgctccttatcctgggccttgcctccgcgaactccgcggtcttggccccggccccatccacggccgcgaccccggccccggccccatccacggccgtgaccccggacccggatgccactgctgaaaccctcagcggaagtcacatcagttccccttcccagggcccccggggcctccggcgcccacaccacccgcccgcccgcccgcgcccgcccgcccccgccctctgcactggcgtcatccgccatttggtgttttctcggagaagcagcacattcgtgtctttacagaaaaatatatctgctatagtcacaacttttacaatctagggattatataaatcttttgttgttgttgttagctaattagctaacaacacaatgaaaccttatgacattcactacattttgaatagtgttaactatttcatgtaacccatcatgaaataaatgtaagaatgaaagatcccagcctgatgtggtgttgtgtctctgtaatcccagctacacaggaggctgaagtggaaggattgcttgagcccaggagtttgaggccagcctgggcaacacagccagcccccatataaaaacaaacaaacaaacaaaagtatcccataataaccaaaacatatatttttatagctcttttaaaatagaaggtgaaataagtttaccgtaacttcctagaatttcatttaataattaaatgagatcacgcctgtaatcccggcactttgggaggccaaggcgggcggatcatgaggtcgggagattgagaccaacctggctaacgcagtgaaaccccatctgtactaaaaatacaaaaaaattagcagagcgtagtagcgggcgcctgtagtcccagctactgggcaggctgaggcaggagaatggcctgaacccaggaggcagagcttgcagtgagctgagatcgcgccactgcactccagcctgggcaacacagtgagactccgtctccaaaaaaaaaaaaaaaaaaaaaaaaaaaaaaagggagtttcgttcttgttgcccggcctggagtgcaatggcgtgatctcagctcactgcaacctccgcctcctgggttcaagtgattctcctgcctcagcctcccgagtagctgggattacaggaacacaccaccatgcccagctaattttgtatttttagtagagagggggtttctgcaatgttggtcagactggcctcgaactcctgacctcaggtgatccactcgcctcggcctcccaaagtgctgggattacaggagccacggcacccagccgaactctacttttcaacccgagaattactgttcaatcagtttagattacagattgttcttttgcagaccaattttgccatttcttctcttcaaataggacatcgtaaaaacctcatgttaataatatgtatatgtataataatatgcataatgatatgcatatacgtatattacatataatacacatacatgcatatacgtatattacatataatacacatacatgcatatacatatattacatataatacacatacatgcatatacgtatattacatataatacacatacatgcatatacgtatattacatataatacacatacatgcatatacgtatattacatataatacacatacatgcatatacgtatattacatataatacacatacatgcatatacgtatatacctataatacgtatatacgtatacgtatatacgtattataggtatatacgtatatacgtattataggtatataagtgtgtatatatatatatttttgagacggagtctcactctgtcacccaggctacagtgcaatagcatgatctcagctcaatttccgcctcctgggttgaagggattctcttgtctcagcctcccaagtagctgggattgcaggtttgtgccaccacacccagctaatttttgtatttttagtagagacagagtttcaccgtgttggccaggctggtctcgaactactgacctcaggtgatttgcctgccttagtctctcacagtgctgggattataggcgtgaggcacggcgcccagccttaactcagtatatgttgccaaaagtgaaaataatcatccatagtaagcctcaaaatctcctttaaataaagttctgctattattattattattatttttttttttttttttgagacagagcttccatctgtcacccagaccagagtgcagtggcacaatcttggctcactgcaacctgcgactcctgagttcaaggaattctc

SEQ ID NO: 1883034 - DNA, 4001 bp, Homo sapiens
tatcacccaaggtcaggagtttgagaccaacccggccaacatagtgaaaccccatctctactaaaaatccaaaaattagccgggcagggtggtgggcacctgtaatcccagctaccctggaagctgaggcaagagaatcgcttgaacccaggaggcagaggttgcagtgagctgagtgcagtgaagtgcactgcactccagccaagggcaacagagcaagactctgtcccctgccaaaaaaataaaagggtctgaaagatgaaatacttgaaaacaaattcagttttcaggtataccacattctataaatgaggtaatttatagaaaaatgaggtaatttagtagaaaatctgatttcaggaggttttggcaaaaaaaaaaaacacaaaaaaacaaaaccaccaagttctttattattagaagtgatattgtgcagttcacattattgcttggttagtctttcctccagaaaaacagcctttaatgtttaatatatctacaaatacgttataaatggttattagggttagctatgctgcagctgttacccgcctgcttacagatttcagtttggtcatctgttccaaacgcactgatgagatcttccttcttggcaacctgaccttaggaaacatttacaaacactgagtgggtctgcagaacttcatcaaggtctttttcccttgtgagggcaggagagaaagtcctatgtgaatatacttgaaacttggacatgcatttacatttaaatacgagatggcaacaacatgaacggcaagacacaacaaatccccctgatgacctttagtgtagagggcagttttcttccccccccgcccttagatggaatttcactgtttttgcccaggctggagtgcaatggcgcgatctcggctcactgcaacgtccgcctcccgggttcaagtgattctcctgcctcagcctcctgagtagctgggattacaggcatgcgccaccacacccggctaattttgtatttttagtagagatggtgtttcatgttggccaggctggcctcgaactcctggcctcaagtgatctgcccgcatcggcctgagggaacattttcaaaactcagaactgtatttgccctaccatttgctcactggagaaaaatgtcatgggaggacgtaagaaacacaagggtggggtgcagacagctgctgccacggaatgccagtccctagatggcagcagtgaagacactacgcactttaaactgctagggctactgagatctatgacagtattcggaacactaggttctcagccatcattattctaggaaaaggaccacaattatgagatttcttggctgcagcttttatgacaccaacaaaacaaaaccccaaaccaacaacccaatcggaaccaaccaaataaagaaacccttggcttaggcgccaagctcggacagcgacgtctcatgctcacagcaggaatgttccatttcctcccgggccaacaaacaccccagcctggcccattcactcgacttgggcagagacaggccgcctcggaggtgacggctcaggcccaggcccaggcccgagggagggggctactcacaagccgctccgccagccgacgaccttgtttttgtagcaggcgatttcgaagcgcttcctggcgcgcttcatccgtaccacggccacattggttaggcggatctggttggtgggggtgaagatcgacatcgcggctgttcaaagacccagaagccggcaaaccagggctgacccgcgccgtccagcctgaaggccaccagcgcctcgcggtaacgaccgagcggcgcgcggcactgacccaaccacaagtgcgcggcgccgcgactcactagcttcaggcagccgccacagcgtgtctggcaggcttacttactgcgcaggcgtcaggtggagcagaagccgggaggggagaagtgagcgatgacgcctgcgcattgtggcttttaccgccatctttccacgcccaaaaagggaggtgcttttccttggcgttttactttcgccaatgagctgagagctctgacaggatgctcgcggatgtttagtgaccgggttgaaacacagcgttggcaccacctcgttccgcggaattcaagggccagacccactttataatagaaatttttttataatggaattattttatgataaatatttttatttactcacccttttataatagaaatattttaacataaaatgtagacaaaaaagtgtaatgaaccttccatgtacccatcaccgcgctatcaacattttgccatccttgttttattcttttttcattttttttgttgcttttttatttactttttttttttaaagtcagtctcactctgtcacccaggctggagtgcagtggcagggtcatggccccactgcagcttcgacctcctgggttcgagcgatcttccagcgttagcttcccaagtagctgggactacaggtgtgagcggccacgccaagctaatttaattaaataaataattaaaaaaattttttgtacagacgaggtctcactatgttgctcaggctggtctcgaactcctgggctcaagcgatcctcccgcttcggcttcccaaagtgctgggattacaggtttgagtcacagcgcccggccggttgggggtattttaaagaaagcatcatatggtttcagcattaaatacttcagcctatagcccttaacagatacacgcgacgagattaactacaattccttaatatcatctattagatgatattaagtcatcctcggggtttaccctcggggtttcccaaaaataatgcctttctacagtcggtttatttcaattaagatccaaacaggcccacatagcatttcccccgctccccactcctttcctcttttaattttcccatgccaatcatttctctctggacccgccttttcccagtctgagccaatccaaacggaggcggaagcgctccgccctcatcgcccggaactccgggcggtgcttatttctggacacgccccctttcccctctgagccaatcggagcagggccgagagcgcaccgggcactggcttcctttcccggagctccgggctttcctctgggcccacctcttcgtcctctgaaccaatcaggacgggcctggcagcgtcgtagctgcccacagttctgcagccactcggtacggcgctaacgccgcgaggtagctcggtgcgtctcgcagtaccagtgcgaacctttgggctctccaggtccgagatcctagtctcctgtcggctctgaggaggatgggtaagggcactcggcgggcaaggaccctggggcggcaggggaggtaaacgttttactgagaccctctccgggcggagtggcgtcctcggtccccttccttcggagactgttgcacttgacagcaccggctagccgccgctgagagcaaggaggaccgatccctacttttgacctggcttttgccttttgaggctagggggttagacagaaaactacccctcccactttacccacgtgtattaggacttttgcacctgtaaagcctaaatttcaggcttcgacttttgaaattgctgccaggttgaacgtttgaagccaggtccttccatatctctcttaaaaaaaaaaatgagacgtaaggtcagttacttgagaatcttttacaagtttaaccgtgagcctttgaaagtacagttagtaaaaagaatacttttactacttaagctttttttatggagcaagcacaacaaaacaattaacttaatttcacatgaagtatttttactttatgttccttctcttgcttctaaatgctcatttcgaagtgaagatacagttttatattctgttttttctttgagttagtgttaacagtatgataattttattacgttactacatagtgtgttatttttattacagttgattcccccgccccccccacgagatggagccttgctctgtcgcccaggctggagt

SEQ ID NO: 1883035 - DNA, 4001 bp, Homo sapiens
atttttagtagatgcggggtttcaccatgttagccaggctggtctcgaactcctgacctcaggcgatctgcctgcctcggcctcccaaagtgctgggattacaggcgtgagccaccgcgcccggccactctgtgtgattttcaatgaaaagtagtgaagctatcatagtgtggggtgaacatgaacaaacttcagacaaggaatttaatatagtttctattaagaatttatccattttcatagcacaaaataacacaattcacctctttcatacccattaagagatcttcctcaaagaaatattatcaatagagatgggaggcaaagatttacttcctttagactattaggttatattaatataagtatttgctttaattttatattttaaaataatctatatttaggtaatatttactaagcattgactaagcaccgtgttcatgtattagtctatttaactcttatcaaaatcctgttagataagtattatctccgtttatagatgaggaaactggatcacaggaaagtttaagtaacttgttcttggttgcaagcctaataaatggagagctgggatttgaactcaggcagtctgactccggaggctatatacatttaccctccttggtacactgctttttttcaaaaatagaaattcaacaaaatttcccaaagtaaaagttcatttgaagtttcagaaacttaaaacaatgattgaacagataagttgcaacagacttcataagcagttcagtaaaaatgtagacttacgaaatggcatatatcaagatacaaaataagttgcttctataagtttcttttcttaaaaaaaattacttggaaatatttcaagtatatagaacagtaaaggaaataattacaagtgaacacccatgtgccctctacttagcttaatgttttgccacattttcaagatatttctggtagaaaacaaacgttatagatacaaatgaacccttcttgttacattcccttctgttcatctctggaagcaaccagtattctgaatttggtatctatcatttccttatacaatttttagtttgatcttacttttttgtaattattaaacttttatttatggtatgtcatatatatctttccgcaacctgtcttttcatttcttcctcaatattaggttaatgactctatccatatgaaaaatggtagctttagttcactgattttttggttcgtgttgtatgtcaatttgttcaacaatgacacttattcatccattctcctattagtagacatttattgtttcactaatataagctattttgctctgaactttcttgcacgtgcctataacttaaaaatacacatacttttttaaaacatgcagttaaacaggaacatacacatttctttaacatgtagttaaacaggaaaagtaacacatgtgcatgaagaatacaaccaagagagccatcacgttcaagaaaagaccacaggttattccgagtgaagtaaggctttcactagaaggcacttggggaacgttccaatgacagcgacattcatcgctacagtagaaactcacacaatcgcagccctttattagtattttgttacccagtagttcctgtgtccattcatttcctcaactggagtgtgagctccaagaggaccgaaccgggcaccgacaaggtgagccaatatgaatgtggcgagtccgcaatgggggctacagcggccgacctctggggctgtgccaggccactagagtgtgatggcgcgagggaagggtcggggaaacagggcctaacctcacttttcaccccgaaagtcaagatagccacggaaacagggatgaatggggagcacagacacctgcctcgaagtgtctcttcactttcactcacaaagccgtcgggtcagtaaccagaagccgaggggcggatgcggcccccgccctgtggcactttctcagtctggttcttccagccgcgcctctttgccttacgccaattccgtaaggaggcgctgaggccaactggccggctcccgcagctccaaaacttgacgtgaaattgcgcggggcagagctgactgcggccatctttaattcgggcaagaccccaccctcgcaccccacccactagtccttttcagcgttcccaggattttctccaacaaatgtaacgcggttaaccttagaagcagtgttgaagaaacacgcaaagaggcctgagtatccatgacctcagtggtgcgaaacccggccaacttaaacatggcggctaaacccgaacagcaaaacgttgctgacgccaatgaagtcatgctcgaaatggagcgaggcggcggagctggggaggcggtaatctcgcgagatggaagccagcctccgctaggcccggaagcctcgtctgagggggcgggggacggaggagggagcgggagtcgagcgagagcctgtggaggagtccgcctgctgtagcgtgcgtaagcaaggcagctacgccgggcggctacgctgcggaatcggcgtaggcgcctttggagaatcggcgggctgcgctccgctggggctggtcgcggagggggggaggggatgtcggtcagtgcgagatccgctgctgctgaggagaggagcgtcaacagcagcaccatgggtgagtctcagcttcgggtgccgcgacttggggtcagcggctccgaatgccgggaagctctgcggccgctggaccgagctagggaacgccctgaggcgaggcggaggcagcggcgaggggagccgggatgggggccactgcgggcccggggcgcggcagcggcgggctcggggggaggggaggcggcggcggtgacagtttgaattgaacgtgaggagagccgaggcggcggcatttcctgtgccgcggcgggctggcccccggcgcagagccgcggcctccgcggccggagcagcctgagcgtggtggtctcagccctgcccttgcttctctccgtcccttcgcctttcctcagtctcctcccgggcccgccggcttccgcggccccgcttcctcctgtccccggccgcatccccgtcggcagaagtcccctcgtggggcagtgggcctggctaggagggtggggacgagtgtgaacgctcgggcgagggtgctgtgtgggccaacccgggcgggcggcggcggggagggaggaagaaggatgcaccaggctgaggctgtggtggaggcggcggcggcggctgcagccgcagctccagtcaccgcgtcgcctccccgctcctcctcccgcctctcggggttgcctctctccaggcgcagcccggaaggccggtggatggcgggcgagtcttgagaacggagggagaatcggtagtttggtttggaatttgggcttaatttttaggagtaagggaaagagaacgcctgggaagggcgccccccggaggagatagaaagggtgggaagggtccttggaaaagggagggagcggagatgtggagtggcgaagtttagggaaattaatttttgaaaatatttcaatattctcagttattctcttaacgagccctttcatttcctttcctcccccacatgttggaaaaagaacaggccatttcatttacattttccactcctgagttccatttcagctgtgtgtatagtaagaaataagcaaccgagatttttctaggacatttccatttgctgagttacttttgaagagtacactgtttcaaatttgggtttttacagtcctaggaaagaatttgtgacgtccaggtgttttcttagttactgaaataataacttactacatttcttgagtttattgctaaatagttcagctttaagaattctttcttctggcttttttattttgatgaaaggaaaaaatatctttgttagtgcccctgagaatgtaaatgaacagatcatctaaattactaagcatctaacctgttttacatatttatgcacatgcaggtgatgagtatagtcagtttttccccctaa

SEQ ID NO: 1883036 - DNA, 4001 bp, Homo sapiens
ggctgaggcaggagaatcgcttgaactcaggaggcggaggttgcagtgagccgagattacgccactgcactccagcctggagacaaagtaagactccatctcagtgaaaaaaaaatttaaattaaaaagttctagtatctaaaatgagcaaaatcgccaggcgcggtgggtcacacttgtaatcccagcactttgggatgcagaagtgggtggaccatccgaagtcagaggttgagaccagcctgcagtgagccgagattgcaccactgcactccagcctgggagacagagtgagactccatttcaaaaaaagaattagccaagcgtggtagcatgcacctgtagtcctagctaccggggaggctgacagggaaggattccttgagcccgaaggtcaaggctgcagtgagccttgtttgcaccacctcactccaacctgggcaaagaccccatctcaaaaaagaaaaaaaaacacaaaaacaaaaaacaaaacagaacagaacagcatcacttccttatcattagtttgaaggaagtgaattgcctgtaaaactttccattttcaaaaaaagtattaaaatatagtgtaaagccaggcacgatggctcattcctgtaatctcagcactttgggcggctgaaatggattgccccaagaggtcgaggctgcagctgagcgatcctcccgcctcagcctcgcaagtagcggagactacaagtgcatgccaccatgcccaactaattttttgtatttttgtagagacagggtttcaccatgttgcccaaactagtctggaactcctgagctcaagcgatccacccgcttccgcctccgcctcccaaaatgctgggattaggggcgtgagccaccgggcctggcccaattactttcttcagtctgagcatgagggctggaagaaaagctctcacttgcatataattttttagagacagagtctccctctgttacacgggctggagtgcaatggcgcaatctcagctcactgtaacctcaacctcccgtgcttgatcgcttatataatctcagctcactgtaatctcaacctcccgggctcgatcgcatgtatatacacacatatatttgtttgtttagacggagtcttggtctgttgcccaggctggagtgcagtggcgcgatctcagctcactgcaacctccgcatcccgggttcaaacaattctctgcctcagcctcccgagtagctgggattacaggcacccgccaccaggcccaactaatttttgtgtttttagtagagaccgggtttcagtgaaaccatgctggccaggctggtcttgaactcctgacctcgtgatccacccgcctcgacctcccaaagtgctgggattacaggcgtgggccacctcgcccagccgatcgcttatatttttaaaaagatgttttcttcgtttcctagccccttctaccccgctacaaagtttcaaagacttaatgctattacaaagggccgtcagacgtcaagctcaggggtgcagctccctcatgccgggcagcctcagagggggccgaccctgcccaggatgaacggcgccaggtagccggggacgctaccgggagtccccgggccctggctggtggaggtgttgtggggcgcacgtacccaggctcaggtgaggcgagtgggcagccggggctgcagctggcgctggccattgaggagcttctgcgcgacagtgcgatcggttgcaccttctgcgacaggggccggccggttggcgcgcagcgcctgctagcgcagagtctggcccttgctgcgcccggccccgaagaccgagaagtcgtaaagctcctcctcgcagtttatgtgcggcggcggccgggccgaagcctggggacacagaactgccagctcagcagccggttacatcccgcccggccacccgtagccagcgtccgctaatgcgcgatcctggaagacccagcaaccccgccgcgagttccgattggctccgcgtgagtggcggtctcctgcgaagtcacaagagcgcgccttccgtgacgtcacaagggcgcgtcttcgccgacaccatagaggtgggccttccgcgacgccacaggagcgggtgttcgcctacgtcactggggcgctacagtacctggagctgggcagtcttctcatcagagtggggactaataacagtgacctccccgccaggtcctgtgtgttgccggctgaagaagggtagctgaaaaattcagacccagcacagtgtttatgttggtcaaaaatagaaaactatgtctggcgtggccgaggcgggaggacccttcaggccaagagcagcctagcaacatggcgcaaccccatctctgtagtcctacctcagacccccagctacttgaacccaaaggttcaaggctccagtgagctatgatcccaccacagcattccagcctgcgagattgaggtaaaccctgtctaaaaaaattaaaaatctatccaagtgtgcaacagggagggactactaaataaaacatgaggctggctgggccctactgtaatcccagcactttgggaggccgaggcgggaggatggatggcttgggctcaggagttcgagaccagcttgggcaacatgacgaaaccccgtctctacaaaagatacaaaaattagccgggcgcggtgcgcacctggcctaattttcgtatttttttctagagatagggggagggcctcgctatgttgcccgggccagtttcgaactcctgagttgaagcgatcttctcaccttggccatcagagttgtcgggattacaggcatgagggaccgcgccccacctgggttaggctacttaataacataagaaagtgctccgccaggctcagtggctgacgcctgtaatcccaacactttgggaggccgaggtgggtggatcacctgaggtcaggagttggagaccagcctggccatggtgaaacccagtctctacaaaaaatacaaaaattagccgggcgtggtggcgcatgcctgtagtcccagctacttgggaggctggtaaaggagaattacttgaactggggaggcggaggttgcattgggccgagatcgcaccactgcaccccagcctgggcgacacagcgagactccaaagtttgacaccagcctgggcaatgtagtgaaaccctgtctctacaaaacaaacaaacaaaaacccaggcgtaactgtgtccacctgtggccctagctagttaggaggctgaggcaggaggatcacttgaggccaggagctcaaggctgcagtgagctatggtaatcccactgcttcccatcctgagcaatagaatgaaagcatgtctcgagatagctagctagctagctagataattgataggtagttttgtatcaaattttttccctaaatttgaacatgtttttctaaagtagcattcaacacgtcagcattttacagtgttactagttattaatgtgattatgtttttgtaaagtatcctttacaaaagcagttttgtctttcaaagcacacagataaggccctcaagtgaatttgtctgatgttggcgaccttggtaccattttgtccacctgattggaaaagtcagtcaataatttcaggtcactgttggccttagaagaagagcccaaaggcaacaagcaaaggcgctggtgtccagtcgccttctaaaagcattttcactttcccttaaggtttcccttgatgaacatagaagtattgtatgtagaattgacccagtgctgccctggcaactttgtatattaggccaaatttacatttcttactaactttatgagaggcaccctggtaggctagtggagttacacacacagtctgatttcagctgcactgtccagagatgcaacacggtccaatcaaataacattctctgagcctgtttctttagctgtaaaagaagaataacatacccatctaaaaaggcagcttattgtatttgattggtcttttattttctatgaaac

SEQ ID NO: 1883037 - DNA, 4001 bp, Homo sapiens; identical to SEQ ID NO: 586945

SEQ ID NO: 1883038 - DNA, 4001 bp, Homo sapiens
aagatctgttgaaagctgttgactcattcacttctcaggaaaacgcacatgctgactaccatttcagagaatttgcatcagggttctctggggaggagttctgagttctgtttccaggagctcgtagaattgtcatggtctgcatatgcaaggcaggtggattacggaaggttgatgtacagaggtctgtattttggagcctcttctgtatttacttcagaacactaacaatcaggcgagaatgttctggtttatcaaacccttccttctgcctttcatcttaaccatgcattagttttaacaaagttcatcccaacagaagacaaaacactgatgaggtaggatagctccagctcctcctccctctcttctagtcttgatttccatgtagtccagtttattccttccctgattgtccaggagaatgagaaaaagaaaaaacagagtctagtgggtaagaaagggccacctggacggcttgatttggattgtgaaataaaacacacacacatgcacacgtagaataagtggctaaaatctgagtaaatcgtgaactctctgtatcctccacccattgaatactcctaaaagactttctagaaattcaaggacttattaatatagaaacctggccattgttcctcttctcctccccatgtggtatgagagcacctgtggcaggctcccagagaccacggacctcttcctctaggcgggctctgctcttctttaaggagtcccacagggcctggcccgcccctgacctcgcaacccttgagattagtaacgggatgagtgaggatccgggtggcccctgcgtggcagccagtaagagtctcagccttcccggttcgggaaaggggaagaatgcaggaggggtaggatttctttcctgataggatcggttgggaaagaccgcagcctgtgtgtgtctttcccttcgaccaaggtgtctgttgctccgtaaataaaacgtcccactgccttctgagagcgctataaaggcagcggaagggtagtccgcggggcattccgggcggggcgcgagcagagacaggtgagttcgccctgaagatgcccacaccgcccggcccgggctccactcccggggaggcctcgagggttgcggatgggactcttaagtggtcacggatcaggtgggcagggggcagtacagctttctttctgagacgccgagagcgaacaggctgctcggaaaacaggacgaggggagagacttgctcaataagctgaaagttctgcccccgagagggctgcgacagctgctggaatgtgcctgcagcgtccgcctcttggggacccgcggagcgcgccctgacggttccacgcctggcccgggggtctgcacctctcctccagtgcgcacctggagctgcgtcccgggtcaggtgcggggagggagggaatctcagtgtccccttccagccttgcaagcgcctttggcccctgccccagcccctcggtttgggggagatttcagaacgcggacagcgccctggctgcgggccataggggactgggtggaactcgggaagcccccagagcaggggcttactcgcttcaagtttggggaaccccgggcagcgggtgcaggccacgagacccgaaggttctcaggtgcccccctgcaggctggccgtgcgcgccgtggggcgcttgtcgcgagcgccgagggctgcaggacgcggaccagactcgcggtgcaggggggcctggctgcagctaacaggtgatcccgttctttctgttcctcgctcttcccctccgatcgtcctcgcttaccgcgtgtcctccctcctcgctgtcctctggctcgcaggtcatggcagcgccaggcggcaggtcggagccgccgcagctccccgagtacagctgcagctacatggtgtcgcggccggtctacagcgagctcgctttccagcaacagcacgagcggcgcctgcaggagcgcaagacgctgcgggagagcctggccaagtgctgcaggtagcggccgcgcgggcctgcgtagagagaagcggagcggggcgtccacgccttggggagggaagggcgtccccagcgggcgagagtggggtgcgggcggcggagcccctgggcgccagctgcttctcccagaggcccgactttcggtctccggtcctccacgccgcccttctggtgggagggtggctccatcagtctcgggcccgaaatgaacttacctgggaaactcgcctttggggagagtgggttctaggagccccgtctctctttttcctctctgaaggaaacttggagtgcctcttggggtacagtgggtccctgttgccttcttgggagcttgtttaaatgaaatgaatagggaaacccagctcttgaccaggaggagtccttgaaacactcaagctaagtaggcgggctaccattcagttagagaccaggatgcaagctagaacccaggggagcgcggggtgtgccaagtacttcatcagcaggctgtgggacccctggggaaagccaccctcagtctctaaacccaaacatgccgtaactagatgtcacaaacataaagaaattagagtttctaaaacctttcattatagaacatttcaaatatatgcataagtagacgtagtagtataatgaactccccacccccaccgtttttaacccatcactcggcctcaactgtgatcaaatccaagttactcttgtttcttgtatctacacctacttgctccctccagtattatttttaagcaaatctcatatagcatactgtctttatgtattttactgcatatctttaaagactcttaaaaaatataaccacatttcatgatcacaccttaatatctaaaaataacctcctaatatcaaaaattgagtcattattaaaatgtccaatcgtcccataaatgccttaattaaaaaacaatttattcaaatcaggagttataccacctacttttgatatttttctttcatctgtaggtcactgaatttaaaaactaccaagtagcaaggtataaggtatacattcctcatgctaagatttttgtaaaaactagctccaggcttgtattgccaaaatatactcagtgtgtttatcttctttaaagaaaataataataataaggcgcctggattaggagtctgaaaagtaatctccatttagagactccacatccatcagtctctggctggaccagaaaataggtttttgtgtaggaatattttttcagaggattaaaaatgtgagcgaggggtgggacacttaatcctgtgttctctagaagagtgcatttaaaaggatagatacagttcttggcaaaagcatggtaagcacttcagggttattattttccaggaaatacttatcctttttccaaatagttataaacatcagcagaatccagttcataactttgtgatttgcaaattggttgtgactgagattggattgaaaacccagttttcttgctttttgacagttgttcaagaaagagagcctttggtgtgctaaagactcttgtgcccatcttggagtggctccccaaataccgagtcaaggaatggctgcttagtgacgtcatttcgggagttagtactgggctagtggccacgctgcaaggtaagatgttggcagattgagagttctggtctccagcaggagtttaacacttctccccagctaccataggtctgtgacagatggttgcttacccttcaaggcctgtatctttcctgtagagccccttagtggagagagtcacctctcttctccccttccttagagttctcttcctgggaaactgctgccccactaggtgcagaggtccaatttagaggcatatactaggcagtggcttctcaatttttttaaattttattttatttgagacgggggctcgctctgtcacctaggctggagtgcagtggcgcaatcctggctcactgcaagctccgtctcccgggttcacgccattctcccgcct

SEQ ID NO: 1883039 - DNA, 4001 bp, Homo sapiens
aactcatgtctgtctctcttaccgatttgacagtcacatatatacactgttttttgtcttctaggtattttgggaaatgaaaggtagtaggagattaaaagaagagtagggtaaacaaatacctttcatggattacaatttagtaagtcctaactctaaatttaagaagaattttccaagtgtgaaaatctacagaatttacaatgtaatggcaacatgattaggtcccaagaaataattaaggtaaacaatgtgctctttttctcctctcccagttctggtaactcaatagtcttcaactacttgagaaggtgtgaggatcattttttatctcagtttggccactaaagttcacatttcagctacgatcaagttgatcatgcttatcccctgctgacaccttcttccccacctcaacaagtcacagatcacttcaaggagaaaatttcaagaggctattaaacactggcatggatactcagagcagagatgttatcgtctctggggacctttaggaacagctgatcatcctggataggcagaattacacctaattcagtccatcaaaaactactgggtgctgcaaagtcagcaaagcattgtgggaatatcaaaaaggtgagcaggcacagcagctccccccgaataacctgaaatggcttcatctggactgcttctgagaaaggcatgtttaggtttggttaccacagaggaggcgcaatgctgggccaggctatgtttaacagggactctgtgggcctgctttccatcctaagatgacacaatcttagaatcagttcttagcaatcacttaacccagtgattctcaatcctgactggacattagtatttgctggggttacttttaaaaaataaagatgcctgggcctatgccagtccattgtctcctccccaccttcatcactcttttttttttaattttctttgagactgagtctcgctcttgttgcccaggctggagtatagtggcgcaatctcggctcactgcaacctccacctcctgggtttgattcttctgtttcagcctcccgagtagttgggattacaggcatgtgccaccacgcctggctaatttttatatttttagtagagacagggttttgctatgttggccaagctggtctcgaactcctggcctcaaatggtacaccctcctcggtctcccaaagtgctgggattacaggtgtgagccactgagcctggcccacactttcactattgaaaacgattgtattctggagggccatgagggaggggacaggtctttttcaaaatctagggaacactaaggactttatcctcagaataaatctgattaataattaatcagaatctctgttgggttttttctaaataaactcccaggcaatgcaaatgcaatggaattatacattggttgctgagaaccattggtcccataaaacaccctcattttatacgtagaaaaattaaggtccaaagaatttaactaacctgtgacttgcccaagatcatatgcctggttagtggcagagcttggcttaaaaccatgatctccattaatttacaaatccagtaagcatctattaagtacattctagggttgttggcccaccacctagttgccactcaagaatactgtaagtcaaagctggttgatagctaaggatatcttaggctgatcctgatccaagttaaaaggtaagtgtaaggtgtgatggttctggcattctgtcttatacttttcttccaaatagtggtgtgtgatttagacctctggaaattttgaggaatcctttgatctggataaaatccattactacctctgacccactctcctatttactagttccagggggccgtctacttacccagatccaatgtgcagcacaaaagtcgggacaggggacaagatcccccgctgggagctccagtgcagttcactgaagccttgatcactgaggctgagagcaggagaagggagagctcgctccttggccctatgtatagaagaagaaaaggaagttaattcagcagttgttggtttgttttttgaaagaagctatgtccaaaatatttcttaacgctctcctttcattcctaataccaacccactcccttccaaggcacagctactgctatcacagtggcttacatgcgatagactaattatatataattatatcttcttcctaagggtgaactgctaggatgtgagaaagatatagttcaatttttgaactcagccattcccatatgtagcaattcatgaatacaagtttgcatatgagaaattgtgtccagaatggggcatcatcagtagtgggagcaaatcctcttagagcagttgccttgaaaagagcaagaaaagtagaaaaatgagagactcataatgttcaagataagagttgatcttgatcaattaaaaacttaattaggctaatctgtcttcagtcttttacaaagaatacaattattccttcccattcacagaatacttactcaaggggccatgtatttattctatttgaaagtaaattaagtcatatccactcagtttgtgaatttacccacattgcttcatttccctttccctccatctacctatcctctgactaattcgctgacccgttctgaagtgagctttcataacctgggcaccaggaatcctctgaaaggtgtacaagattttgaatgggtgagcttttttattttttttctggggtaagtccctagtgtcctccagattttgaaagagtcctgtcccctccttcataatcctctagaatacaattgttttcaagggtgaaggtggggagaagataatgatgttgatagttgttggtacctacaataaaacattttatgaagttggtcctggaactagtcttcaaaagaaggattaaaagagttcatgaaattggatctatcctccaacagaatggacttacataaaatgtactctgagtcacaaaatgattaaatttatccatgctgtgtcttttgtgcaagatttcactagtttgaaaccaaaagaaaggaaaatcatcatcttatttttcttaactttattaacttaatgataatgagaacacctgggaatacggacgtgcttcctatttatcatgatttccctagaaaactgtttcacttgggttactaaaatgcagactacctgcaacggtagaaaaattaagataccagggggcaacacatgatatttagaatgagatgaaaactcaactgactttgatcgtcaattaaataggcagtgcacacctgcatctacacctcacaaggcaatccattgattgttagaaacttcctcagtcttccattcttctgttcttagcaaagcgcctctatgcgaaaagcactcaaatacttgttggattgagtcaattcttttggtttcactcataaattaatgaggaacgtgtaactctgtatagtttcagagtagttaaagagagaaaaaaagaaatgctacataagagaattggggcttcaggtgttacctaatagactagaaagctttccaagagtgcacttaagatatgagctatagcaaccttacctaggcaattcttcaccctaagtttctttctaatgcaaattagtttgaatttctctctcttccctcctgtcctttgcctgaaagtcttctgatacaaagcaatactaccgtaattagaaggaatgcctgacaaaaatacattttaaatttcattttcaaaaaggttgatacttcgtattgcatactccgaattcccctgcatttctatgctgtaaattcctaaactttagataatacatttatatctagtgcacattgttcagttttcagataggaaaaagctaaatctcagtctgtgcccgcaaaaagttgatattttttgttgttttaagagtctccatgaatgttgtttaaattctagaatccacagtactcatcgaagctaggaaaagaattttgcccaccccacagcgtatctgaggct

SEQ ID NO: 1883040 - DNA, 4001 bp, Homo sapiens
gagaggaaaagtgagtgccaggagtcttggaactgctaaggtttctattgcttctacttggggggaaaaatgaaactgtcaggtctgaggactgtatttcttccttttttttttttttgataggaacaacattaagaaaaacaaattgatctgacagagaaaacataaaactctcttaaggaagagtttactatagtagggacacattccctaggggaagggaagggaagcgtctgctgaaaaggattttcttccctgggctagaattacatccttgaggccttcctacatgttccaaggaggccaaatctcttgtggtcctaaactattcctcattccactcctaatcccaacagccatcctgggataggaacactagcctctggagagcagtgaggcctaccaaacctacaccagtcagcccatatgacataattacaggtaacagaatcttggccaagccaatgaaaaattaggcacagtacctatttcagaagaatggatgcaattctatgcttgactggctatgaaagttctaaggagaggaatagggaaacagtcaagctaagccagcagctttgcagagaggaatcccactggagccagcacagtattggcacctattagcacatgctgctgagctcacttggggaaggccaccagtgactggagactcagctacttccaggcgttaaaagctgatagaggaagcccagtagtcaggggaagaaaggcaatggggcaacgtcccccatggtacatttctacctccacttttctccttgtgatgccactttcatttaggggctggaatgggatttgagggccctctcttctctctaggctttctgaagtacttcgcaaagggccaggagcccagaagtgaaggggctgtaatagacagataacaacctggtattcaggaacagcccgtctccaaacaggaatttgttgacctgaacttcaaaattaactcttcgcttatttagcagtctaatccacaaaacagaaacataccagagagggagagatttgcagactatgttcagagagtgaagggacacgaatggtttctatttgaacactaaacatttttcaaaacactcatcattatctcattacctttaaatatactggctggagagacagggagacccaggcaggtcagggtcctatagtaagtgcacagtcaggttttggctatggactttttcaatgataagctgatgaattagcagccatgtgtccagtcttaatacttcaacagttttcctcccaccctgacaaatgccaagcttggagagctttcctaaagaaccataaaggacaacaaaataacaggccttcttcccattctctagaattaggtcacaaggaatcaattagttgatttgacaaatatttatttattgagtatctcttatatactaggcactggagtacaaagacaaaacatggttcctgtctgtgaggagcttacaagctagtggggagagacttgggtcatagatcccttgtatactattggtaagtgcacaacagatacatgcacagggtgctgtgggaactgatggaaggacatctcatctagcctgggagagcaagggaagccttccaagaaaaggtggtgcaccttccagaacaggagtgaataggaaagcaagcaagggcgatgactgatgtgctgggccgaaagtgtaagtctacctgagagatgggagaaacaaaatgtaatggtatatatggtgaactgccagtataacaggtccattctgataaggcacgaattacgaagtgagtgggggtggtgagacataaagttggagaggttatcaagaatatatgtaaactgagataagactttatcccagaggcaatggggagttatattttttaaacaaatgcacctacacagtcagatttgtcttttaagaaacattagatataggaatatagacatacatgagcaaatgggaaaagtaaggcccacaaaaatcaaacagcagatgaagcaggaatcagacaacagacacaggagctgtgggaagagcagagtaaatatttaggggaggcatgggcatagcaaattcttcaaattcctctgcagtcttggaagcattcaggatcagaatccatgccctatagaagactgactcttagtcaatgtgggaccttcagggaagtcctctactattcctttaactagttccagatattctatggttgaaaaatggtaaaatatggctaaaagaattattgccttctaaaagcaaaactggcatgatttgaggagaaaaagcatttgatttggaatgcagatatttgagttttagtatatgtcttaccattagctctgtgaacagaggcaagttactgtgcattttggtgtcctgaactgtaagacagggttaatatttttcttataggtttgctgtgagattaaaatgaaacattatgcatgaaaacacttttaaaatgagaaaatgctatataaaattaaggtttgatcgctattaagacaggagtttttcttacctgagacttcttcaaagaatatggcccttaactaagaataaactgcttgaaattaaagaccactggtgggtgatgaactgtcaagcatgtgtggggaggtgataaaggccttagcccccaaacagcctttaaaagcttgtgggatgagagagctatttagaaagctgaccataacatgttccctttttcctgggcagtggctgagataatctagaataagggggctttgtgaaaataaatgaaacattgccggacagcctgcttgcttttccagcaggtaattatttgtggctcggagagggttcccaagcgacatggccgtcagggagagtcaggagagtaggttgcactggattcaccctcactgggcgtccattactttcttggaatttcctgtggcttgaactgtcctcattcctttgatccagagatataactttgctagtgttccctctcttgtgggtctcctcaacagggaaggagcctgcgcagagagatggaatgggaagggctaagagagcatacaccacagcgcttgtggggtgatgtagggaaaggaccgagggcacaagaaggacagagattgagataaacttgaaactgcttagagcagtttatctatttcagacacgatacagcacacttggagctacgatgaaagaaatgaaatcactttttcttgtattctaagttttatttcccagacatacaccccttcataaatacacaccaatattcatggctgaggccacattcccctgaaacgtaaatacttttttttccccaatggcaacagttgcttataatgtttttctgtaccttttttttttttttaaagcagggagtaagggagagagaggaaacccaggactctgccctggccactgcagcctgcagaatgagctccccgggggcatcctcccttttaatgccagcagggagaagggaaataggtcaaggcagcagcctgagttttcagctggggctgtccagcatgaggacatcatttttcaggcagcagcaaagagcaattctaatgtgtcagaaaggacaaaggggtcatcgaaaaaggccttagaaatgatcaccaaacccacatacattgcccctgtcctcagaaactgtacctcctacagcctggaactgtgaagacagttaaactatgacactgatctctttaaataataccttatggccctttaagacttcgggtttctccaacacagcagtgaaaacactgctgtgcaggcagcaactggtcagtgagtatgtgctggctagctgccttctggaagaaagtgagaagagacatgaaatcactgttttattcagaacaagggccgcaaaaaggaaagggtggcttgggattgctagatcagtgttttagacaggaatgccaaggcagaaaagaatcacatatccaggaccacataaaaactggagtgtgaaaacctaggagtttacac

SEQ ID NO: 1883041 - DNA, 4001 bp, Homo sapiens
gcctggcatcaaaccctgatctgctggtttgtggctgggcaaccctggacacataattctgaccttgggcccctcatctgtactgaacttaaaaacgacctcatgatgatacctcaaagatttaaaacaattaagaggtctggcgcaaaataggtgttcaacattagcaccttcctcttccatgagtttttcctttaagatgagcacacattgacctcaccctccactagctcctggggcactcagctcctctgcagaactgagactttggttctctttgctttgccttgtaaatatcctattccatgagtctctcagggcaggactcttccctgttattcctcttcactgtttcaactcctacccttaccaccactcttggcttcatcctcaacttttataagacttttgctttaagtgtataataaaataaaatttgtactgagcctggagcacagcaaacactcaggattcccttcacctttcacaccagcattgtccaaaacaacttccacagcgacagaaatgccctctaatctgtgcggtccaatatggtagccactggccacctgtggctactgatcatctgaaatgtggctagtgtgaaaatgaaataaaactccaaatttaatttaatcatgtgtgccaagtggctaccacattagatggcacggatctatacaaggcccaggacactagatccaggagggaggaagtcattgtctgaaatttctataaccttgctctggatggagcagggcaaggcctcaaaccgtttcaaaactgttctagcaagcactgaaggaatgcatagggtcaccgcagacccaagcacgctggaggcttgctaccctcattcacccaaatcccccacactcaaggaatctggcagtccactctcactaagcaccagtccctgctgggggctgtgggaagagaccagagttcaattaggcacctgagcttggttccaggagcccagagctactaatgactctcagggaaagatcctttctggctgaggaagaagggaaggtgtcttggaagagataaccttattaaattattaaatagatcagacaacacgaactaaacttccacattattctatgacactacaattctagcatggcttttcactgtgaccagaaacatccttatcatcatgtagttaatataaatactgccttttccccttcatttttttctcatgtatcttacggctcagaaatcacttctgaaggagtaagtagaccaggcacatgaagtagatttcattttccccatgaaataatggttcagagaaaacgcaggcctagttccaggaaggcagagttggggtctctgcaacgtgatttaccggggcatcttgcaaaggagttgctgtgacagtaagctcttccactttgagaccgtcacctcagccacggctcccacctagaagggaacaaatgcagttagctccaaacgcagttagcttcagcttgtgcctctgaaccattatccagctctagctccttgcaacgcctggcccactctacagcctctcttgcggcaggtctacacgccaccccatgccttccggtgaggtccctcctgaccacacgtcccatcccacctactggggtccacccaggtcatgcagaagccccacttctcggctgaaagagaagcacgaggttactcatcaagtaatccccgagtctcctccgggtaaaatgttccgaacgcgctcaaccgcctcttgagaggaagtagcacgtgtagtgaaggcttggtctccaagaatcactggtgcccccactcactgcggcccagcctcccacgccgcccgccactgaacccaatcccccaggacccctacctgggctcaggaatggtcaggcaacacgtggggcccaggatggcggtggatgactagactgccgaagaccgcgccgctgcgactacgaagtacggagtacggagtacaggtctgccagccaagactgacgccgcgcgctgcgccgcgcacctcgacgtcaccgcgtagtcccgccccgaagccgtgcgtggccggggccacagcgtttggggtagatgacgtcacgcggccgcgggcgctcgcttggtagggtgtgctggggcgtagagtttagggtcctgaggctgcgtctgcgtgtcaactcagtggagtctctcgaccgccctttgttaccctcctttagtgaccagaaggctggagttacgtaatctgcccctacagctaaaaggacggaggcctgacggcgtggcctggagggacgcgctgagcccctaatgggtggtgccttcctggtgcggccgcacaggcggggccgggcggaatccaagcacgatgtggacacggagccttgggaatgaacaggagcctgcctgtgggagcatgtgggaaaggtgatgcaggtggaagggcaaatacaaattatacatagggtttaattttccctgaggaaaagaagggacgagaaaccatccccctccctttttctttcaaaatttcagcctctctcctttccaaatgtactcaagtctttttcttatatggccaggttcaactcaggaatgtttcttgggagccatctccttgaagtgtaattgttggctgggtgcggtggctcacgcctgcaatcccagcactttgggaggctgaggcgggcggatcacaagatcaagagatcgagaccatcctggccaacatggtgaaactctgtccctactaaaaatacaaaaattagctgggcatggtgaagcgtgcctgtagtaccagctactcgggaggctgaggcaggagaatcgcttgaacccgggaggcggaggttgcagtgagccgacatagcaccactgcactccagcctggagacagagcgagactctgtctcaaaaacaaagaaagaaaaaaatgcaattgttaagggacgaaagggccaagagtccagcttcttaggaggacaaaggcttaacttggcacctgactccaaattgcaaaacctacataatgtgatgggctatctctacttagctgcatagaaaaagtgagtttctgtctttgtgttgcctttagcaggttgcatgtgatgtacggcatcacaatctggtttaatacttattcagtaatggttttctgtctcttctacctttgtggagaggtttcatgggttgggaggaaactactctccaccccccacccacccccaggcagaggaaagcacattgaaaggtcctgaaattgggaaggacatggtttgctggtgatacagctaagtattacaagtttgtagtgttctggaagggtctcaatgaggagcgggagataaggacgatgtgttcaagggtcttgaatgatcaggctagaaaagtgagaacgtggttctataagtaaaagcagagcagtgcttgaaactcgtattttatgtattgcacctagtaaatacattcaatcactttacagtatacaaatcccatacttcactaagtgtcaaaaccctaacagacagataaggcagaactgttacttccagattactaacgtggaaactaagccccacccaaacaagttaagtggtttgttcaagacctcctacaacaggctgggcgcggtggcttatgcctgtcatcccagcactttgggaggccgaggcggggaggcgggtggatcacctgaggtcaggaatttggggctagcctgactgacatggagaaacccggtctctactaaaaatacaaaatgagccgggcgtggtggtgcctgcctgtaatcccagctacttgggaggctgaggcaggagaattgcttgaacccagggggcggaggttgcggtgagccgagatcgcgccattgcactctagcctggacaacaagagtgaaactccatctcaaaaaaaaaaaaaaaaaaaaggacctcctacaacagccagggcctggtgcaggttgtcctagcacagggttcactggtctgtccattctgccactgctatgagat

SEQ ID NO: 1883042 - DNA, 4001 bp, Homo sapiens
acaagaaaggaaagaataaaacttgtaatttagtcaaccctttagctgtcactgtcatgtcagggccacctagacaaggctctggcaccaggggctgcaccttctggctgcagggggagcggggtcattcaggttcacaagcccctctgccaaggtttagtggcttcaagatgagggaaaaccctcatggaaccataccctactgttgcctgacagcgcaacccacagggactgagaggtactcggggaacactacactctccaaggtgacctgttaaaaagcagtgtccaagagtgactcagacagatcgctccacagccacaatagccagagtacccaggaagtttattatctgtactgagatgttggtgcagatttctttgtgtttaccttctgtggggttcactcagtttcttgaatctgtagatttatgtcttttgcaaaatatagcaacttttcttttcttttcttttttgttttaggagacaaggtcttgctctatcacccaggctggaggcatagtggtgcaatcactgttcactgaagcctcaactttctgggcttgagggatcctccgggctcaagggatcctcctgcctcaggcctcctgagtaggtgggactacaggtgtgcctcaccacacctggctaatttttgtatttttagtagagacagggttttgccacattgcccagtctggtaatgaactcctgagattctgcccacctctgtctcccaaagtgctgggattataggagtgagccaccgtgcccggccgccattattttttaaataacttttcagcctcactctctttctcttcttctcctgggacttgggtgacatgaaagtcagatcttttgttattagtcccacaaaatcctgaggctctgttcatttgttttgttttggttttcagtctattttctgttgtttaggttaggtgatttctactgctctaacttcaagttcatggattctctcttctgtctcctccattttgctgtggagtcatccattcagtttcctattttgactattgtatatttcggttctaagacatctgtttcattcttctctatatcttaattccaacatctgtgtcatcctgatgctggtgtctgttgactctcttttctcattcaagttgagagttttgtggttcttggtatagtgattgatttttattgtattctgggcattctgggtactttaagatcctgaatcttatttaagcctattttatttttgagacagagtctgtctctattgcccaggctggagtgcaattgtgtgatctcagtgcactgcaatctctgcctcccaggttcaactgattctcatgcctcagccaccagagtagctgtgattacaggcgtgtgccaccacgcctggctaatttatttttttgtatttttagtaaagacagggtctcaccatgttgctggggctggtctcaaactcctggcctcaagtgatccacccaccttggcctcccaaagtgttgggattacaggtgtaagccattgcacccagccttttttgattttattaaatattgtctgtcacctgcttatagggaaggaaggtatcagttcattgctgtcaggcgagattcagtctccctcctgggcctctgctgacaaaccctagcttggagagggaagacagcacatgatctccactgacacatggggtggggctccctggttccgccaggtggtgatgaagtcctgactcacactgggcctcctctaatgtcactcccaaggagagcacgtttccttgcttccttgaagagtcgaggtttccttggctattttttttttaagttgataattctcccttttgcaaatttcccttaaaagatgttgcaggtatgaaataagactgagccacaggagacgcgcagccctttggactttcctgcaatttctatagcattcgctcatatcttggaagcatttacagggaagccaccaagagggtttaagaatgcaattccttggctcttgatgaatctaaagacgttaccaatacttttcagttgttgtttacttggggagtcaataccaagtttgaagaattagcatgaaacaactacaaataagagcattttcaaagaagttgagaaaagtttagtacaatctgaaatggaatccactaagatgtgttataatgaatgtggggggcagaaaaaggcttagttggagcctatggttgttcactatattattcaccagcagatattatgcaaaaaatttgaatctattatatgtgatcgaacaagggaatgtcaacagtatctgctctcatggacttaacctaagttggtcttaaggatttttgtcaaaaatagaagctgaatatcctaactggcctaccatacagcagttcagcagcttagcagtggtaaagtctggtgtgactattttgagctcagagtgaatattaaatcttttctgaacaagaataactgaaaagtactgccctcttagtctaaaaataaaaataaaaaataaaaaaagagagggccgggcacggtggctcatgcctgtaaacccagcattttgggaagccgaggcaggcggatcacaaggtgaggagatcgagaccatcctggctaacacggtgaaaccccatctctactaaaaatacaaaaaattagctgggtgtggtgccacgtgcctgtagtcccagctactcaggaggctgaggcagaagaaacacttgaacctgggaggtggaggttgtaatgagccgagatcatgccactgcactccagcctgggtgacagagcaagactccatctcaataaaaaaaaaaaaagaaaaagaaaaaagaaagaactgccctcaaccactattaccaaatactaaatcgctttggaaattagcttttgctgcagacttgatgtttcttaatgaggccaatctaaaattataaggcaaaacagcagttatatgcaaaacttatattgcggtaaagtcatttcaatgaaattaacattgtatgaatcacaagtaatgtcaacctgcgccatacaattcctagactgtcaaggttagaacaagtgaaaaacctttgcacatttttttgagctcaaaccttgagctcaaaaaaaacaaaaactttgagctgctagttctagccctagcagcgtttttcagatcttgatctaagtatgaaggaaattcccatattttaaaatccatttaactgtacaattgagcagctctcatctaaccttcaattggaagtggctgatctgcaatgcaataatgcaaaaaggcaaatatcaagaggggaatctaaaaaaaaaaatctataaatgctgtcttccaatgattaaaatgccccatcaaaatttatgctccctgaccaatataacttggcagtacctatttgtgtgaaaagatattttcaaagatgtcacctatacaatctcattacagatgagcactgacacggggatatttgcaacagattttgatgtttgggaacactaattcagaaccccaatgaaacaaaattgttttctgttttttgtttttttgagactgggtcttgctttgtcacccagactgcagtgcagtggcacaatcgcagctcactccagcctcagccttctgggctcaagtgatcctcccacctcagtctccacagtagttgggactacaggtgtatactacccaccatgcccagctaactttttaaatatttttttgtagagacaggggttagccatgttgcccaggctggtctcaaactcctggactcaagcgatcctcccacctcagcctccaagagtgctgggattagaggcgtgagtcatggcacctggcccaaaattgttatccctacaaaaatcattccattcttcttattaacaaacctgtattaaaaacttgcactcaactgttattagttattactcgaatttcttttaaaaatatatatttcaaattatagagacagggtctggctaagttgcccaggc

SEQ ID NO: 1883043 - DNA, 4001 bp, Homo sapiens
tctcttcttctggatacatttctgtttactcatactgaagtatagcacttcaactataatctgactaaaatggactgatcatttccctcattccagaaaccttttctattaatgttgacaataggtcttgcacatactgcatggaggtacctgttatctcctactttgtacttaatttgtgttgttttgttacaggaacctaagatcagggctgtcaccatttcactagatttctacatccccttttctggcattaattgctatctttagctggttttcacccatgaatataatcaccacatctattttcttatcatagtacttgattaaaaactgagtaaggcaaatgcaatatgaaaatccttcaacattaatctgaaccatctaccaccactcaacatctccaaaattgtatccccaaattactcatgtctactcgtcccttaattatacctagtcattccattttttattaatatcctattttatcccattttagaacccagagttccctaacagcactggtgtcaaattgcaaagcaaaacatttttaatctttcctggcttcaactcacacgtattacatctagttttccctctacaacagttgcattctcttacctgtgttcaggtccacacccacaagctgacctgattctgaatgttctgcttgaattttaactaatgtttcctgaaggtcaaaaccagagttctgagcaagaacctaaagtaaacaaatttaattcttgagaaaacaggaactaataactgatagtaaaaaaaaaaaaaaaaaaaaaaaaaagaaaaaagaaaaagaaaatctcggcctggtgcagtggctcacgcctgtaatcccaggactttgggaggccgtggaaggtggatcacctgaggtcaggagttcgagaccagcctggccaacatggtgaaaccccatctctactaaaaataaaaaaaaacctggccgggtgtggtggcaggtgcctgtaatcccagctactcgagaggctgaggctgcagtgagctgagatcgcaccattacactccagcctgggaaacaagaacaaaactgtctcaaaaaaaaaaaaaaaaaaaaactcattgcataaagacagaacatttatgttcccttcagagaataccagacacaagttactgatcaactctctcaactaccccaaacccagcagcaatacaccagtcataaattatatatcaaaactggtatataatagaaaacaatgatatcagtttaaaacaaaagcaaaaagcaagtttgtactcaagtataacccctaatactgcaaatattaaactacaggttatctcttgccatctgcaatgtcagctattcaggcttcccagagaaaccaaatatatctggatgatgaggaatacctgttctagagtcagaaagaaaactgatcaaacttgcttatccaaaatccactttatgaataaatcctacattatcagaaaggtttgatcagctgaatcttttggaagattgactgttaaaagcatgcacaccttgggaataatgagcaatgcatcagcaaatgcttggactccaagctgtgccctgccctttacactgggcttatgtttaatcagggcttctgccattgccacttccacggcaccagcacctggaaccacacagcctgttggatgggggaaaaggaaaaatgctaagaaaactgcagaactaattatgaataacaaaatatacatatgaaagccattaatttcttacaaatttactatgacaaaatacaagtgactaacataccaaataggagaatggttcaaccagaatggcttcactagccactggcagctttcaacagatcagtattagttcatttatttgtattcacctttaataatgatatgctatgaaaaaccttagcataccatcagtcattctaaagggaagactgcttttgcatggtgtctggctgtgtaaactactgataaaaacacagtattcggccatgcctttcagaccagcaaaacaatataaaagaattgaaatacagtgaggatcttaccatcatcaatagcatttttgacagccctcaagccgtccctcactgcatctttgatctgagtgagtgtgtgcttatttggtcctttgatcaataatgtgacagaacgagggttgttacatttctcaataaaggtaaacttctcttctccctatgtgtagaaaaaatatgattttcaaaaacaggatttgtgcagagtgaagagagaagagggacttacagagaatgacaagtagcatattaataaggaacaaacttgatcacattaaagcaaattatctccttttgaaaaatcacataaaagaaatgtgattttccccatcaatggcttcccattactacacataaaccttcaaaatgtatataaacaaaaatctgatcctgaatttcaattaatttttctgctaaagacttcatgaaccaggcacggtggctcatgcctgtaatctcagcactttgggaggctgagggtgaaggacagcctgagcccgggagtttaagaccagcctgggcaacacaattatgaacctgtttctacaaaaattaccaagaaaaaaaaaaattagccagtcatggtagcacacacgtctgtggtcccacctgctcagaagcctgaggcgggaggatcacttgaacccaggaagatgaggctgtagtgaactgtgatcacaccactgcactccagcccgggcaggagtgagaccccacctcaaacaaacaaacaaaaataattcacgagctaaaaggttctattacctttaagaaaaaaatacacttaccaatgtatactcatatacaagtcctgcatgtcccaagcagtcaggacttaggtcgtcaaaagaattcagggctaccccaccacaagcaagagtcagcctgaaatagcattttaagggagatggataagcaacgttaccagtgaatttcaaagataagaccagtaatttttaggaaggaatttttcagaattacacacaaaattaaattttaaaatgtactttaagcctttccatttgccatcaaccagctaaaaactagtcttttctcttaaccctccatttaaaccactctccccaagttagcaaatgaaatctaaaaggtggacaagagctctttattagccaggcatggtggctcacacctgtaatcccaacactttgggaggttgaggtgggtggatcacttgaggccaggagtttgagaccagcctagctaacatggcaaaaccccatctctactaaaaaaacacaaagcaattcagtgggcatggtggcagacacccgtaatcccaactactcgggaggctgagaatcctatgaacccaggaagtggtagtcgcaatgaaccaagatcatgccactgcacgaaagagcaagactgtctcaaaaaataataataaaaaatttttaaaaaaagctttttattgtggggagctctttggaaaaaagtatattgaattcagaaacaaaaagtaaaataatgtttacaaggggcaagggggagggagaaatggggagtaactatttaatgggtatacagtttcagtttgtgatgatgaaaaaagtcctagagatggacagtgctgacggggtgcacaatgtgaatatagttaatgccaattaactatacagttgaaaaacccaaaaataaagtataaggaaaaagaaataatcccaattcacttgcaaaatgagtaaaagtcaaattactcggatacctctccatatttctccttttagctctgcgcagagcaactatgccttcttttgaaagagcatctaaggaaaaggggtcaattccctgtaacaaaaataaaaattaatttcaacatctttcaccttaaaagtaaaaaggatgatacgtactatttagtttatacattgagttttcattctcaccttttgattaataacaacaaatcctttatctgaatcgccacagactttcctt

SEQ ID NO: 1883044 - DNA, 4001 bp, Homo sapiens
gataattttcatgcagtcagcgttgtttcttgaattacttgaagatcctatgctgtacagaaaagtctgcagagatagtctccctggtaggctgtcaaactgtgatgatatcttttaaaaacatgttttctgccaagtgcctgtaatgccagcacttggggaggcagaggtgagaggacaccttaatcccaggaattcaaaaccaggctatgcaacataaggagactccattctccataaaaagaaaggaaaaatgaacatatacatgttttctaactaagtctttagaaaaaaaaatttttttaattcctctactgcttctcattatgctttgtacctagcaattcaataaacgccaaatgactgatgttgttcacctttcggaataattctacccataaatacaacataacattcaccttatttcaggagaaaatattactaaaagtaaaaacaatcttcacctagcaatttatccaacttatatctttacctagcaatttatccaactgatatcttcaggtaaatatacaatattttatatccaaatatattaaaaattttgccaacaatatatattgtacaaagcacccctaaatttcaaaacacactttattagtttcttttttttttttttttgagatggagttttgctcttatcacccaggctggagtgcaatggtgtggtcttggctcactgcaacctccgcctcccagtttcaagcaattcttctgcctcagcctcccaagtagctgggattacatgagcccgccaccatgcctggctaatttttgtaattttagtagagacggggtttccccatgttggccagggtggtctcgaactcctgacctcaggtgatctacccacctcggcttcccaaagtgctgggattacatgcctgagccaccaggcccgaccattagtatttcatagtcttctaccacctaccttgtatcagtttcagatttatgtttcttgtcaatgatcacaaaatcatgaagagatcaataggttcatcttttcttttaatggccaaaatggagcccactacagcctgcaataggagaaggataaccattaagtaaattcaatttgcagcagcagaaacatgttgcttttcagaaggctaaagtagacagtttcttcattttacaatctctacactgatttgtatttttctataagcagatagaatacattatatatgaacagctgttacatttctgaaatctcaatctgtaattctcaaacattaacattccttaacattaacattcctcctggtgtttcattaaaaatactgataactggaagctttctaataacaaaatctccactttataaaccttttaatgaaagctccaattttacttttaaaacccggttaggtatactattatttgaatttcctcattttactttttagagacacagattaggtatcactgccacaaaaatgaacctacatagcaccttgtgattgaaattggtaattatattcatgtttctactatcagagattttctacataggtgtaccataccagacacagacaaaatttaatacatacctctgttaagacatctgcaagttcagcatgaactttagtacaaagagatgccctggccacatctttaagtgtttccttgtccatctctctgcttactttgacttcttccaaaaaatgaagggcttttccttcacagcttcaaatccttcagtgattattctgggatgaaggccctacaataaacacacaataacacttgcatcttcaattaggtgcaactatagttcatgataaagttcagacaattcttggagggatactctgatcatcctatctttgaacacgaggtaatataatgtgctggctttctgaatacatttaaaaggataaatattccttttaatgcagaggagaagagcaggcaatgctctagcacagggtcaaagccaagggaactataaagcacacttgggtgttcactgtgcaaaccactccgaatcatgtcaaaaccgacactgtgtcccaacaactcacagatggtagcattattctatcttttctataggtaatctcaaactaattccatcatttactaataaaaataaataaagactatctgctctcttttacccgaaaattctgacaatagattcgtagtcactgaggtttgttttaaaccttggaactagtcagggctaaaaaagtggaatttatctaaatgtaagcttttggttgtctctttcctaacaaataaatatgcctagtcctaaacatcccattttaaaatctcaattattaatctaaagacagatacaaatcacataggcaattcaacttgattacaaaattattttcaggccaaaaaaggttccataacctgtccaagctcacaacaaatttgttttagaccaagacaaagacccagatttaagccccctaatcctactgtatggcctccgctagtattaacacatcaatttgtataaataagtatctgacacgtcctatatacaataatatattacagaaacaagagttgtgtgccgggcgcggtggctcacgcctttaatcctagcactttgggaggccaagatgggtggatcacctgaggtcaggagttggagaccagcctgaccaacgtggagaaaccccgtctctgcgacaaatacaaaattagccgggcgtggtggcgcatgcctgtaatcctagctactgaggaggctgaggctgggaattgcttgaacccaggagacagacgttgcagtgagccgagatgccattgcaccccagcctgggcaacaagagtgaaatcccatctcaaaaaaacaaaacaaaaaaaagttgtgcatacttcagaaatgtagagatctgcctgtttcagcagctctccaatgattaggacattggaagtcgtaccatcaccagttatatcatcctgggctgttgctacctttgctattaaggaagctgttgggtgttgaatttgctgaaagtagaaaaagaacgaatcacttaaaacaatatgaaacagtctaaaaataccacaaataaaatgcatgaagggcctctttaagtactatctacttgaaaaagctacccaagtgtttggctacaaattactaagattaaaaagtcacaatttgctatcatgcgcatgcaattataatgatggaaacattttcatgtgtaatttatttcccaggttatctctactttacagatgaggaagcttgaggctcagtgaaagtttacgcaagatgacagctaacagttaacagtaacggataattttacatccttgcctctttaggcaagtgtagggctctacgagaataagccaggtatctcctaaaatgaaagctcagcagcctccactgttactctgcaatggccaagtaatttaaaaggaaaggtcaggtgcgttagctcatgcctgtaatcccagcactttgggaggccacagcagatggatcccttgaactcaggaattcgaaaccagcctgggctacatggcaaaatcctatctcttaaaaaaaaaaaaaagcggaaaaaaattgtattttaaaggtaaaatgacatgtctgcagcttaccttcaaatgattcagaggaaaaatagaaaagaaatggagcaacatgtaaacaattggtgaatctaggtaaagggcacacacaatataatcattattttcgtaggtttgtaattttttcaaagaaaactgaaaaacagacttctggagattggagagaagttccagtgggaggggacttctgaggtggtagcaacaatttatttcttaactacaatagtggttgtgtgtgtccactttataattatttcctaaattgtaaatgttctacgtgcttctctctacttatgctgtatttctcacacactaaaacccaaataaatttttttttttttttggtgacagtctcactctgtcacctaggctggagagtgcagtggcacaatcttggctcactg

SEQ ID NO: 1883045 - DNA, 4001 bp, Homo sapiens
ctcatgtacctgggcaaggatagagtgtggtggagaaagcaggctctccttaggggctgcaaatagccatgggtgagacacaatccatgatgtggtcttggcctggttgggatgaggccagaggaggctactaggtaacaagaggcagaaccctggcccttggtgaggcctggagcaatcctgggcttgaaggtaccaggaatcttcctcatgccccaagaccactctgaacagcagaagagtgctgctgaatgctggcatttgattaggtttactacaaccaacctactggcagggaacaagatcccttctcccataatgtctccaagtgagcacctgggacaaggaaggaggaatctctggtcctctgagagatgagagcatccaagaggtgaagcagcactccccagcccctggctaattgttctcaggactgtgccagacaaacccctgatggaatcccagggagcctgggatcacacctggcctgctggcctctgtggctgtcctaaggtcttcataaagaaggctccccctcctgccctgagctggtgcacatagcacgaaggcccactggagcttctgagcatcaacagggcattaaaaggagcaccagaggcaggaccccccagcgctgcctggcagggcagtcaaccagacagcaggatttcatgtgttctcagtaatccctaggatgcctggctccaatcagttccccctgccctcccatgccacacatagtggcccctcccgcctccacctagcccgagctgatcttgggaggacggttcatgagccattagctgaaggggaggataaaggtcgagcagtgggagcccagaggccctaccaggctgaagaactgatcctcttggtctggatggaagttcagacgcgcaaaagccagaagtacgctgcacaggtggggcagggtgatgtcctgcgctctgttcaggacgtgctgggtgggtcagaaatagcagagggacagaataagctctctgcccagcacgctgtcctcctgcctggctctgagtctgaggagagcctgcatggccaggggcaatggcaggaccctccatccagggcccatgagctgtgtcgggaacagagaaggacttacacaggcccagacactccttcgcctggcagcaactacccacagaggctggggacacctagaagctgcttctttctgataagggatttagaaatattctccaaccagtaaacttagtttagactggtcacacataaacgtaactgcaggtgtcatctttctgtacagttccactttgcgagggggatcagtgattcagtagacagttctcagtggattctcagtctcatcagccatgctgctacctgctacagctaccccaaaatggatggaagcacttataatggtcagtgaaagaacagaggaaacagttctcaaacacttttttgagaactgaatagcagccctttcaaaataagccaaaatgcaagaaatatgtatttgcccccacaagtgagcattttcagactggctttactttcccgactaaggcaatggttcccagcagatggccaggaagccagcttctctgagttggggccaggccctggctcacctgggcaaaggcctcaaacaggggcaggctgagccacttgagtaaggcgaaggacttggcacagtgggccacctcaccagaagtcaggctgggcatgagggatagcaggtcggtggccaggcgctgggacacctgggtctggtgaaagctgagtttgccttcaggacagagcagatcacagggtttagctggagagagtcagcaatcacccagcagctccaccccacctcagcctcgaggtctagatatttgatgtctgtaaccaaatttatccctgagcctgggacacaggaacagggcccatgagtcacagtgtttctgtggcagccttctgggccagtgcctaccatgcataggacaggtactgaatttgacacggctgcaggcatctgcagggccagcgctcccctctctccaccgttctgtccaaagggctcaccataggcataggccacgtccaagagcacatctttcgtcagagagaagggcttctgcaccaggtggtaggagatggcccgcagcaagggcacggaccgccggctctgagctgccagcatcaccagcaccttccgcagctcattggggccaaagtgctccaccaactccaggcactgtcaaccacagccgcgcagaggtcagctcaatggcctggggtggcagagatgagctgggggcaggggtcccatggtcccatccagtgcagcccctgtgacagcccctgtcagactgggcctgagctgactaaacacaggaccactgtgcagggcctgcctcctcatccaccccagggaacccctggacctggagcactgtccacagccaaacttatccccaggtcccagggtaggtgacccagggcccatgagctgtggagcttgctgtggcagccatctgggccagcccccgctatgacagaaacgggcactgaatttgacttgactgcagggctacagccgataggggttagcacatctccaggagagttctagccagaagccaggcctgggcagtagctgtgttacttcaggagctgcctgccatgcccccctctcaagatcgtgctgtgatggggtttgggggaaagataaaggtgcaatcagggaagcgcctgtgttgggaggagcaagtggtgcttgatgaatgcagccacagggcaaccacctgttgcagctccgagccctctggtcctgccccatgtgatgcctgaggctccagacagaagctcccagggctctgatcccagtgcacacaacgcacccctctgcagacaactgtcacccaaagaacaagcccaaagcccaggggaggcaggctgggtgccacctgctttcaggcccagtaccttgtcttccaggcggttcattagtggctccgagaggtgtcccaccttcatcatgacggtcactaatgtgtgggaatcttcaatttctgtccaacgcctttccaggtgtgtgagcagctcagccagcagctcctgcgagtgctgctcctgtgagagggtggcacaggactctgccaggaaggccaggtgcttgtacttgagcttccgcatgcgccagcggacctcctgctccaccgactgcagctccttggaggccttggggatgcccagagcatacaggcttcccagcagcttcgagagggtaccatgccagaccgaggcaatctaggcagagaaaggacacaggagaaatgatgtggcactgtcagtcctgtgtgtgagctggaggctacctctctgaaccttgtttcatgagcatttactacaactcttcagagaagacagtatcagttccccactccattgtaacagggccccagtgcctggctgctcctcacagccttgctcagcctcgaggcctagacgcttggtgtctgtaaccaaatttatccctgagcctgggacacagtaacagggcctgtgagtcactgtttctgtggcagtcttctgggccagtgcctaccatagacagggcaggcactgaatttgacatggctgccaagcacctgcagagccagagcacccctcaggcacaggccagatccaagggtacacctctgagcctgatcctctaggctacaataaatagcacatttctgctcaaggtggctgaggtcatttgcaattgcttgcaagcaagaactctagagtggcaagggaaattctccaagtttccccaatgaagttttgacctaatgtagttgattaaagagagaccacactcttttacatggtcctggctacagctctgggtagtgggcacgtagacttcagctgcaagtaaagctgtcaaatcaatacaagaggtcagagaaaaagttgagcctgatggatgtcacctgatggcagagaaggtggcacttacgcttgctaagatcagtttt

SEQ ID NO: 1883046 - DNA, 4001 bp, Homo sapiens
tgggcaaaggcctcaaacaggggcaggctgagccacttgagtaaggcgaaggacttggcacagtgggccacctcaccagaagtcaggctgggcatgagggatagcaggtcggtggccaggcgctgggacacctgggtctggtgaaagctgagtttgccttcaggacagagcagatcacagggtttagctggagagagtcagcaatcacccagcagctccaccccacctcagcctcgaggtctagatatttgatgtctgtaaccaaatttatccctgagcctgggacacaggaacagggcccatgagtcacagtgtttctgtggcagccttctgggccagtgcctaccatgcataggacaggtactgaatttgacacggctgcaggcatctgcagggccagcgctcccctctctccaccgttctgtccaaagggctcaccataggcataggccacgtccaagagcacatctttcgtcagagagaagggcttctgcaccaggtggtaggagatggcccgcagcaagggcacggaccgccggctctgagctgccagcatcaccagcaccttccgcagctcattggggccaaagtgctccaccaactccaggcactgtcaaccacagccgcgcagaggtcagctcaatggcctggggtggcagagatgagctgggggcaggggtcccatggtcccatccagtgcagcccctgtgacagcccctgtcagactgggcctgagctgactaaacacaggaccactgtgcagggcctgcctcctcatccaccccagggaacccctggacctggagcactgtccacagccaaacttatccccaggtcccagggtaggtgacccagggcccatgagctgtggagcttgctgtggcagccatctgggccagcccccgctatgacagaaacgggcactgaatttgacttgactgcagggctacagccgataggggttagcacatctccaggagagttctagccagaagccaggcctgggcagtagctgtgttacttcaggagctgcctgccatgcccccctctcaagatcgtgctgtgatggggtttgggggaaagataaaggtgcaatcagggaagcgcctgtgttgggaggagcaagtggtgcttgatgaatgcagccacagggcaaccacctgttgcagctccgagccctctggtcctgccccatgtgatgcctgaggctccagacagaagctcccagggctctgatcccagtgcacacaacgcacccctctgcagacaactgtcacccaaagaacaagcccaaagcccaggggaggcaggctgggtgccacctgctttcaggcccagtaccttgtcttccaggcggttcattagtggctccgagaggtgtcccaccttcatcatgacggtcactaatgtgtgggaatcttcaatttctgtccaacgcctttccaggtgtgtgagcagctcagccagcagctcctgcgagtgctgctcctgtgagagggtggcacaggactctgccaggaaggccaggtgcttgtacttgagcttccgcatgcgccagcggacctcctgctccaccgactgcagctccttggaggccttggggatgcccagagcatacaggcttcccagcagcttcgagagggtaccatgccagaccgaggcaatctaggcagagaaaggacacaggagaaatgatgtggcactgtcagtcctgtgtgtgagctggaggctacctctctgaaccttgtttcatgagcatttactacaactcttcagagaagacagtatcagttccccactccattgtaacagggccccagtgcctggctgctcctcacagccttgctcagcctcgaggcctagacgcttggtgtctgtaaccaaatttatccctgagcctgggacacagtaacagggcctgtgagtcactgtttctgtggcagtcttctgggccagtgcctaccatagacagggcaggcactgaatttgacatggctgccaagcacctgcagagccagagcacccctcaggcacaggccagatccaagggtacacctctgagcctgatcctctaggctacaataaatagcacatttctgctcaaggtggctgaggtcatttgcaattgcttgcaagcaagaactctagagtggcaagggaaattctccaagtttccccaatgaagttttgacctaatgtagttgattaaagagagaccacactcttttacatggtcctggctacagctctgggtagtgggcacgtagacttcagctgcaagtaaagctgtcaaatcaatacaagaggtcagagaaaaagttgagcctgatggatgtcacctgatggcagagaaggtggcacttacgcttgctaagatcagttttgttatcattcgtgacttttacttgcaacgacattaaaagttttaggtattaaaaacttgggccaggcagatcacctgaggtcaggagttcgagactagcctggtgaacgtggtgaaaccctgtgcctattaaaattacaaaaattagccaggtgtggtggcacatgcctgtagtcccacctacttgggaggctgaggtgggaagatcacttgaacctggaaggtggaggctgcagtgagctgagattgtgccactgcactccagcctgggtgacagagtgagactctgtctcaaacaacaaaacaaaacacactggcttttctccaggaaaataatttgtttttgagtcagagaagctccaacccctaaactgttctctaacaaaccaatctcgcagtttctggcaacgtgaaagtttcttaggaatgcaactgctgcaataagcaggagtccctgcagtgcgttaggcagtgaaccaccacctttaccctccagggacgcggcacccaagcatgccagaccctcaactgcctgcaaagggaggagcaccccaggcacaaaggtttgcaggaacgcttttgacatatgggtaaaaagacccccggtatcactaagccctgcccactcccaaatgcagaggcctcctagggatgaccaagctgctgctgctaccagcagcacctctgaacaggctcttactaaatgccaggcatccttctgtgtgcgtacccccatgagacaccaacatcctatgagaaccatcagtcccactatacaggtaaacgaaggtgaacttatttctacatagttctgggtccggaacctgcaccacagcccgtcctctctgctggtgcctgctttgtttctgaagagggtaactgctattcaggtactgtgtccacagggcccacagtgtcaacatgggtggctctagagccctttggccctgaatccagccttgcagaagagagcagatggtaaaacaagtatggctctgtcctttcctgggccaagtctctcaacactgaaccctcaggttcagtctctgcgcttatgaatgagaagcagaaaccacaccttcaaggaagtgagctgcgaacagagaagctgctgtctgaagggctggggaggagggagaaagtactggagtaaattctaatcttacagaagatctgggtgtctaccttccggtttcatggacagcaggaaaatctttgaaaagaaagctgttattacattacagatacttgccttataattttgttacaatgttcagtcttgcatcataagactttcttaaatcacatgtgagtaaaaagagtcaataaacagcaattagaattgtagccaaataacaagggggcctaactaagttcattttatgaattatatccccagcaagaaataattatgtactgtaaccccagtccacacaacacaggcatatatatacatccttaactagaacaaaagttccatgagacattagtgaatccccttactatatgtgatgaattctggtattttttatactactctacctcattaagaatcagctggccacatcccactacactgattttataacctgcagtttgaaaagcactcagttagtgc

SEQ ID NO: 1883047 - DNA, 4001 bp, Homo sapiens
gcacgaaggcccactggagcttctgagcatcaacagggcattaaaaggagcaccagaggcaggaccccccagcgctgcctggcagggcagtcaaccagacagcaggatttcatgtgttctcagtaatccctaggatgcctggctccaatcagttccccctgccctcccatgccacacatagtggcccctcccgcctccacctagcccgagctgatcttgggaggacggttcatgagccattagctgaaggggaggataaaggtcgagcagtgggagcccagaggccctaccaggctgaagaactgatcctcttggtctggatggaagttcagacgcgcaaaagccagaagtacgctgcacaggtggggcagggtgatgtcctgcgctctgttcaggacgtgctgggtgggtcagaaatagcagagggacagaataagctctctgcccagcacgctgtcctcctgcctggctctgagtctgaggagagcctgcatggccaggggcaatggcaggaccctccatccagggcccatgagctgtgtcgggaacagagaaggacttacacaggcccagacactccttcgcctggcagcaactacccacagaggctggggacacctagaagctgcttctttctgataagggatttagaaatattctccaaccagtaaacttagtttagactggtcacacataaacgtaactgcaggtgtcatctttctgtacagttccactttgcgagggggatcagtgattcagtagacagttctcagtggattctcagtctcatcagccatgctgctacctgctacagctaccccaaaatggatggaagcacttataatggtcagtgaaagaacagaggaaacagttctcaaacacttttttgagaactgaatagcagccctttcaaaataagccaaaatgcaagaaatatgtatttgcccccacaagtgagcattttcagactggctttactttcccgactaaggcaatggttcccagcagatggccaggaagccagcttctctgagttggggccaggccctggctcacctgggcaaaggcctcaaacaggggcaggctgagccacttgagtaaggcgaaggacttggcacagtgggccacctcaccagaagtcaggctgggcatgagggatagcaggtcggtggccaggcgctgggacacctgggtctggtgaaagctgagtttgccttcaggacagagcagatcacagggtttagctggagagagtcagcaatcacccagcagctccaccccacctcagcctcgaggtctagatatttgatgtctgtaaccaaatttatccctgagcctgggacacaggaacagggcccatgagtcacagtgtttctgtggcagccttctgggccagtgcctaccatgcataggacaggtactgaatttgacacggctgcaggcatctgcagggccagcgctcccctctctccaccgttctgtccaaagggctcaccataggcataggccacgtccaagagcacatctttcgtcagagagaagggcttctgcaccaggtggtaggagatggcccgcagcaagggcacggaccgccggctctgagctgccagcatcaccagcaccttccgcagctcattggggccaaagtgctccaccaactccaggcactgtcaaccacagccgcgcagaggtcagctcaatggcctggggtggcagagatgagctgggggcaggggtcccatggtcccatccagtgcagcccctgtgacagcccctgtcagactgggcctgagctgactaaacacaggaccactgtgcagggcctgcctcctcatccaccccagggaacccctggacctggagcactgtccacagccaaacttatccccaggtcccagggtaggtgacccagggcccatgagctgtggagcttgctgtggcagccatctgggccagcccccgctatgacagaaacgggcactgaatttgacttgactgcagggctacagccgataggggttagcacatctccaggagagttctagccagaagccaggcctgggcagtagctgtgttacttcaggagctgcctgccatgcccccctctcaagatcgtgctgtgatggggtttgggggaaagataaaggtgcaatcagggaagcgcctgtgttgggaggagcaagtggtgcttgatgaatgcagccacagggcaaccacctgttgcagctccgagccctctggtcctgccccatgtgatgcctgaggctccagacagaagctcccagggctctgatcccagtgcacacaacgcacccctctgcagacaactgtcacccaaagaacaagcccaaagcccaggggaggcaggctgggtgccacctgctttcaggcccagtaccttgtcttccaggcggttcattagtggctccgagaggtgtcccaccttcatcatgacggtcactaatgtgtgggaatcttcaatttctgtccaacgcctttccaggtgtgtgagcagctcagccagcagctcctgcgagtgctgctcctgtgagagggtggcacaggactctgccaggaaggccaggtgcttgtacttgagcttccgcatgcgccagcggacctcctgctccaccgactgcagctccttggaggccttggggatgcccagagcatacaggcttcccagcagcttcgagagggtaccatgccagaccgaggcaatctaggcagagaaaggacacaggagaaatgatgtggcactgtcagtcctgtgtgtgagctggaggctacctctctgaaccttgtttcatgagcatttactacaactcttcagagaagacagtatcagttccccactccattgtaacagggccccagtgcctggctgctcctcacagccttgctcagcctcgaggcctagacgcttggtgtctgtaaccaaatttatccctgagcctgggacacagtaacagggcctgtgagtcactgtttctgtggcagtcttctgggccagtgcctaccatagacagggcaggcactgaatttgacatggctgccaagcacctgcagagccagagcacccctcaggcacaggccagatccaagggtacacctctgagcctgatcctctaggctacaataaatagcacatttctgctcaaggtggctgaggtcatttgcaattgcttgcaagcaagaactctagagtggcaagggaaattctccaagtttccccaatgaagttttgacctaatgtagttgattaaagagagaccacactcttttacatggtcctggctacagctctgggtagtgggcacgtagacttcagctgcaagtaaagctgtcaaatcaatacaagaggtcagagaaaaagttgagcctgatggatgtcacctgatggcagagaaggtggcacttacgcttgctaagatcagttttgttatcattcgtgacttttacttgcaacgacattaaaagttttaggtattaaaaacttgggccaggcagatcacctgaggtcaggagttcgagactagcctggtgaacgtggtgaaaccctgtgcctattaaaattacaaaaattagccaggtgtggtggcacatgcctgtagtcccacctacttgggaggctgaggtgggaagatcacttgaacctggaaggtggaggctgcagtgagctgagattgtgccactgcactccagcctgggtgacagagtgagactctgtctcaaacaacaaaacaaaacacactggcttttctccaggaaaataatttgtttttgagtcagagaagctccaacccctaaactgttctctaacaaaccaatctcgcagtttctggcaacgtgaaagtttcttaggaatgcaactgctgcaataagcaggagtccctgcagtgcgttaggcagtgaaccaccacctttaccctccagggacgcggcacccaagcatgccagaccctcaactgcctgcaaagggaggagcaccccaggcacaa

SEQ ID NO: 1883048 - DNA, 4001 bp, Homo sapiens
cccatgccctttccaggggctgaaacactggccactgacctaaggtaactccggagaaaagactatatatgttgaaaccaaatcacaaaagcagtaaaataccaccctcaagaatcagggttcatgagtccaaacactagacaactgtttgtcccaaaatagtattgtgagcttgaagacaatgaacctttctgggattcaatcacctgacttaccatacgggaaggtcaaaatacttttcattagccaggtgactctaaataaaacaggagtgaagtgacttgccaggtcagaccttcctgcacacttacccctgcacaggttccaaggaacagcctggcagccactgaaggtatcttctctcaggtcaggtcccctctagctccagcatcttgggattgctgctgtagaaacactgacggatggcaggcactcttgtgccatgtgctgggtcagggacacagagtgaagccactggtgagaggtggctgtcaggaactggcagctaacacggtcgcctcccagtttcatggacactggtagaaaatacaaaattcctcgattagggacaagggaccactgattattcaaaacaatagcaatagccagagcatcagcattttccaccaccctcccaagccccagttcccataggggagtcagaggcacctgcatgagccattggactactacaagaaaggagcgcaggactctaccctttcacaacgcacagcaagaatgcctgccctctgctctggaagaaggtactaacctcttaccttccaaggtggtagaacatgcttgaaaagatagtaagtgaaaaggggtagccagtgctttactcacaagactgcttgaacatgagactcaaggagggacctcagcaggcctggggtgttcagcaactattcctggcctgaaaagacagaatcagctgaaagcctctacctttaagagaggtgaccccaccacccagaggaacacaggagctgtgctgctcgtgctatgctcaagccagcaacactcttctcatcccagccagtcctttaacacacctaacaccaagacaagaacttgaaggcatccatctccttcccatccaaacttcccaccggcttctatattccactcaggatgcagggttagagaggcctggcatcaaaccctgatctgctggtttgtggctgggcaaccctggacacataattctgaccttgggcccctcatctgtactgaacttaaaaacgacctcatgatgatacctcaaagatttaaaacaattaagaggtctggcgcaaaataggtgttcaacattagcaccttcctcttccatgagtttttcctttaagatgagcacacattgacctcaccctccactagctcctggggcactcagctcctctgcagaactgagactttggttctctttgctttgccttgtaaatatcctattccatgagtctctcagggcaggactcttccctgttattcctcttcactgtttcaactcctacccttaccaccactcttggcttcatcctcaacttttataagacttttgctttaagtgtataataaaataaaatttgtactgagcctggagcacagcaaacactcaggattcccttcacctttcacaccagcattgtccaaaacaacttccacagcgacagaaatgccctctaatctgtgcggtccaatatggtagccactggccacctgtggctactgatcatctgaaatgtggctagtgtgaaaatgaaataaaactccaaatttaatttaatcatgtgtgccaagtggctaccacattagatggcacggatctatacaaggcccaggacactagatccaggagggaggaagtcattgtctgaaatttctataaccttgctctggatggagcagggcaaggcctcaaaccgtttcaaaactgttctagcaagcactgaaggaatgcatagggtcaccgcagacccaagcacgctggaggcttgctaccctcattcacccaaatcccccacactcaaggaatctggcagtccactctcactaagcaccagtccctgctgggggctgtgggaagagaccagagttcaattaggcacctgagcttggttccaggagcccagagctactaatgactctcagggaaagatcctttctggctgaggaagaagggaaggtgtcttggaagagataaccttattaaattattaaatagatcagacaacacgaactaaacttccacattattctatgacactacaattctagcatggcttttcactgtgaccagaaacatccttatcatcatgtagttaatataaatactgccttttccccttcatttttttctcatgtatcttacggctcagaaatcacttctgaaggagtaagtagaccaggcacatgaagtagatttcattttccccatgaaataatggttcagagaaaacgcaggcctagttccaggaaggcagagttggggtctctgcaacgtgatttaccggggcatcttgcaaaggagttgctgtgacagtaagctcttccactttgagaccgtcacctcagccacggctcccacctagaagggaacaaatgcagttagctccaaacgcagttagcttcagcttgtgcctctgaaccattatccagctctagctccttgcaacgcctggcccactctacagcctctcttgcggcaggtctacacgccaccccatgccttccggtgaggtccctcctgaccacacgtcccatcccacctactggggtccacccaggtcatgcagaagccccacttctcggctgaaagagaagcacgaggttactcatcaagtaatccccgagtctcctccgggtaaaatgttccgaacgcgctcaaccgcctcttgagaggaagtagcacgtgtagtgaaggcttggtctccaagaatcactggtgcccccactcactgcggcccagcctcccacgccgcccgccactgaacccaatcccccaggacccctacctgggctcaggaatggtcaggcaacacgtggggcccaggatggcggtggatgactagactgccgaagaccgcgccgctgcgactacgaagtacggagtacggagtacaggtctgccagccaagactgacgccgcgcgctgcgccgcgcacctcgacgtcaccgcgtagtcccgccccgaagccgtgcgtggccggggccacagcgtttggggtagatgacgtcacgcggccgcgggcgctcgcttggtagggtgtgctggggcgtagagtttagggtcctgaggctgcgtctgcgtgtcaactcagtggagtctctcgaccgccctttgttaccctcctttagtgaccagaaggctggagttacgtaatctgcccctacagctaaaaggacggaggcctgacggcgtggcctggagggacgcgctgagcccctaatgggtggtgccttcctggtgcggccgcacaggcggggccgggcggaatccaagcacgatgtggacacggagccttgggaatgaacaggagcctgcctgtgggagcatgtgggaaaggtgatgcaggtggaagggcaaatacaaattatacatagggtttaattttccctgaggaaaagaagggacgagaaaccatccccctccctttttctttcaaaatttcagcctctctcctttccaaatgtactcaagtctttttcttatatggccaggttcaactcaggaatgtttcttgggagccatctccttgaagtgtaattgttggctgggtgcggtggctcacgcctgcaatcccagcactttgggaggctgaggcgggcggatcacaagatcaagagatcgagaccatcctggccaacatggtgaaactctgtccctactaaaaatacaaaaattagctgggcatggtgaagcgtgcctgtagtaccagctactcgggaggctgaggcaggagaatcgcttgaacccgggaggcggaggttgcagtgagccg

SEQ ID NO: 1883049 - DNA, 4001 bp, Homo sapiens
gtgaccccaaaccatcttgccatagatttcactggaaacaccactgaaatgccaaggagggttaagtttttaaagtcatgtttattgaagtatgattttacattcagcaaaattcatcctgttaaggtttgacaaacgcacagtcataccataatcaagatgcagaactgtagaatcacactaacaattccttcctgcccttgtaatcaacccctttttgatcccaaggaactcactgacctgtttttctgtcaaaagtatcaaatttcatcactaaaatgatctacagtactatggaaaaatgtgtaagcacataaaatacacaaacctatttttttaaaagtgagatacttaaaatttctttagcataccaacaaaaaatgaaggtagcattgcattttactacagatgtgcggacattcaaagtccaccattgtcgtatatatggctcaacagtaatatttaagaatatactgctgggtatagtggctgacgcctgtaatcccagccctttgggaggctgaggcaggctgatcacctgaggtcaggagttctagaccagcctgaccaacatggagaaacgccatccctactaaaaatacaaaattagctgggtgtggtggcacatgcctgtaattccagctactcgggaggctgaggtagaattgattgaacccaggaggtggaggttgtggtgagctgagatcatgccactgcactccagcctgggcaacaagagcaaaactccgtctcaaaaaaaaaaaaaaaaaaaaagaatatactgggcgggcatggtggctcacccctattaattccagcactttggaaggccgaggcaggcagatcacttgagatcaggagttcgagaccagcctggccaacatggtgaaaccctgtctctacaaaaatacaaaaattagcttgtaatctcagctactcgggaggctgaggtggagaatcgcttgaacccgggaggcagaggttgcagtgagctgagatcgtgccactgcactccagcctgggcgacagtgagactccgtctcaaacaaacaaacaaaaatgtgtaaaaatacaaaattagctgggtgtggtggcacgcgcctgtaatcccagctactcaggaggctgaggcaggagaatcgcttgaatctgggtagcagagggtgcagtgagccaagattgcaccactgcactccagcctgggcaacaagagtgaaactatctattataaaaaaaaaaaaaaaaaaaagactatactgtaaaataacaatcttagagttaagtcatatctttgttgaccatgtgaaccatgatgaaggtattgctacttgttttattaacactgtcaagttacagaccacagctggttcatggaaaaactaccttaaataatagaattgaattccacagaaatgttctacaggatcaagtcagctataaggcagttttgtgtctccaaaactgtcaaataatattcctatagatgattggggccatctcaaaattcaaccttgctaccactgtgaaagggacaaaaaaaaaaaaaaaaaagcaacctctattctgtagatactaaaggttacatattcaaatatacctcctctacttgaaaagcttcactgattctttcaagcgccagacctgtaaaagaagtatcacagtaggtattactaaatagcaaaatacagtactgtctagactgtttacaaaaactgtgcaagtaagtaaataaaatcgtccagtatcttacacactgttgctttagtaatgttgtgacatctaaatttatgttttcactcaaaatcctgtctttctcttggcttagtagtattatccatttaccaagagctttttcccttttaccaaaagcgtaattttaaaaggggggggggtatgattccatttaataaattcctgcataccaatttggcctcaggtaaatcctttaatccatcacagcagaagcacataaaatcagattagagttctcatccttggccacaatttcaattcaactattaataacttaaaccaaattctttccactcggcccataccttaagttcatcagcatcttgaaactccaccaagcctggttaaaaaaagtgaaagacaatgttaagaatatcatgcaattttgttttttaatgagtggtctttatggtggctatccaatagctctctttgatgagtaaataaattgctatctctgaatataattcctgtacaaattctccaaatttcctgatacttgggagtcttctgtagtttccagctaggaggaaaatggtcaggagtcactatcttcccactgatgagcattgaatcctatccatttttgaaaagaaacactatcccaacaatatttgtctgggaaaaactgaaacaaaccttccacagatttgaaaatcaaaggaagcactattaaactcgcttaccctgaggctgagttcagggggctgggaagtttctagttctgggcacttgctcagttttcacaatccttagacgctagctcacactgcttccttgacatggtgtctctcacagtttaaactgaatagttaaaaaacaatttggcaggccgggtgcgctgactcacgcctgtaatcccagcactttgggaggctgaggctggcgaatcaccagctcaggagttcaagaccagcctggccaacaaggtgacaccccgtctctactaaaaaatacaaacagttgggcatggtggcgggcacctgtaatcccagctactcaggaggctgaggcaggagaatttcttgaacccgggaggcagaggttgcagtgagccgagattgcgccgttgcaccacagcctgggtgacagagcgagtctccgactcaaaaaaataaataaaataaaataaaaataaaatgggctcaataagaatctctaacacctaaagcaatggtaaaacaaagccttaccaccgctatcttcctgtgctgtatatagggctattcgccagagctggaggtattccagggagggaaaattgtccatgctctgggtctatctataacgctggataaaagatgcctagaacctaggctgcaaatgtacaagctttcctcattaaagaatggtaaaatgggtcccatttggtttcatcaaaaaggcagcaaatctttcacaactgaggaaaacaggtgaaccacgagcttcacattccaacagaactgtggtacctatgctagccacaaagattatttgttgactcaaatgtaaatttagatctttatcaattttactaaattcgcaaagtatccctttatatagcattttgtaccagtaatgaacaattagtatgctcagcgatgctcaggagagccgctccaaaaacttacattattccccagacaaacgttctctaggggcagccttgcgtatttctacaccttagtagacctaagttaggcgttcaacaccttgtcctggtccaagccagaaagaacccagtagttcagacttttcccaggtcagaaaaccacgaagggcctcctcacaccctgattaaacgttggaagcgggccctgtgctgtaataacgctctggccactcccaaaaaagcgaatcttcgggaggaaagcaggctcccttattagggctcacagcactccgctcaacttactgtaggcgtcggctccagcaagactcgtccctccaagcctttaaattatctgactgcgggccagtagcaaatgaacggcactggtggcggtgggggatggctgcgcgagtgaaatgacctccgtgtgtttgctaaccccgctattatactgccccgcttagaaacttaaagcgcttcagacatcagatctcactcgcttcccaaataggcttccgtccgcgcggtcacagcccctgggcaggcaggagccccgagtgcaccaagaacccagagaccgtccggggctcggcgcctccgcctgcggttggaatttgatcctcaaaatgcaatcatttaattgaaaaaggactaa

SEQ ID NO: 1883050 - DNA, 4001 bp, Homo sapiens; identical to SEQ ID NO: 586964

SEQ ID NO: 1883051 - DNA, 4001 bp, Homo sapiens
tagtcccagctcctcaggaggctgaggaaagaagattgcttgagcccaggaattagagggtgcaatgagctatgatcatgccactgcagtccatcctggggaaaagagctagactctgtctcagaaaaaaaaatttgtgggtgccaagactcaagaccatgggagctggtcgggcacagtggctgacgtctataatctcagcattctgggatgccaaggcgggtggatcgtctgaggtcaggtgctcaggaccaacctggccagcatggcaaaaccctgtttctactaaaaacacaaaaattagccaggcgtggttgttcatgtctgtaatcccagctgcttggaggctgaggcaggagaatcacttgaacccgggaggcatcggctgcagtgagtcaagatcgagacactgccctccagcctgggcaacagagcaagactctgtctcaaaaaaaaaaaaaaaaaaaaaaaaagactgtaggagcatctggtgggaggtagtggagggagaactgtgggtttggaagctgcgccctccccccagccatgcgttggaacaggaacagttacatggagaacaaccttaccttgtccgacaccctcagacctttgtcccaggccaggaatcttttaatgacaggatcctctgtgattagagatcagatgtcagtgtgagaagcaggacagggtttccatgggagcagcagggcagaaaggagaagtgtgcctcccggggggaagtctcaggattgtggccgcgggtgaggtggatgggagaggggagaatgactttcactgggcaagggagagaggctcctgctctgagactcccctgagaagaggccgaaggaggccctgggtgtgagaatctacaggatgtagagctgggaatcagccaggaccccctccagcagacacggagggaccactgcagagtcataaaggaattcccatcatttcctcatgagacagtcacatcagggtgtgaccatggccttggtatcccccactatggatggaaacacttaggtttagaaaagtcagtaagaaacattaagtttcagagggcacagctgaaaccacttttttgatttttgattttgtttttctttatttgatttttatttttatttatttattaatttattttgagacagagtcttgctctgtgggccaggctggaatgcagtggcctgatattggctcactgcaacctctgccccccgggtttaagcaattctcctgtctcagcctcccgagtagctgggattacatgcatgagctactgtgcccagccttggtttttcttttgagatagggttttgctctgtcacccgggctggagtgcagtgatgtagtcatagctcactgcagcctcaaagtcctgagttcaagcaatcctcttgcctcagcctcccaacgtgctgggatctcaggcgggagccaccgcgcctggcccgaaactaagctttcttatcccaagcgccgaactttatcaagtcgacccaatcctttatcatctcctaagtgtccctcatgagtgatcacttcacagtcctcccacatggagagctcacccactggggcatatttttcccattggaaaagtgtggttattggaagtttcctctttttagaaagaacaggattggaggtgctctctggggtgtcctcctaccaagcagcctgttgaaggcctcgtggtgctcagggagcacgagcgacactcgccgtcgcttcagcttcatcttgaggccacacagcatctccgccacccagatctcctcaggctcaggggcgagcaccttccgtggctcctcctccaacgactcctcagatttgtcccaccactccatcttccttttccagcaaaaggacctatgcggggggctgggatctaccccaggggctgagtaaagaaaccaggccacggtgtaatgcttctgcagttgatcacactagagcccgacccaaaaccccaaatcactctccatcctccccagcctcccagactgctggcttctccaagccatctttccttctgtctgtctcctctgctgagctccatgtgccgctccttctcctccccattctcccgtttctctgtcctcagaacacttcctcatatccttccctggtccctggctttctgagtcccttctttttttttttgttgttgttgttgttgttgagaaacagtcttgctttgtggcctaggctggagtgtagtggtgcgatctcggctcactgcaacctccgcctcctgggttccagtgattctcctgcctaagcctcccaagtagctgggattacaggtgcccaccagaacacccagctcatttttgtccttcaagaagagacagggtttcaccatgttggccaggctggtctccaactcctggcctcaagtgatctgcctgcctggcctcccaaagtgctgggattacaggtgtgagccagtgcaccctgcctcagtacctccattcttcccacacaccctcctcacgtgctccttcctgacttctgggcccttccttccttcttttttttttttttttttttttttgagacagcgtctcactctcttacccagaatggaatgcagtggcgctatcttggctcaaagcaacctcttccacctgggttcaagcgattatcctgtctcagcctcccgagtagctgggataacaggcatgcctggctaatttttgtattgttaatataaatgaggtttcgctatattggtctggttggtcttgaacaactgacctcaagtgatccacccatctcagcctcccaaagtaatgggattacaggcatgagctaccacacccggccttcgtttttcttttgactcagggttttgctctgtcacccaggctggagtgcagtggtgcagtcatagctcactgcagcctcaaagtcctgagttcaagcaatcctcttgcctcagcctcccaacgtgctaggatctcaggcatgagccactgcacctggcccgaaaccaagctttctcatgccaagcgccaacctttatcaagtctagcctagtcctctatcgtctcctaagtgtccctcatgagtgatcacttctgagtcctcctgcatggagagctcacccactgggggcgtatctttcccattggaaaagtgtggttattggaagtttcctctttttagaaagaacaggattggaggtgctctctggggtgtcctcctaccaagctgactgttgaagtccttgtggtgctcagggaggatgggtgacactcgctgttgcttcagcttcatcttgagcccacacagcgtctccactacccaggtctcctcaggctcaggggcgagctcctacatggggggctgggatctaccccaggggctgagtaaagaaaccaggccaccgtgtaatgcttctgcatctgatcaccttagaccccgacccaaaaccccaaaccactctccatcctccccagactcgcagactgctggcttctccaagccatctttctgactttctcctctgctcaaccccatgtgccactccttcccctccccattcttctctctctctgttctcggaacactgcttcatgtccttccctggtccctggctctctgagtccctccttttttgttttgttttgttttgacacagaatcttgctttgtcacccaggctggagtgtagtggtgcaatctcagctcactgcaacatccatctcctggattccatttattcttctgcctcagcctctcaggtagctgggattacaggtgcctgccataatgcccagctcaattttgtacttttagtagagacagggtttcaccatgttggccaggctggtctcaaactcctggcctcaagtgatccgcctgccttggcctcccaaagttctgggattacaggtgtgagccactgcacccagcctgaatttctccattcttcccacacaccctcctcaggttctccttcctgaccgctgacccttcttttctttt

SEQ ID NO: 1883052 - DNA, 4001 bp, Homo sapiens
gagccaccacgcctggcccccttccttcatcttagtcaatcctatgccacctcttcttcctccagtcccctcacctgatggtcccgacacttcatcatccaccacctcctggagggggtaccctgaggtgctccgctgggggctccgctcttcctggggctgcggttgatggctcatcatgatctttcccaaaatctgtcccatctcaccaaacctagtctctgttctgtccttggtcttcttctggacactgctgggatccagaagagtgtgttatcaattctcgaggctgggagaagtcaggagtggagaacagctctgagaagttactgttgtccaactgaactcccaggtgccgacagagtccggtccctccaatcaggaaggtcggaatctctgatgtcatcgctcatgccaacctggcaaccagtttgaaaaaaaacacatgtaactgccaggctgatctcttgtcctggagatcctgggtgaatggtatctcctgccactgtcccaacctcagaccactgtccaaaagcatcttcagggtctccgcatccctctgttccctgtcccagcagaggctgtgtcctctccactcaaagcttgaagcgtgttggggtctcctcttctctgtacatgcccgtttcagagtccagtctggtgggagagggatcaggatgggaaagaaaagtagggtaagcagaaacgatgaaaccttacaagagtgagattatcatgtacaagagatcccaggaacattgacttgatgaaaaagtcacatcagagcactcaatttggcagaggttttctgccgagtgtctactgacattcactgtccgagattctgtactgggggtacacgcgtcctctgccctaaggcatctttgagtccaagagatattttgaggactggaaatcataggaaactgcccatgagttcacacatatttccaatggtgtccccaatttcagggagtccacggatcacctaaagccagcccctccagtttggctaagaaactctatatatcaagttttgtatcatatgtattgctcttaactcagaaaattccaccatttatagcagtggtttatttatttataccattgaaggaaatggtttatttatgaatctatattatggatattctataagatactgggtgtacaaaaagactaagtcgaaaaatctcagctgtgcacagtggctcatgcttgtaatcccatctctttgggtggccaagggaggaagactgcctgaggccagcagttcaagaccagtataggcaacatagcaagagcccatctctaaaacaaaacaaaacaaaacaaaacaaaattagccaggtgtcgtggctggcacctgtgttccaacaacttgagagactgaggtggcaggaggattgcttgagcctaggagttaggggctgcagtgagctgtgatcgtgacaccgcactccagtctgggcaacacagcaagaccttgtgtcaaaaaaatttttttaattaaatataaaagagtttcatgacattcagagaccatccaaagaacctgtgggttccggccaggcacagtggctcacgcctgtaatcccagcgctttgggaggccatagcaggtggatcgcttgaggtcaggagtttaagagcagcctggccaacatggtgaaaccccatctcttctaaaaatacaaaaaattagtcaggcatggtggtgggtgcctgtaatcccagccactcaggaggcggggacagcagaatggcttaaacttgggaggcggaggttgcagtgagccaaggtcacaccattgcactccagcctgggcaacaagagcaaaactacatctcaaaaaaaaaaaaaaaacaaaaaaaacaaaaagaacctgtggatgagttcccacatggcttcctaacgggctgcggctctcctaggagtctctcgctcatgggaaaggcacaaactgaatgcggaaggaaatcccattgctgtggaagtcccattgttaggaagctctgcttttctggagttcaaatttgcattcatgacgctttaaaccgtcagagctgggtgtgtcctcctacaacaaatcactttactctctctcctagttaacaggctttcaaatattagaacatccatgttctgacctcattaaaattgctcttttgtggaatgaaaagctctgatttaacccgtctttaagcctggtatgcatattcctctctgttccggccaccttgtctagacacactacactgaggcagtgcccatcttagatgatgttgatacattgtcaaaaaatgggcaaaccaggtgcggcggctcacacttgtaatcccagcacttttggaagctgatgccgacagataaccagaggtgaggaggttgagatcagcctggccaacatggtgaaacctgtctgtttttctgtaaaaatacagaaacaatgagctgggcgtgggagtgcacttctgtaatcccagctacttgtggggctgaggcaggagaatcacttgaaccgggaaggtggaggttccagtgagccgagatcacgacactacactccagcctgggcgacagagtgagactccgactcaaaaaaaaaaaaaaaaaaagtgccagacagcccaggtttggtctgatatgttcagaaaaaagcaaaacagtcacctctcaccttttcttttcctgcaatgatgccgtttaatacaacaatggctgtaggtctgcggcagaaatatcattcaagtgaaacagaagggctttcctggctggacacagtggtcactcctgcaatcccaacactttggttggctaaggtgggaggatttcttgcggccaggagttcgaggctgcagtgagctgtgatccaccactgcattccaggctgggcatcagagtgaggcctgtctctaaaaaaacccttcactccccaaaaaaagggattttcaaataccagcctttcagcatgaggatcacatggaggaacattaagacacagatgctgggacccagccctattgattgtaattaaaaaactgaggtgaggcctgatttagctccatcattggaatccattcagatttgaaattctctgagttggacagtgcaagagagatcctaaagaaagcaaagtcactgtggactgaaatgagctggcaaggttttctgagcgtggtgaaatatgatctgggcctcgcttgggagggctgtggccaggccttgagtccgtggctcagtgggaccttctgaaacagcctccaatccgtgcccccacttcatttgctagtggatgaccccctccagcggctttggtgctgatgggaataagtcaacctgcagcggaagttcagcccaagtttcagcccagcagcttctacacacctgtccgtggtctggtcatgctgccatctctgcgattctctgcggttctctgcggagtcgtggtttctgtaccttgaagagaacttcccctctgggacccagaaacccagtgaatcctcaggaaaaaagggaatgaaattactgaagacaactctgtggcggggagatggaaaagaggctctctctctttttttttcctaatattttgagacagagtttcgctcttgtcacccaggctgcagtgcagtggctccatctcggctcactgcaacctctgcctcccaggttcaagcgattctcctgcctcagcctcccgagtagctgagattacaggcacccaccaccactcccggctaatttttgtattttagggtttcgtcatgtttgccaggctggtcttgaacacctgacttcaaatgatccacccgcctctgcctctcaaagtgctgggaatacaggcataagacactgcacccggcctgtttttgttttttagagacaaggtctctgttgccttggctggggtgcagtggtacaatcagctctctgttgcctcggctggggtgcagtggtacaatcagctctctgttgcctcctgggctcaagcaatcctcttc

SEQ ID NO: 1883053 - DNA, 4001 bp, Homo sapiens; identical to SEQ ID NO: 1883052

SEQ ID NO: 1883054 - DNA, 4001 bp, Homo sapiens
gagccaccacgcctggcccccttccttcatcttagtcaatcctatgccacctcttcttcctccagtcccctcacctgatggtcccgacacttcatcatccaccacctcctggagggggtaccctgaggtgctccgctgggggctccgctcttcctggggctgcggttgatggctcatcatgatctttcccaaaatctgtcccatctcaccaaacctagtctctgttctgtccttggtcttcttctggacactgctgggatccagaagagtgtgttatcaattctcgaggctgggagaagtcaggagtggagaacagctctgagaagttactgttgtccaactgaactcccaggtgccgacagagtccggtccctccaatcaggaaggtcggaatctctgatgtcatcgctcatgccaacctggcaaccagtttgaaaaaaaacacatgtaactgccaggctgatctcttgtcctggagatcctgggtgaatggtatctcctgccactgtcccaacctcagaccactgtccaaaagcatcttcagggtctccgcatccctctgttccctgtcccagcagaggctgtgtcctctccactcaaagcttgaagcgtgttggggtctcctcttctctgtacatgcccgtttcagagtccagtctggtgggagagggatcaggatgggaaagaaaagtagggtaagcagaaacgatgaaaccttacaagagtgagattatcatgtacaagagatcccaggaacattgacttgatgaaaaagtcacatcagagcactcaatttggcagaggttttctgccgagtgtctactgacattcactgtccgagattctgtactgggggtacacgcgtcctctgccctaaggcatctttgagtccaagagatattttgaggactggaaatcataggaaactgcccatgagttcacacatatttccaatggtgtccccaatttcagggagtccacggatcacctaaagccagcccctccagtttggctaagaaactctatatatcaagttttgtatcatatgtattgctcttaactcagaaaattccaccatttatagcagtggtttatttatttataccattgaaggaaatggtttatttatgaatctatattatggatattctataagatactgggtgtacaaaaagactaagtcgaaaaatctcagctgtgcacagtggctcatgcttgtaatcccatctctttgggtggccaagggaggaagactgcctgaggccagcagttcaagaccagtataggcaacatagcaagagcccatctctaaaacaaaacaaaacaaaacaaaacaaaattagccaggtgtcgtggctggcacctgtgttccaacaacttgagagactgaggtggcaggaggattgcttgagcctaggagttaggggctgcagtgagctgtgatcgtgacaccgcactccagtctgggcaacacagcaagaccttgtgtcaaaaaaatttttttaattaaatataaaagagtttcatgacattcagagaccatccaaagaacctgtgggttccggccaggcacagtggctcacgcctgtaatcccagcgctttgggaggccatagcaggtggatcgcttgaggtcaggagtttaagagcagcctggccaacatggtgaaaccccatctcttctaaaaatacaaaaaattagtcaggcatggtggtgggtgcctgtaatcccagccactcaggaggcggggacagcagaatggcttaaacttgggaggcggaggttgcagtgagccaaggtcacaccattgcactccagcctgggcaacaagagcaaaactacatctcaaaaaaaaaaaaaaaacaaaaaaaacaaaaagaacctgtggatgagttcccacatggcttcctaacgggctgcggctctcctaggagtctctcgctcatgggaaaggcacaaactgaatgcggaaggaaatcccattgctgtggaagtcccattgttaggaagctctgcttttctggagttcaaatttgcattcatgacgctttaaaccgtcagagctgggtgtgtcctcctacaacaaatcactttactctctctcctggttaacaggctttcaaatattagaacatccatgttctgacctcattaaaattgctcttttgtggaatgaaaagctctgatttaacccgtctttaagcctggtatgcatattcctctctgttccggccaccttgtctagacacactacactgaggcagtgcccatcttagatgatgttgatacattgtcaaaaaatgggcaaaccaggtgcggcggctcacacttgtaatcccagcacttttggaagctgatgccgacagataaccagaggtgaggaggttgagatcagcctggccaacatggtgaaacctgtctgtttttctgtaaaaatacagaaacaatgagctgggcgtgggagtgcacttctgtaatcccagctacttgtggggctgaggcaggagaatcacttgaaccgggaaggtggaggttccagtgagccgagatcacgacactacactccagcctgggcgacagagtgagactccgactcaaaaaaaaaaaaaaaaaaagtgccagacagcccaggtttggtctgatatgttcagaaaaaagcaaaacagtcacctctcaccttttcttttcctgcaatgatgccgtttaatacaacaatggctgtaggtctgcggcagaaatatcattcaagtgaaacagaagggctttcctggctggacacagtggtcactcctgcaatcccaacactttggttggctaaggtgggaggatttcttgcggccaggagttcgaggctgcagtgagctgtgatccaccactgcattccaggctgggcatcagagtgaggcctgtctctaaaaaaacccttcactccccaaaaaaagggattttcaaataccagcctttcagcatgaggatcacatggaggaacattaagacacagatgctgggacccagccctattgattgtaattaaaaaactgaggtgaggcctgatttagctccatcattggaatccattcagatttgaaattctctgagttggacagtgcaagagagatcctaaagaaagcaaagtcactgtggactgaaatgagctggcaaggttttctgagcgtggtgaaatatgatctgggcctcgcttgggagggctgtggccaggccttgagtccgtggctcagtgggaccttctgaaacagcctccaatccgtgcccccacttcatttgctagtggatgaccccctccagcggctttggtgctgatgggaataagtcaacctgcagcggaagttcagcccaagtttcagcccagcagcttctacacacctgtccgtggtctggtcatgctgccatctctgcggttctctgcggttctctgcggagtcgtggtttctgtaccttgaagagaacttcccctctgggacccagaaacccagtgaatcctcaggaaaaaagggaatgaaattactgaagacaactctgtggcggggagatggaaaagaggctctctctctttttttttcctaatattttgagacagagtttcgctcttgtcacccaggctgcagtgcagtggctccatctcggctcactgcaacctctgcctcccaggttcaagcgattctcctgcctcagcctcccgagtagctgagattacaggcacccaccaccactcccggctaatttttgtattttagggtttcgtcatgtttgccaggctggtcttgaacacctgacttcaaatgatccacccgcctctgcctctcaaagtgctgggaatacaggcataagacactgcacccggcctgtttttgttttttagagacaaggtctctgttgccttggctggggtgcagtggtacaatcagctctctgttgcctcggctggggtgcagtggtacaatcagctctctgttgcctcctgggctcaagcaatcctcttc

SEQ ID NO: 1883055 - DNA, 4001 bp, Homo sapiens
aggggtgagccaccacgcctggcccccttccttcatcttagtcaatcctatgccacctcttctttctccagtcccctcacctgatggtcccaacacttcatcatccaccacctcctggagggggtaccctgaggtgctccgctgggggctccgctcttcctggggctgcggttgatggctcatcatgatctttcccaaaatctgtcccatctcaccaaacctagtctctgttctgtccttggtcttcttctggacactgctgggatccagaagagtgtgttatcaattctcgaggctgggagaagtcaggagtggagaacagctctgagaagttactgttgtccaactgaactcccaggtgccgacagagtccggtccctccaatcaggaaggtcggaatctctgatgtcatcgctcatgccaacctggcaaccagtttgaaaaaaaacacatgtaactgccaggctgatctcttgtcctggagatcctgggtgaatggtatctcctgccactgtcccaacctcagaccactgtccaaaagcatcttcagggtctccgcatccctctgttccctgtcccagcagaggctgtgtcctctccactcaaagcttgaagcgtgttggggtctcctcttctctgtacatgcccgtttcagagtccagtctggtgggagagggatcaggatgggaaagaaaagtagggtaagcagaaacgatgaaaccttacaagagtgagattatcatgtacaagagatcccaggaacattgacttgatgaaaaagtcacatcagagcactcaatttggcagaggttttctgccgaatgtctactgacattcactgtccgagattctgtactgggggtacacgcgtcctctgccctaaggcatctttgagtccaagagatactttgaggactggaaatcataggaaactgcccatgagttcacacatatttccaatggtgtccccaatttcagggagtccacggatcacctaaagccagcccctccagtttggctaagaaactctatatatcaagttttgtatcatatgtattgctcttaactcagaaaattccaccatttatagcagtggtttatttatttataccattgaaggaaatggtttatttatgaatctatattacggatattctataagatactgggtgtacaaaaagactaagtcgaaaaatctcagctgtgcacagtggctcatgcttgtaatcccatctctttgggtggccaagggaggaagactgcctgaggccagcagttcaagaccagtataggcaacatagcaagagcccatctctaaaacaaaacaaaacaaaacaaaacaaaattagccaggtgtcgtggctggcacctgtgttccaacaacttgagagactgaggtggcaggaggattgcttgagcctaggagttaggggctgcagtgagctgtgatcgtgacaccgcactccagtctgggcaacacagcaagaccttgtgtcaaaaaaaattttttaattaaatataaaagagtttcatgacattcagagaccatccaaagaacctgtgggttccggccaggcacagtggctcacgcctgtaatcccagcgctttgggaggccatagcaggtggatcgcttgaggtcaggagtttaagagcagcctggccaacatggtgaaaccccatctcttctaaaaatacaaaaaattagtcaggcatggtggtgggtgcctgtaatcccagccactcaggaggcggggacagcagaatggcttaaacttgggaggcggaggttgcagtgagccaaggtcacaccattgcactccagcctgggcaacaagagcaaaactacatctcaaaaaaaacaaacaaacaaacaaaaagaacctgtggatgagttcccacatggcttcctaacgggctgcggctctcctaggagtctctcgctcatgggaaaggcacaaactgaatgcggaaggaaatcccattgctgtggaagtcccattgttaggaagctctgcttttctggagttcaaatttgcattcatgacgctttaaaccgtcagagctgggtgtgtcctcctacaacaaatcactttactctctctcctagttaacaggctttcaaatattagaacatccatgttctgacctcattaaaattgctcttttgtggaatgaaaagctctgatttaacccgtctttaagcctggtatgcatattcctctctgttccggccaccttgtctagacacactacactgaggcagtgcccatcttagatgatgttgatacattgtcaaaaaatgggcaaaccaggtgcggcggctcacacttgtaatcccagcacttttggaagctgatgccgacagataaccagaggtgaggaggttgagatcagcctggccaacatggtgaaacctgtctgtttttctgtaaaaatacagaaacaatgagctgggcgtgggagtgcacttctgtaatcccagctacttgtggggctgaggcaggagaatcacttgaaccgggaaggtggaggttccagtgagccgagatcacgacactacactccagcctgggcgacagagtgagactccgactcaaaaaaaaaaaaaaaaaaaaagtgccagacagcccaggtttggtctgatatgttcagaaaaaagcaaaacagtcacctctcaccttttcttttcctgcaatgatgccgtttaatacaacaatggctgtaggtctgcggcagaaatatcattcaagtgaaacagaagggctttcctggctggacacagtggtcactcctgcaatcccaacactttggttggctaaggtgggaggatttcttgcggccaggagttcgaggctgcagtgagctgtgatccaccactgcattccaggctgggcatcagagtgaggcctgtctctaaaaaaacccttcactccccaaaaaaagggattttcaaataccagcctttcagcatgaggatcacatggaggaacattaagacacagatgctgggacccagccctattgattgtaattaaaaaactgaggtgaggcctgatttagctccatcattggaatccattcagatttgaaattctctgagttgggcagtgcaagagagatcctaaagaaagcaaagtcactgtggactgaaatgagctggcaaggttttctgagcgtggtgaaatatgatctgggcctcgcttgggagggctgtggccaggccttgagtccgtggctcagtgggaccttctgaaacagcctccaatccgtgcccccacttcatttgctagtggatgaccccctccagcggctttggtgctgatgggaataagtcaacctgcagcggaagttcagcccaagtttcagcccagcagcttctacacacctgtccgtggtctggtcatgctgccatctctgcggttctctgcggttctctgcggagtcgtggtttctgtaccttgaagagaacttcccctctgggacccagaaacccagtgaatcctcaggaaaaaagggaatgaaattactgaagacaactctgtggcggggagatggaaaagaggctctctctctttttttttcctaatattttgagacagagtttcgctcttgtcacccaggctgcagtgcagtggctccatctcggctcactgcaacctctgcctcccaggttcaagcgattctcctgcctcagcctcccgagtagctgagattacaggcacccaccaccactcccggctaatttttgtattttagggtttcgtcatgtttgccaggctggtcttgaacacctgacttcaaatgatccacccgcctctgcctctcaaagtgctgggaatacaggcataagacactgcacccggcctgtttttgttttttagagacaaggtctctgttgccttggctggggtgcagtggtacaatcagctctctgttgcctcctgggctcaagcaatcctcttctctcagcctcccaagtagctgagactacaggtgcat

SEQ ID NO: 1883056 - DNA, 4001 bp, Homo sapiens
aggggtgagccaccacgcctggcccccttccttcatcttagtcaatcctatgccacctcttctttctccagtcccctcacctgatggtcccaacacttcatcatccaccacctcctggagggggtaccctgaggtgctccgctgggggctccgctcttcctggggctgcggttgatggctcatcatgatctttcccaaaatctgtcccatctcaccaaacctagtctctgttctgtccttggtcttcttctggacactgctgggatccagaagagtgtgttatcaattctcgaggctgggagaagtcaggagtggagaacagctctgagaagttactgttgtccaactgaactcccaggtgccgacagagtccggtccctccaatcaggaaggtcggaatctctgatgtcatcgctcatgccaacctggcaaccagtttgaaaaaaaacacatgtaactgccaggctgatctcttgtcctggagatcctgggtgaatggtatctcctgccactgtcccaacctcagaccactgtccaaaagcatcttcagggtctccgcatccctctgttccctgtcccagcagaggctgtgtcctctccactcaaagcttgaagcgtgttggggtctcctcttctctgtacatgcccgtttcagagtccagtctggtgggagagggatcaggatgggaaagaaaagtagggtaagcagaaacgatgaaaccttacaagagtgagattatcatgtacaagagatcccaggaacattgacttgatgaaaaagtcacatcagagcactcaatttggcagaggttttctgccgaatgtctactgacattcactgtccgagattctgtactgggggtacacgcgtcctctgccctaaggcatctttgagtccaagagatactttgaggactggaaatcataggaaactgcccatgagttcacacatatttccaatggtgtccccaatttcagggagtccacggatcacctaaagccagcccctccagtttggctaagaaactctatatatcaagttttgtatcatatgtattgctcttaactcagaaaattccaccatttatagcagtggtttatttatttataccattgaaggaaatggtttatttatgaatctatattacggatattctataagatactgggtgtacaaaaagactaagtcgaaaaatctcagctgtgcacagtggctcatgcttgtaatcccatctctttgggtggccaagggaggaagactgcctgaggccagcagttcaagaccagtataggcaacatagcaagagcccatctctaaaacaaaacaaaacaaaacaaaacaaaattagccaggtgtcgtggctggcacctgtgttccaacaacttgagagactgaggtggcaggaggattgcttgagcctaggagttaggggctgcagtgagctgtgatcgtgacaccgcactccagtctgggcaacacagcaagaccttgtgtcaaaaaaaattttttaattaaatataaaagagtttcatgacattcagagaccatccaaagaacctgtgggttccggccaggcacagtggctcacgcctgtaatcccagcgctttgggaggccatagcaggtggatcgcttgaggtcaggagtttaagagcagcctggccaacatggtgaaaccccatctcttctaaaaatacaaaaaattagtcaggcatggtggtgggtgcctgtaatcccagccactcaggaggcggggacagcagaatggcttaaacttgggaggcggaggttgcagtgagccaaggtcacaccattgcactccagcctgggcaacaagagcaaaactacatctcaaaaaaaacaaacaaacaaacaaaaagaacctgtggatgagttcccacatggcttcctaacgggctgcggctctcctaggagtctctcgctcatgggaaaggcacaaactgaatgcggaaggaaatcccattgctgtggaagtcccattgttaggaagctctgcttttctggagttcaaatttgcattcatgacgctttaaaccgtcagagctgggtgtgtcctcctacaacaaatcactttactctctctcctagttaacaggctttcaaatattagaacatccatgttctgacctcattaaaattgctcttttgtggaatgaaaagctctgatttaacccgtctttaagcctggtatgcatattcctctctgttccggccaccttgtctagacacactacactgaggcagtgcccatcttagatgatgttgatacattgtcaaaaaatgggcaaaccaggtgcggcggctcacacttgtaatcccagcacttttggaagctgatgccgacagataaccagaggtgaggaggttgagatcagcctggccaacatggtgaaacctgtctgtttttctgtaaaaatacagaaacaatgagctgggcgtgggagtgcacttctgtaatcccagctacttgtggggctgaggcaggagaatcacttgaaccgggaaggtggaggttccagtgagccgagatcacgacactacactccagcctgggcgacagagtgagactccgactcaaaaaaaaaaaaaaaaaaaaaagtgccagacagcccaggtttggtctgatatgttcagaaaaaagcaaaacagtcacctctcaccttttcttttcctgcaatgatgccgtttaatacaacaatggctgtaggtctgcggcagaaatatcattcaagtgaaacagaagggctttcctggctggacacagtggtcactcctgcaatcccaacactttggttggctaaggtgggaggatttcttgcggccaggagttcgaggctgcagtgagctgtgatccaccactgcattccaggctgggcatcagagtgaggcctgtctctaaaaaaacccttcactccccaaaaaaagggattttcaaataccagcctttcagcatgaggatcacatggaggaacattaagacacagatgctgggacccagccctattgattgtaattaaaaaactgaggtgaggcctgatttagctccatcattggaatccattcagatttgaaattctctgagttgggcagtgcaagagagatcctaaagaaagcaaagtcactgtggactgaaatgagctggcaaggttttctgagcgtggtgaaatatgatctgggcctcgcttgggagggctgtggccaggccttgagtccgtggctcagtgggaccttctgaaacagcctccaatccgtgcccccacttcatttgctagtggatgaccccctccagcggctttggtgctgatgggaataagtcaacctgcagcggaagttcagcccaagtttcagcccagcagcttctacacacctgtccgtggtctggtcatgctgccatctctgcggttctctgcggttctctgcggagtcgtggtttctgtaccttgaagagaacttcccctctgggacccagaaacccagtgaatcctcaggaaaaaagggaatgaaattactgaagacaactctgtggcggggagatggaaaagaggctctctctctttttttttcctaatattttgagacagagtttcgctcttgtcacccaggctgcagtgcagtggctccatctcggctcactgcaacctctgcctcccaggttcaagcgattctcctgcctcagcctcccgagtagctgagattacaggcacccaccaccactcccggctaatttttgtattttagggtttcgtcatgtttgccaggctggtcttgaacacctgacttcaaatgatccacccgcctctgcctctcaaagtgctgggaatacaggcataagacactgcacccggcctgtttttgttttttagagacaaggtctctgttgccttggctggggtgcagtggtacaatcagctctctgttgcctcctgggctcaagcaatcctcttctctcagcctcccaagtagctgagactacaggtgca

SEQ ID NO: 1883057 - DNA, 4001 bp, Homo sapiens; identical to SEQ ID NO: 586990

SEQ ID NO: 1883058 - DNA, 4001 bp, Homo sapiens
aatttaagagtagttccatccattatgtatgccgtaataggccctatatgtgaaaagttaaaggagcttatttaattatgaaggaaactattatacaagtaagcaaaacaatttataataaaatattctttatgctcagaattttaaaaatagatgtagactggaaaacctgcaatttcctcattaccatctaatacatagaaagtcaaatcacttacggacagaaacagacttgaaaatttcagctgagaaaacattttagaataaaagaaacattttattcagcacagtcaaaacaaaacaaaaacaacaaaacaatgtttaaaatggactttctgttagaggtggccgtttcacagtcaaaattatcccagagaattgtttatattaaaaacaggctgagaatagtttgacctctgatcaccaaaaaacctggaggataaacattcatctgtcaagatttctctggaaaatccctgcgctgcttcaaagagacagaacaaaggtaaatagcatctgccacccaaatcttgctgaatagagtgatttatcttcaggcctactagccggcgacaggagcgcacctcctcccttctcctagctgtcccgggtttattcattccctgagcctgaatcctgataagggagcagagtagggtttaagacctcggaccccagaatacaccactgcaattgaattttggttccaccttaaggtaaactacgcagctgctgtgagcctcagtttccctacctatagaaagaggatcgtagtggggaattgttgcaggggttaaatgagattgtacggatcgtggagcagcgcctggcgtgtggtaaacgctcaacttatgcgggttgtaactgcctgaggcgtttccttcggcgcgccacttggccttctctttctaaatattagcataataaatataaatggacccagaacgcgagggggcaggggccacgtgatcgctccacgaaagccacttgtagggacctttagagagttagcaataaggctggagaaggaaaagccggcgcgcccgcggcccgcgcgatttcccgccgagcccgcgtccccggcggcgggcgggctccgggggcgcccgggccgcggcggcggcggcggcgcgagctgcgcctccgggccggtgaatcatcccggcagacaccaagagccgcggcagcagagaggagcgctgaaacatggctgaagcggccacgggctttctggagcagctcaagtcctgcatagtttggtcttggacgtatctgtggaccgtgtggttcttcatcgtgctattcctggtctacatcctgcgggtgcctttgaaaatcaacgacaacttgagcacaggtaaggcctgggagccgggcccgcggcgcccacccctcccccgccccggaaagttagtgcaactcgcgcggggccgcggccaggcgcgcgctcggggacgcgccggggcccgcgcaccggaggcccgcggctacccgccagcaacgcggcggcttaggcggcggggccgggcagctgggcgcgcgggggcggccggtggccttcacggccccgcggaggaagagctgcgccgcgcacagcccgcaaggcgggccgggccgggccggcagccgccctgctgcgtcgctggtggtcgggagacggagaagaacgggtgtcgcgggcgaaggagttcccaggacaccccctcgggtgtctgcgccggaactccgagggttccccggagttagaccgagtccttcctcacgccctcccggctgtgggtgccaagcggccgaagtgtggtcggggaggcgccctcccgcccggccgcggaggcccgagggcggctgccggagggtgctcggcggcgaagccccctgacccggccgggctgtccgggcggcgccctccgtggcccggagttgcgtcttgccgggcgtggggctgtctctctggttgggtagtggggagaggggttcccgaaggcactcttgggagtgtatggatgacgtgtcaggtcaccaaatggattgtcgaagggaccggagggaagaggggagagctggaatttctgagggtttcggttgcagttttcagtgatctttgctcgtctcccttccctgtaaagctacatatgctcagcaagtgccgcgtgcctcccatccttggtcggtggtaaatgcaggaggtaattaacaggatcttcacaaacttggagccagcccactgagtcgttaaaaaaacacccgcaaagaaaacacacgagccttaacactccagagagttccgaaacacaaagtaaatttcgagctaagggttacagtcctttaaatctggaaatttcaaggtagagtgtttttgtttttgttttaaattttaatttcacagtactgggaaattcttacagtcctgaagatatatacatatgtacacatatatatcttcccttgttaatctccatactctgggagtgcaagtctggaaatgcattttcctcaggtgtttagctgcattaaaacgctttttaaaacgcttgagataatgtactcattttgttaggaaacttgtacctttcagatactaacttaagtattttgattactaacttgaactcatgttcatatttacatttgttttgtagtatccctcgggatcgtgtccctgggaggcggataggattcagcactctagaattgtctcaccatttgaataggtgctgctcagcccttttgagtctgtcatcggaaagaccatggctttctcgcttttcatctttttggatggctgcttgtcgcaatattgtcttcttcgctttagacaagtatgtctccaggataccttctggtctcaaagttctatacctttaagaagttgtttgaatatatgttttaatggaattacgtatttgttggtaacagtgttagtctgttttgtgctgctgtaacagaataccacagattgggtaatttttaaagaacacattttatttcttgtagttcaggagtcagggaagtcttgagatcaagggactggcatgtggggaggtccttcttgctgtcatcccttggtggaaggtggaagggtaagagaacatgagaaaacaagagggggcccactttcacttttataacaaacctactccctcaataacaaaattaattcattcttgaaggcagagccttcatgacctaattaccactcacaggtcccacctttcaacacttttgcacttgggattttcaaacacactagtttttaaaatattaatgtttctccttattacacacttaaaattttatttcatgatatacatttgtatatcacattttcatcaggttaaataattacccatgtatatatgtgtaagtgtcacatccagtgctctgtgcagatcaggcaagaagcaaaatatctactgggaaaatgtgtacttcttaaggaagggcattgttaggtcttctagcaatttaaatctagcatttctcagagatgcctttgttaatttgtgtaggggcagttctaagagatagcgaaaatatgaagatgaacgtgccatccgggctgtaccttgctagacacatgatagaagacctgatgatgctggacttttcagtttggtttcatgctcatttcagtcataaagaaagataaaaggggaagcacacagagagcactcacctctctgctgtttttatgagagggtagcaggatctggggtgggaggaggactttggcattaattttgagacatgaaattatagccacaaaccaccctagaacagtttaggtttttcaaaaaacagttgcagacattagaggcctattttcttcccttttaagtaacagtgagaagttatagtaggaaaactgccaaaaggttgttgtcaacttaattccctcctttccttgccaattcccctcccctttgggaaaaagtttctgtactgaagttattggcaaggaaggcccagggagaaagaagtcattagccagcacccctgag

SEQ ID NO: 1883059 - DNA, 4001 bp, Homo sapiens
cagtatgaagacaagaacaaatgggagtgtccttttataccactcactccagccaccccataagagcatgtaatagctctctacagtgacactgcaccttgcaagaactgagcaatccaaacatttcaattccccagagcaccaagcactaagtaagaaaaaaaggccagtgcgtatagtacatacagataagcataaaataattaccaagggaaggccttacctttggccctcaaacacagctgttattttacgtagttccagtgcacatcttttagggctgtacttagcacccttctcaaggaaacattcctttatgcacactctgtcactcactccatccagcccatggctgagttaagagtactagctctatatttccagcaacaccagaattataattgcctgccaatttgtctccatgtctgcttctcccacaaaacctagagctccttgaggataagaactatgtatatatcatatatctttgtatcaccagtgttttacatagtacctggccacacgttgaatatgaatatctattgaatggccaaagctggtcatgcgcctttgaaatcacaacagatttttaagtagcacattgaggagaaaaggcagtttgaagcaggtacacaacaaataataatagttaatatctgatagtgtgtcaggtgacaaaaataacatgaagaagacttaaaacaaaacaaaacaaaaaaaaacctgtgcgggattacttacttttggaggcaataacctagagcacttcaacagtttgttttttgtttttttgtttttttttttttttgagatggaatctcgctctgtcgcccaggctggagtgcaatggcgcgatctcggctcactgcaacctctacctcttgggttcaagcgattctcctgcctcagcctcctgagtagctgggactacaggcacccaccaccacgcccggctagtttttgtatttttagtagagacggggtttcaccatattggccaggctggtcttgaactcctgaccttgtgatcctcccgcctcggcctcccaaagtgctgggattacaggcatgagccaccgcacccggcctcaacagttttttaaaaaactttcttgcatgctaacacagtactgtagtttacattcattttgatgacttagagttaccagtcaaagattgaaatatgttctggccattctttttaagggtgaagtcaagtatgtaatgcattttggaaagattccgttgtgaaattgtttttaaaagtgtctggtttaataggataaaaccttaactatcccacatgactaatttctgagggttctacatagccatagtcttgctatatgaggataatataagtatatctgggaccatcttgatttattaatgtgtagtagtcattgagtcttcctaatatggacttcagactgtacaggtagtctaaggatagaaacacacacacacacacagacacacacacacacacacacacacggcaaagtcccagccatcaaagacttgtagttttgtcagatttatattttcttatgaaggttattatcagaagtcctgggaaatggttgttataactttcctacctagaactctgccccttgtagtcatttagcgtttatcaaacattgagtactgtgtggaccaggctctgtgctgggtgctctgtgttggctgatggaggattgagacacagtgtgtgtgcttgtagggaagaggttcccagagcctggagcaccttgtcttagcaaagtttctatttctcttcaatgtaactatgtggaaggtttgctttgtgtacaaatagacatttattttttcttcctggtattaaatagtttatgagaaacagacaaacttgtaaaatagtcttcaatcataaatgaaagcatattttaaataattaaaaatataataagacttacttaggtctttcctctgttcttgaccagggtggagatcttcattatcaagtttcctgtaactaaaagggaacagatcgtctgagatcttgctccacttgtccttgagggttattaaggtttgtgtgtgactgggcgttggatggtccttcatgatatcagggaaggttgacagatggcctccctccagcaagggagaaggtgccatgaagactgaacactgcattgttcccaccaatacagtttgcgccagtatagtttcccagaccacaactgaggaaagaatgtgctcagctccactcctcagcagagccagatgcccagtacagcagaaacagtgtacctgtaaagttgcctaggcgacatcgggagtggaaggaagagtagacagaatgatttatgagggtttcttgccataggaatgggtctaaaattatacttccatgtcttttcctcaagaataaatgacacaggatttatcaaggggattgtgatacataaaacctcaagaccttatcagaccccaaggagaccagggccaagggcaaggagaggggcagcagaagcaacaaatgaggaaaagaagtgctcgtgctgtgcttttaatccttgatcgaactgatgctctgccttgatgtaaaactgatttttaaaaaacatgcaaatattgtgtatttaaaataggactagaaaaaaaaccacttactgggtgaaatgaagatattttatttccatattaaaaaaacagctcctctcagcatctactttagtattagcacatttgcaaagacagttacatgccagcatgtgaaatagcatgtcatggtagcagagggagaacttgtattttatttatgaacaatcgggaaagaaacgctcggggcacatagagttggtgtatcttagcaccctttctcggcatactgcaattagccagcattatcagatgtcaatgttgatttttattttcatgaattattatgttggtgatggtatcagttttatattgctgcctaacaaatttccgtaaatatagcagtttaacacacacttcttatctctcagtttctgtgtcaggagtccaggcatggcttagatgggtcttctgctctgggcctcacaaggctataatcaaggtgttgaccaggctgctatctcaattgcaagttcagtcaggggagaatctgcttccagtctcactcaggctgttggcagtaatcattgctgtagcactgagggcttgagtttctgactggctgttgtagaggctgcctgtggtccacgtggccacttcattaagccagtaaggaggatctctctgtctgccaccaacatagaatcttacatagttgtttgttagaagcaagtcccgtactccatgtcccacccacattcaagggaaaggggtcacataaagttatgaataactgggtgcctgtagtcccagctactcgggaggctgaggcaggagaatggcgtgaacccgggaggcggagcttgcagtgagccaagatcacgccactgcactccatcctgggcgacagagtgagactccgtctcaaaaaaaaaaaaaaaaaaaaaaaaaagaagttatgaataccagccaaaaaaaaaaaaaagaagttatgaataccagcagagcagggatcgttggagtcactttagcgtttgtctgtcacagggtcattctgaggaaaagttctttcattttaaaagctgtgcaatctggaaatctgtttgaaattagcaggagtgtaaactaagccattagagcttccatttttcattcccttgtcctttggtaaatgaggaagggcagaagtaaagttgcagccttacttaatagatgctgacaggaaggaagagagaagttagtaaggttgaaagaacaatgaaatgagagaagatgatattctctattatcacatggaaaaatacaaatgatggattaaactattccggtgtgttccctaccttactttggaggtctgagaaaacagtctgaggcgaagtccctgctagactaacttatctcgtaatgtgctttctatagaaaagcacatt

SEQ ID NO: 1883060 - DNA, 4001 bp, Homo sapiens
ctcatttaattttcctaacaacccttgacattggtgcttgttaaaggtcatgtaacaaggtagtatttctgagagtgtggtctacaaccacctgtatcagaagtgcccagggtgctagtttagtactcacctcacagggtagatgtcaggattaaacgggataattcaagcaaagtacttgggaccagacttcatgagtaataacgactcattgttgctgttcttactgttattgtccaagagatattgttaagtgaagaggaaaagtataaacataggtataatttgattccattttttcaattaaaaatatatgctaatatagactaatagttctcaaacttcttggtctcagaacacctttaaaataattgaggatccccaaaccttcgtgtgcgtttacctgttgatatttaccattttagaaaattaaaactgagaaatttgaaaagatgttaaaataatggttacaaatacattatatgttaatacaaataacatttttgtgaaaactaactatattgttcaaacaaaaaaataagaagagtgacattgctgttatacttttacaaacctctctagtgtccagatgagcaggaggctggaggctaatatctgcttctgtattcagtctatggtgatattgcccaacaggtgacctcttggagtgggagagggagagtgaaaaaggcaaagaaaaattttattattatgaaaatagttttgatctaaggactccccgaaaagatgtcagacactcctcagtggctcacacttgtaatcccagcactttgggaggccaaggcaggcaaattgcttgagctcagcagttggacactagcctgggcagcatgatgaaaccccatctctaccaaaaaaaaaaaaaaaaattagttgggcatggtggtacatgcttgtaatccccagctacccaggaggctgaggtgggaggatcacctgagcctggtaggtcaaggctgcagtgagctgtaatcaggccactgcactccagcctaggcaacagagtaagaccctgtctccaaaaaaaaaaaaaaaaccaaaattctgggggttccctaaccatacctccaggggttccctgaccatgccttgagagtcacttgtataagcataaggaaaaaccttgattatagagaaagtctttagcattaaaattatagctgtctattttttgtatttaggtaatgttgagtattatatgtgctacttgtattttcttatgatgataaaagtaaaatttaaaaataaagattgagaccactttcaaaagaacaaagtagtggatgcaaaaaaggtagaaaatggccaggtatggtggctcacgcctgtaatcccagcactttgggaggccgaggcggggcagattgcttgagcccaggagtttgagaccagcgtgggcaacgtggtaaaaccccatctctactaaaaatacataaattagccaggtgtggtagcacacgcctgtggtccgtggtcccagctgcttgagaggctgaagcaggaagatctcttgggcctgaagttaaggctgcagtgagccatgattgtgctactgcattccagcctgggcaacagaatgagaccccatctcaaaaaaaaagtagaaaatggggtagacacagggaaatatggatgtggtgaagaaaaacttcatccacctagaattttagcgtaaaaccagacctgtgactagtttattcccaggcatattagtttcctggaactgtgataacaaaatgccccaaactagatagtttaaacaacagaaatttattctctcacaattctggaggctaggagtccaagaacaaggcaggtggcagagccgtcctccctctaaaagctctagggagcaatccttaattgcctcttccagcttctggtgtttgctagcaatctctgacattcccttgtagctgcattaccccagtctctgcctgtcttcacatggctttctccctgtgtgtgtgtgtttctgtgtatagatttccctcctgtcataaggatataagtcatattgtatttatgacctcatcttaagttgattgtttctgcagaaacactatttctgatagggtcacattcataggtactgagggttaggatctcaacatgtctttctgggggacataatttaacccacaatagcaggtcatatataaaagcaaaatacagataccctgtataaatttacattcttctaaaacttcactgctatatcaggtcagctaaaaacatgttttgtatgcctttgaccatgttaaacccactctcagcctagcctgtaaagatgatagctgctaactaaccctctgtgttcttacatttggctcctttaaaaaaatagtcagagggagctccttgtgtcctttctgcattttcatcatcatctacaggattcccagctgagaactacagggtttttagtttttatcaataacctacagagtgagtattacatgtgccatacattctgctaagaaatttacaaatactgtgtcatttaactcacacataccatgagtgtcctataaaattacaaaagtaatttatgctcattgtgacaagtcaaagaattgaggaagttgtgatatcacctacacttctacagtgccatcgcactgtaaaggcatatgtgactgaagactgaaggagatgccaaagttagtcatgtgatgtattttcaaaggccctgaggcagcagtatgtctggagtgttcaagcaacagcaaaggaatcttgggtggatagaacagaataagcccaggggagagaagggagggagcttaaagatcatacagggcttattgatcacagtaaggatttcagcttttactctgggtgaaatggagagctttgcaaggttttgaacagaggagtgacatgaccagtcttaatttttacaggctgctgtgtagcagcagagaagcggaggagtcggtcagcaggctcttgtattaatcttggcaagccacaatggcagctcaggccagagtggtagcagagaaggtggtgtgaagtgatcagattctagatatattttgaaggcaggactagcagaatttgctaattaatcagatatgcagtacaagaaaaaagagaagtcagggctgattctaaatatttgccttgaaagggaaggagtttgtgtcagctaagatgtggaagtctggggtgagagaggttttttgagagaaaattacgagttcagttttgaacatgttacatttgagagagcacctattcattgttatcttaagtagtgacttcttgatctttttgtggactatgacaaatgtatactttgttgggacattttgggggatttgattagatccctcttaaaatatagttggtgaggaacttcaggaagataaaatctaattgatttcagagaaactgtgactataacagtctttgcagaatacagaatgtagtgtcttgtgtgtttaatttatatgtctatagatctctgcttcttccctgttttactcaacactgtttttcaatctgtccatttttgctctatgtacctcttgcatctagtttgcagtttctaactgctgcatcatattccatgttgtgttcttactctattttacttaacctttcctctagtgaaggaactccaggtttcttccaacttcctgttatcccagcagtgctgcaatgaacatccttgtagacatgtgagaaacattcattaggctgtgggattatatacgtgctagattccagtgagtcctgcaatttcactcttcagaatggctgcctatgattaaattcttacgagcaatacctgactatgcccatgtatctcagtactaggctctgcttcaagcacgtctatatttaatatacatatttatatattttaaaaatttattacatatagcttttcatgatgttatttcataatttaaaaatactatgtagtttttttcttccttttcattttgtattttatttggctagttttt

SEQ ID NO: 1883061 - DNA, 4001 bp, Homo sapiens
cattaccacagaggaactccctggtgctacccctttatatttgtaccctccctgtccttcctcaaacatgtcccctggtgatcactaatctgttctgtacagttctgtctgcctgctatgacttcatgcttttatcactacggaaatggataaaatgataagatgaatagagtagctaccagtagtgattgaaatggtggcaataagaacaaatcatccgctttccaatattgcctgtaatttattcagaaattttattttgaggaagcaactcaaaatcattctaagttagtttgattttgtatgaacacactgactctgcagtgcccttctgacttttgtaagtggcatttagctagctacattattacctcttacgagttagaatccaaagagcaaacaaaaggaaaggaaataatgagatatcacataattccattactcactgcagaaacaaggaacgctaagtaaatgtttctcacttagtcaaagctgaactgctggcattaatttttcttccacctctttgccatcttatgttttatagaaatgttttcctgaaaggagaagaaatttccccaaacatcttaggcatgcaaaatcaaattgtcatgaaagcctttcattaaaagttataatcctgaacttcacacaaatggaatcagactcatttttgtactcatttttgtctggttcctttcactcagcacattgtttttgagattcatccatgttgtagcacgtgtcagtcattcattctttttcattgctgagtagtatttcattgtgtggatacaccacatgtttatctatcctcttgataaaggacatttgaattgttttcccactttggactattatgaagaaagctgctgtgatcatttttgtgtaagcgtaagaaaactcatttctcagggatatgtaactaaaaatgggattgctggatctgaagatagatgtctgtttaactttattggaaactgttagacagtgttccaaagtggttgcatgaagtttgcaaaactaatatattgtgttcaaggtaaggaaagtggttactgctgggctggagggcagttattggctagaagggagtatgaggcaaccttctaagatttcaggaagttctgtttcattctgggtagcagtcacatgggtatatacataagtgaaaaatcatccctctgcacttaagagttgtacctgtaactatatgtaattgatgcctcaattatatatatataatttttttttttttagacagagttttgctctatcacccaggctggagtgcagtagcacaatctccctcactacaacctccacctcccgggttcaagcaattcttgtgcctcagcctcccaagtagctgggactataggtgcacaccaccacgcctggataatttttgtatttttagtagagacagggtttcaccacgttggccaaggtagtctcgaactcatgtcctcaactgttctgcccaccttggcctcccaaaatgctgggattacaggcatgagccaccgcacctagccaataaaaaattaaaacaaacaaacaaacaaacaaacaaacaaaaaaacctaaaatcttgtggtcacctgaagatgtcttatcttaccaatctgacctccataacattttacttgccttttatcattctgccccactccattctctccacaaatccttatctaaaaatcacttacaccttccataagaaaacagaatctgattattgttcgtcaatctttcaagaattaagatggttaacatatctcttctatagcaatcttctgtaggataaatacctccagttcctcaactgacatattcttcagaacttctcatctatttttattacctggccacatgtgatttcaaaatatgagaattagaaatgaaaacaatcctctaaatcccccaaactgaccagtagagagctcagggaaaacgtgcagtctgaggagctgtgccactctacgtctctgaataccagctagaacggccctggtgttgagcagctgggactctgtttgttcctatgattgtgtggtcaacaataccccccacctccaattctattcaaatagacttcagctaaagtcaggtcttttctcccttttatgtaagccatgaacattaaaaaataaaaataaaaacatacaggcaggatttcacatctgattccattaaatttcaaatcttaaaattaaatctgagccattaaatcttaatagtttcagtacgtcattccagcttattagtcatttttctgattcaagctaccatgcacagctttgctccctccatatcttcttccctaaatgaccattatcatcatcaaaatgactgccaacacttactaaaggctaacttccaggcactggtgttaatcagttatatacattatcctatttaatcctcagagcagtcctatgaggtaggactgttagccctgttttatagatggggaaaatgaagcacagaatggttaagaaatatgccaatatcacaaatctagaacaaatctgagcacatgattttaaactgtgctatgtgtttccaagatctgatttttagaaatactgaccatggcaataccaatgagagaatctgggaataggattctagagatcaccctcaatttgcaacagtctgcaatgatatgtctgcaaccacttattaattaggtattatatccatattcctccatggtacctgaaaggacagcatttaaaatattaccaaatgctttgtttaaataaagatgtaaacacatttatggtattctcctatttcagaaagacaaaggaaaagggccatttacactaataagataaacatttaaatactattgtatagacaaacagtattttcatatccactatctcatctgtgtttatttgacacaattttttcttaataaatctattgttagatccccaatcaccatcttttttcctgtggtcaaaaaccacataattatttccaggatttgcttgggattgacttgatacattcttttaaaaagtaaaaaatactaaagggaaatataaaataggaatgaataattatacctcagcaacgtattaatacaatattttctgctcaaaacagtactaccacaagatacagacgaaaaactgaacaacagtacaggactgccaaggtcaacctcccaaaatctttttcttttataggtgagaaatatgggcccagcaaagttaaacgattttcttaagagccacctaacaaatgagtggcagaactgaacctgcaataccatgtccttgtcactatcccataatgttagtgtgatacctgcttttactttccctatcatcattcttcactgtttttttggacaatagagtcatacattaaatcctgtaatgtgggagactttagcttcctctggtgtttagccaccctgaaaacctgcttctaagtttatacctgacttgtacgtacttatttagctatctgtcattctgatctttttgtacactttaatcatttatatttccttacacttttatctattgggactaattgcaatttcaacttttagtctttcatccttcacgaaccattttccagttttaaaaaaactctctgtatctcctatgccaaatagtctcagcataaagtaagttatattaattgaaattccatttgtggtttcatatttatctttcctctgaattaaaataaacaaataaaaggctgggcatggtggctcacacctgtaatcccagcactttgggaggccaaggcaagaggatcacttgagcccaggaattcaagaaacaacctaggtgacaaagtgagacctcatctctacaaaaaatagaaaaaattggccaggcatagtggttcacacctgtagtcccagctacttgggaggctgaggtgggaggatcacttgagcatgggaagttgagactgcagtgagctgtgatcatgtcactgtactccagtctaggcgacagagc

SEQ ID NO: 1883062 - DNA, 4001 bp, Homo sapiens
gtacagcccggatggcacgttcatcttcatattttcgctatctcttagaactgcccctacacaaattaacaaaggcatctctgagaaatgctagatttaaattgctagaagacctaacaatgcccttccttaagaagtacacattttcccagtagatattttgcttcttgcctgatctgcacagagcactggatgtgacacttacacatatatacatgggtaattatttaacctgatgaaaatgtgatatacaaatgtatatcatgaaataaaattttaagtgtgtaataaggagaaacattaatattttaaaaactagtgtgtttgaaaatcccaagtgcaaaagtgttgaaaggtgggacctgtgagtggtaattaggtcatgaaggctctgccttcaagaatgaattaattttgttattgagggagtaggtttgttataaaagtgaaagtgggccccctcttgttttctcatgttctcttacccttccaccttccaccaagggatgacagcaagaaggacctccccacatgccagtcccttgatctcaagacttccctgactcctgaactacaagaaataaaatgtgttctttaaaaattacccaatctgtggtattctgttacagcagcacaaaacagactaacactgttaccaacaaatacgtaattccattaaaacatatattcaaacaacttcttaaaggtatagaactttgagaccagaaggtatcctggagacatacttgtctaaagcgaagaagacaatattgcgacaagcagccatccaaaaagatgaaaagcgagaaagccatggtctttccgatgacagactcaaaagggctgagcagcacctattcaaatggtgagacaattctagagtgctgaatcctatccgcctcccagggacacgatcccgagggatactacaaaacaaatgtaaatatgaacatgagttcaagttagtaatcaaaatacttaagttagtatctgaaaggtacaagtttcctaacaaaatgagtacattatctcaagcgttttaaaaagcgttttaatgcagctaaacacctgaggaaaatgcatttccagacttgcactcccagagtatggagattaacaagggaagatatatatgtgtacatatgtatatatcttcaggactgtaagaatttcccagtactgtgaaattaaaatttaaaacaaaaacaaaaacactctaccttgaaatttccagatttaaaggactgtaacccttagctcgaaatttactttgtgtttcggaactctctggagtgttaaggctcgtgtgttttctttgcgggtgtttttttaacgactcagtgggctggctccaagtttgtgaagatcctgttaattacctcctgcatttaccaccgaccaaggatgggaggcacgcggcacttgctgagcatatgtagctttacagggaagggagacgagcaaagatcactgaaaactgcaaccgaaaccctcagaaattccagctctcccctcttccctccggtcccttcgacaatccatttggtgacctgacacgtcatccatacactcccaagagtgccttcgggaacccctctccccactacccaaccagagagacagccccacgcccggcaagacgcaactccgggccacggagggcgccgcccggacagcccggccgggtcagggggcttcgccgccgagcaccctccggcagccgccctcgggcctccgcggccgggcgggagggcgcctccccgaccacacttcggccgcttggcacccacagccgggagggcgtgaggaaggactcggtctaactccggggaaccctcggagttccggcgcagacacccgagggggtgtcctgggaactccttcgcccgcgacacccgttcttctccgtctcccgaccaccagcgacgcagcagggcggctgccggcccggcccggcccgccttgcgggctgtgcgcggcgcagctcttcctccgcggggccgtgaaggccaccggccgcccccgcgcgcccagctgcccggccccgccgcctaagccgccgcgttgctggcgggtagccgcgggcctccggtgcgcgggccccggcgcgtccccgagcgcgcgcctggccgcggccccgcgcgagttgcactaactttccggggcgggggaggggtgggcgccgcgggcccggctcccaggccttacctgtgctcaagttgtcgttgattttcaaaggcacccgcaggatgtagaccaggaatagcacgatgaagaaccacacggtccacagatacgtccaagaccaaactatgcaggacttgagctgctccagaaagcccgtggccgcttcagccatgtttcagcgctcctctctgctgccgcggctcttggtgtctgccgggatgattcaccggcccggaggcgcagctcgcgccgccgccgccgccgcggcccgggcgcccccggagcccgcccgccgccggggacgcgggctcggcgggaaatcgcgcgggccgcgggcgcgccggcttttccttctccagccttattgctaactctctaaaggtccctacaagtggctttcgtggagcgatcacgtggcccctgccccctcgcgttctgggtccatttatatttattatgctaatatttagaaagagaaggccaagtggcgcgccgaaggaaacgcctcaggcagttacaacccgcataagttgagcgtttaccacacgccaggcgctgctccacgatccgtacaatctcatttaacccctgcaacaattccccactacgatcctctttctataggtagggaaactgaggctcacagcagctgcgtagtttaccttaaggtggaaccaaaattcaattgcagtggtgtattctggggtccgaggtcttaaaccctactctgctcccttatcaggattcaggctcagggaatgaataaacccgggacagctaggagaagggaggaggtgcgctcctgtcgccggctagtaggcctgaagataaatcactctattcagcaagatttgggtggcagatgctatttacctttgttctgtctctttgaagcagcgcagggattttccagagaaatcttgacagatgaatgtttatcctccaggttttttggtgatcagaggtcaaactattctcagcctgtttttaatataaacaattctctgggataattttgactgtgaaacggccacctctaacagaaagtccattttaaacattgttttgttgtttttgttttgttttgactgtgctgaataaaatgtttcttttattctaaaatgttttctcagctgaaattttcaagtctgtttctgtccgtaagtgatttgactttctatgtattagatggtaatgaggaaattgcaggttttccagtctacatctatttttaaaattctgagcataaagaatattttattataaattgttttgcttacttgtataatagtttccttcataattaaataagctcctttaacttttcacatatagggcctattacggcatacataatggatggaactactcttaaatttttactaattccagcctctctcggctactgtttcttcctcacatttgatctactacagtgagatccaggccagaataagtgaaattggcacacatagactttctttatagttatttatggcagcacatgaccaaatgatttttgtgtctaacactgatacatggaatctcagtaaaataaaacaatattgtcaccagtaaaggatcgtgactgcaggttgtccaggttcttggcgttttgaacaaagaattggacaaaacacccagagaagcgacaaaagaacgaaagcagggatttattgaaaacgaaagtacactctacattgtgggagcgggcggagcagcggctcaaaggccgaatacagaatcttcttgggtccaaatacccccaagaagtttccctttggcaactcatgctcatctcacgtaaatgaagt

SEQ ID NO: 1883063 - DNA, 4001 bp, Homo sapiens
aactatgttgtttaggtgccgggcacagtggctcacacctgtaatccagcactttgggagttcaaggcgggcggatcgcctgaggtcaggagttcaagaccagcctggtcaacatggcaaaaccccgtctctactaaaaatacaaaaattagccaggtgcagtggacagtgcctgtaatctcagctactcatgaggctgaggcctgagaattgcttgaacccaggaggccaaggtggcagtgagctgagatcatgccactgcactccagcctgggtgacagagtgaaactccgtctgaaaaaaacaaaacaaacaaacaaacaaaaaaccagaccacattgtttagggatacttagctgacaaaataatagagacaagcatgacataattaccataaaaatcaggccctggggtgctggtggggaaggtttaagtggaaagaatggagcggtgacaatgtgtgtcaacctgggaggtggtgaccctggggttcgctttgtaattcctcaaaatgagcatttatgtgctattcacttttcagaggatagaattctgaactaaaatgtttaagcagccatacgcaaaaaaaaaagaaaaaatatggatagatttttattttaattaaaacatttaaaaaatagagacaaggcagctgggcgtggtggctcacgcctgtaatcccagcaatttgggaggccgaggcaggcgaatcacgaggtcaagagatcgagaccatcctggctaacacggtgaaaccatgtctctactaaaaatacaaaataaagttagccaggcgtggtggcgggcgcctgtagtcccagctactggggaggctgaggcaggagaatggcgtgaacccgggaggtggagcttgcagtgagtcgagatcaggccactgcattccagcctgggcaacagagcaagactccaactcaaaaaaaaaaaaaaacatagagacaagggtcttgctatgttgctcagggtggtctcaaactctccgggctcaagcaatcctcccgcttcggtctcccaaagcgctgagattccaggcgtgaaccaccgcgctcgaccaggaaaaaaatatatatatatataatatacaatatattttataatatattatgtcatatattacacataatatacaatatgtataatacgcataataaaggtatatttaatatatataaagatatatatgtatataataatttttttttttgagacggagtttcactcttgctgcccaggctcgagtgcaatggctcgatctcagctcactgcaagctccgcctccagggttcaaaccattctcctgcctcagcctcccgagtagctgcgattacaggcgcccgacacacgcccggctaatttttgcatttttagtagacacggggtttcaccatgttggccagactggtctcgaactcctgatctcaggtgatccgcccgcctcggcctcccaaagtgccgggattacaggcgtgagccacggcgcccggcctgaataaatcttttaaaacataaaaatctgggtaagcccctggccggccggcacagatgccggggtggggccgcgaatcggttgggacgcactctatccggcctaggggcacccgggccagcacccggccgccgcgcgtgcgcagtgggcggggggccccgcgctcctacctgcaagtggccagtgccaagtgctgggccgccgctcctgccgtgcatgttggggagccagtacatgcaggtgggctccacacggagaggggcgcagacccggtgatagggctttacctggtacatcggcatggcgcaaccaaagcaagagagggtggcgcgtgccagacaccaacggtcggaaaccgccagacaccaacggtcggaaaccgccagacaccaacgcttggaaaccgccagacaccaaggctcggaatacacgccagaccacgacggagggcgaccacctcccttctgaccctgctgcgggcgttcggaaaaaaaaaaaaaaaaacgcagtccggtgtgctctgattggtccaggctctttgacgtcacggactcgacctttgacagagccactaggcgaaaaggagagacgggaagtattttttccgccccgcccggaaagggtggagcacaacgtcgaaagcagccaatgggagcccaggaggcggggcgcctgtgggagccgttgagggcactttcccagtccccgaggcggatccggtgttgcatccttggagagagctgagagctcgaggtgagctgggctcgcggtcgcccctctcgcgcgccctctttgagaaccacggcttccaacctccctggaaatggggggaacatggccgaggcgcgtgggaggccgcctcgtggaggccccggagcggcatcctcagcgccccagcgatccggtgcccattaggtgcgccttgaagccgaggcaagctccttcggggtgctgggctgcgggcaaagaattcggccctgtgaagagttgggttcggcctgtctcaggccctgcccacatcccatcacagggccgtggacttgaagccggaacgtgaaatccccatagactgaatgcatttcctttctacctgttctctctccccttttatttttatttttatattattttatttttaatttttattttatttttttgtagagacggggatttcgctatgttgcccaagctggtctggaactccggagctcaagcagtccgcccgccttggccccccaaagcgctggaattacaggcgtaatgcactgtgcctggccttttaaaaaaaaattgaggttattttggggacagtagagcgtccagacacatcctaatttgcgtagctgctcagttttaaaaaatgcaatgcatttttacctgttagggtatgtgatttctggctggtaagctacaccgaatcttggctagcacagttgaattccatgtcagatttgtaaacgcaaatttgctctctgcatttaaatatattagatatatttaggtaactacatttaaatgtattgagacatttaaataaatttgccgtctgtatctaaatatctgaagtggaccaggtgcggtggctcacacctataatcccatcactttgggaggccaaggcaagtggatcatgaggtcaggagttcacgaccagcctggccaacatggtgaaatcccatttctactaaaaatacaaaaattagctgggcgtggtggcaggcgcctgtaatcctagctacttgggaggctgaggcaggagaatcgctggaacccaggagacagaggttgcagtgagctgagattgcaccactgcagtctagcctgggtgacacagcaagactccatctcaaaaaaaaaaagaaaaaaaatcagaagtgaacctgtagcctgtagtgtgttgccaaataaacttatttttagagatacttctttccattttctgtgaggtcatctgcagtttcacatggtagacagacttaggtgagattcttagcaacatagaatgaagagtaaagaggtttgtttatttcacaagggtttattgaaggcctacgatgtgttaaatgctgtaggaaatacccactgatttctcttttcatggaggtttcccgccttctcttaacgagtgatcaattaaactgtttactgggaacttgctaagttaatgaacacacgggatacattctttggatgagcagacattggttgggcagaggggcaagaggagagcagtttagacagagacctgcttatacactgtagtgtctaagagagcttgtgatgttcaggaaacagttgttcactgtgctgcaatataggggacggccagttgcggtggctcacacctgtaatcctagtgctttggaaggccaaggcgggcagatcacctgaggtcaggagttagaaaccagcctggccaacatggtgaaaccccatctctactaaaaacacaaaaattagctgagtgtaatggtggatgcctataatcccagcaact

SEQ ID NO: 1883064 - DNA, 4001 bp, Homo sapiens
aatccagcactttgggagttcaaggcgggcggatcgcctgaggtcaggagttcaagaccagcctggtcaacatggcaaaaccccgtctctactaaaaatacaaaaattagccaggtgcagtggacagtgcctgtaatctcagctactcatgaggctgaggcctgagaattgcttgaacccaggaggccaaggtggcagtgagctgagatcatgccactgcactccagcctgggtgacagagtgaaactccgtctgaaaaaaacaaaaaaaacaaacaaacaaaaaacctgaccatattgtttagggatacttagctgacaaaataatagagacaagcatgacataattaccacaaaaatcaggccctggggtgctggtggggaaggtttaagtggaaagaatggagcggtgacaatgtgtgtcaacctaggaggtggtgaccctggggttcgctttgtaattcctcaaaatgagcatttatgtgctattcacttttcagaggatagaattctgaactaaaatgtttaagcagccatacgcaaaaaaaaaaaaaaatatggatagatttttattttaattaaaacatttaaaaaatagagacaaggcagctgggcgtggtggctcacgcctgtaatcccagcaatttgggaggccgaggcaggcgaatcacgaggtcaagagatcgagaccatcctggctaacacggtgaaaccatgtctctactaaaaatacaaaataaagttagccaggcgtggtggcgggcgcctgtagtcccagctactggggaggctgaggcaggagaatggcgtgaacccgggaggtggagcttgcagtgagccgagatcaggccactgcattccagcctgggcgacagagcaagactccaactcaaaaaaaaaaaaaaaacatagagacaagggtcttgctatgttgctcagggtggtctcaaactctccgggctcaagcaatcctcccgcttcggtctcccaagcaatcctcccgcttcggtctcccaaagcgctgagattccaggcgtgaaccaccgcgctcgaccaggaaaaaaaatatatatatatataatatataatatattttataatatattatgtcatatattacacataatatacaatatgtataatacgcataataaaggtatatttaatatatataaagatatatatgtatataataatttttttttttgagacggagtttcactcttgctgcccaggctcgagtgcaatggctcgatctcagctcactgcaagctccgcctccagggttcaaaccattctcctgcctcagcctcccgagtagctgcgattacaggcgcccgacacacgcccggctaatttttgcatttttagtagacacggggtttcaccatgttggccagactggtctcgaactcctgatctcaggtgatccgcccgcctcggcctcccaaagtgccgggattacaggcgtgagccacggcgcccggcctgaataaatcttttaaaacataaaaatctgggtgagcccctggccggccggcacagatgccggggtggggccgcgaatcggttgggacgcactctatccggcctaggggcacccgggccagcacccggccgccgcgcgtgcgcagtgggcggggggccccgcgctcctacctgcaagtggccagtgccaagtgctgggccgccgctcctgccgtgcatgttggggagccagtacatgcaggtgggctccacacggagaggggcgcagaccccgtgatagggctttacctggtacatcggcatggcgcaaccaaagcaagagagggtggcgcgtgccagacaccaacggtcggaaaccgccagacaccaacggtcagaaaccgccagacaccaacgctcggaaaccgccagacaccaacgctcggaatacacgccagaccacgacggagggcgaccacctcccttctgaccctgctgcgggcgttcggaaaaaaaaaacgcagtccggtgtgctctgattggtccaggctctttgacgtcacggactcgacctttgacagagccactaggcgaaaaggagagacgggaagtattttttccgccccgcccggaaagggtggagcacaacgtcgaaagcagccaatgggagcccaggaggcggggcgcctgtgggagccgtggagggcactttcccagtccccgaggcggatccggtgttgcatccttggagagagctgagagctggaggtgagctgggctcgcggtcgcccctctcgcgcgccctctttgagaaccacggcttccaacctccctggaaatggggggaacatggccgaggcgcgtggcgaggtcacctcgtggaggccccggagcggcatcctcagcgccccagcgatccggtgcccattaggtgcgccttgaagccgaggcaagctccttcggggtgctgggctgcgggcaaagaattcggccctgtgaagagttgggttcggcctgtctcaggccctgcccacatcccatcacagggccgtggacttgaagccggaacgtgaaatccccatagactgaatgcatttcctttctacctgttctccctccccttttatttttatttttatattattttatttttaatttttattttatttttttgtagagacggggatttcgctatgttgcccaagctggtctggaactccggagctcaagcagtccgcccgccttggccccccaaagcgctggaattacaggcgtaatgcactgtgcctggccttttaaaaaaaaattgaggttattttggggacagtagagcatccagacatatcctaatttgcgtagctgctcagttttaaaaaatgcaatgcatttttacctgttagggtatgtgatttctggctggtaagctacaccgaatcttggctagcacagttgaattccatgtcagatttgtaaacgcaaatttgctctctgcatttaaatatattagatatatttaggtaactacatttaaatgtattgagacatttaaataaatttgccgtctgtatctaaatatctgaagtggaccaggtgcggtggctcacacctataatcccatcactttgggaggccaaggcaagtggatcatgaggtcaggagttcacgaccagcctggccaacatggtgaaatcccatttctactaaaaatacaaaaattagctgggcgtggtggcaggcgcctgtaatcctagctacttgggaggctgaggcaggagaatcgctggaacccaggagacagagattgcagtgagctgagattgcaccactgcagtctagcctgggtgacacagcaagactccatctcaaaaaaaaaaagaaaaaaaatcagaagtgaacctgtagcctgtagtgtgttgccaaataaacttatttttagagatacttctttccattttctgtgaggtcatctgcagtttcacatggtagacagacttaggtgagattcttagcaacatagaatgaagagtaaagaggtttgtttatttcacaagggtttattgaaggcctacgatgtgttaaatgctgtaggaaatacccactgatttctcttttcatggaggtttcccgccttctcttaacgagtgatcaattaaactgtttactgggaacttgctaagttaatgaacacacgggatacattctttggatgagcagacattggttgggcagaggggcaagaggagagcagtttagacagagacctgcttatacactgtagtgtctaagagagcttgtgatgttcaggaaacagttgttcactgtgctgcaatataggggacggccagttgcggtggctcacacctgtaatcctagtgctttggaaggccaaggcgggcagatcacctgaggtcaggagttagaaaccagcctggccaacatggtgaaaccccatctctactaaaaacacaaaaattagctgagtgtaatggtggatgcctataatcccagcaacttgggaggctgagacaggagaat

SEQ ID NO: 1883065 - DNA, 4001 bp, Homo sapiens
gtaatccagcactttgggagttcaaggcgggcggatcgcctgaggtcaggagttcaagaccagcctggtcaacatggcaaaaccccgtctctactaaaaatacaaaaattagccaggtgcagtggacagtgcctgtaatctcagctactcatgaggctgaggcctgagaattgcttgaacccaggaggccaaggtggcagtgagctgagatcatgccactgcactccagcctgggtgacagagtgaaactccgtctgaaaaaaacaaaacaaacaaacaaacaaaaaaccagaccatattgtttagggatacttagctgacaaaataatagagacaagcatgacataattaccataaaaatcaggccctggggtgctggtggggaaggtttaagtggaaagaatggagcggtgacaatgtgtgtcaacctgggaggtggtgaccctggggttcgctttgtaattcctcaaaatgagcatttatgtgctattcacttttcagaggatagaattctgaactaaaatgtttaagcagccatacgcaaaaaaagaaaaaatatggatagatttttattttaattaaaacatttaaaaaatagagacaaggcagctgggcgtggtggctcacgcctgtaatcccagcaatttgggaggccgaggcaggcgaatcacgaggtcaagagatcgagaccatcctggctaacacggtgaaaccaagtctctactaaaaatacaaaataaagttagccaggcgtggtggcgggcgcctgtagtcccagctactggggaggctgaggcaggagaatggcgtgaacccgggaggtggagcttgcagtgagtcgagatcaggccactgcattccagcctgggcgacagagcaagactccaactcaaaaaaaaaaaaaaaacatagagacaagggtcttgctatgttgctcagggtggtctcaaactctccgggctcaagcaatcctcccgcttcggtctcccaaagcgctgagattccaggcgtgaaccaccgcgctcgaccaggaaaaaaatatatatatatataatatacaatatattttataatatattatgtcatatattacacataatatacaatatgtataatacgcataataaaggtatatttaatatatataaagatatatatgtatataataatttttttttttgagacggagtttcactcttgctgcccaggctcgagtgcaatggctcgatctcagctcactgcaagctccgcctccagggttcaaaccattctcctgcctcagcctcccgagtagctgcgattacaggcgcccgacacacgcccggctaatttttgcatttttagtagacacggggtttcaccatgttggccagactggtctcgaactcctgatctcaggtgatccgcccgcctcggcctcccaaagtgccgggattacaggcgtgagccacggcgcccggcctgaataaatcttttaaaacataaaaatctgggtgagcccctggccggccggcacagatgccggggtggggccgcgaatcggttgggacgcactctatccggcctaggggcacccgggccagcacccggccgccgcgcgtgcgcagtgggcggggtgccccgcgctcctacctgcaagtggccagtgccaagtgctgggccgccgctcctgccgtgcatgttggggagccagtacatgcaggtgggctccacacggagaggggcgcagacccggtgatagggctttacctggtacatcggcatggcgcaaccaaagcaagagagggtggcgcgtgccagacaccaacggtcggaaaccgccagacaccaacggtcggaaaccgccaagacaccaacgctcggaaaccgccagacaccaacgctcggaaaccgccagacaccaaggctcggaatacacgccagaccacgacggagggcgaccacctcccttctgaccctgctgcgggcgttcggaaaaaaaacgcagtccggtgtgctctgattggtccaggctctttgacgtcacggactcgacctttgacagagccactaggcgaaaaggagagacgggaagtattttttccgccccgcccggaaagggtggagcacaacgtcgaaagcagccaatgggagcccaggaggcggggcgcctgtgggagccgttgagggcactttcccagtccccgaggcggatccggtgttgcatccttggagagagctgagagctcgaggtgagctgggctcgcggtcgcccctctcgctcgccctctttgagaaccacggcttccgacctccctggaaatggggggaacatggccgaggcgcgtgggaggccgcctcgtggaggccccggagcggcatcctcagcgccccagcgatccggtgcccattaggtgcgccttgaagccgaggcaagctccttcggggtgctgggctgcgggcaaagaattcggccctgtgaagagttgggttcggcctgtctcaggccctgcccacatcccatcacagggccgtggacttgaagccggaacgtgaaatccccatagactgaatgcatttcctttctacctgttctctctccccttttatttttatttttatattattttatttttaatttttattttatttttttgtagagacggggatttcgctatgttgcccaagctggtctggaactccggagctcaagcagtccgcccgccttggccccccaaagctctggaattacaggcgtaatgcactgtgcctggccttttaaaaaaaaattgaggttattttggggacagtagagcgtccagacacatcctaatttgcgtagctgctcagttttaaaaaatgcaatgcatttttacctcttagggtatgtgatttctggctggtaagctacaccgaatcttggctagcacagttgaattccatgtcagatttgtaaacgcaaatttgctctctgcatttaaatatattagatatatttaggtaactacatttaaatgtattgagacatttaaatacacttgccgtctgtatctaaatatctgaagtggaccaggtgcggtggctcacacctataatcccatcactttgggaggccaaggcaagtggatcatgaggtcaggagttcacgaccagcctggccaacatggtgaaatcccatttctactaaaaatacaaaaattagctgggcgtggtggcaggcgcctgtaatcctagctacttgggaggctgaggcaggagaatcgctggaacccaggagacagaggttgcagtgagctgagattgcaccactgcagtctagcctgggtgacacagcaagactccatctcaaaaaaaaaaagaaaaaaaatcagaagtgaacctgtagcctgtagtgtgttgccaaataaacttatttttagagatacttctttccattttctgtgaggtcatctgcagtttcacatggtagacagacttaggtgagattcttagcaacatagaatgaacagtaaagaggtttgtttatttcacaagggtttattgaaggcctacgatgtgttaaatgctgtaggaaatacccactgatttctcttttcatggaggtttcccgccttctcttaacgagtgatcaattaaactgtttactgggaacttgctaagttaatgaacacacgggatacattctttggatgagcagacattgggcagaggggcaagaggagagcagtttagacagagacctgcttatacactgtagtgtctaagagagcttgtgatgttcaggaaacagttgttcactgtgctgcaatataggggacggccagttgcggtggctcacacctgtaatcctagtgctttggaaggccaaggcgggcagatcacctgaggtcaggagttagaaaccagcctggccaacatggtgaaaccccatctctactaaaaacacaaaaattagctgagtgtaatggtggatgcctataatcccagcaacttgggaggctgagacaggagaatcacttgaa

SEQ ID NO: 1883066 - DNA, 4001 bp, Homo sapiens
aaatacaaaaatttagccagcatggttgcaggtgcctgtagtcccagctattcgggaggctgaggcaggagaatggcctgaacccgggaggcggagcttgcagtgagcagagatcacaccactgcactccagcctgggtgacagagcgagactcggtctcaaaaaaaaaaaaacccacctttgacctaggccccaaagaactccagggaaaatgagtggctcacaataaacctagtaaaacatataaagaaacaaggcactgacaaaattatttcacaaacactttagataatcatctatcatagattataaaatgactatgtttaataaaattttaaaaataaaacagggagagaatgggctcaaaaaaagaaataaaaggccaggcatggtggctcgcacctgtaatcccagcactttggaaggctgaggcgggtggatcatgaggtcaagagatcaagaccatcctggccaaaatggtgaaaccccgtctctgctaaaaatacaaaaattagttgggtgtggtggcgtgcacctgtaatccaagctactcaggaggctgagatgggagaactgcttgaacccgggaggcagaggttgcagtgagccgagctcacaccactgcactccagcctgggtgacacagtgaaactccgtctgaaaaaaacaacaaaaaaaaaaacaaataaaaacccagactatattgtttagggatacttaggtgacaaaataatagacacaaatagaacataattaccataaaaatcaggaccttgagggggttggggggaaggtttaagtggaaagaatggagcggtgacaatgtgtgtcaacctgggaggtggtgaccctggagttcgctttgtaattcctcaaaatgagcatttatgtgctattcacttttcacagggcagaatctctgaactaacatgtttaagcagccatataaaaaaaaaattattctcaaaatgtctcaaaaaaacaaaaatgttatatatatacgtataaaagaaatatatacacatacgtatatatctatacatatacgtgtgtatatatatgtatatatacatacacgtgtacatatatatatatatatatatatatatatatatatattttttttttcctagtcgggcgcggtggttcacgcctggtatctcagcgctttgggagaccgaggcgagaggattgcttgagccctgagagtctgagaccagcgtgagcaacatagtgagacccttgtctctattttttttttttttttttgagtcggagtctagctctgtcgcccaggctcgagtgcaatggctcgatctcagctcactgcaaactccgcctccagggttcaaacgattctcctgcctcagcctcccgagtggctgggattacaggcgcccgccacacgcccggctgatttttgtatttttagtagagacgaggcttcaacgtgttggtcaggttggtctcgaactcctgacctcaggtgacctgcctgcttgggcctcccaaagtgctgggattacaggcgtgagccacggcgcccggcctgaataaatcttttaaaacataaaggtttgggtgagtccctggccggccggcacaaatgccggggtgggaccgcgaaccgggtgggaccgcaaaccgggtgggacacactcgttccggcccggggggactcgggccagcagccggccgccgcgcgtgcgcacttggcgcggggtgggggggaaggaggggcccgcgctcctacctgtaggtggccaacgccgggcgctgggccgccgctcctgccttgcacgttagagagccggtacatgcaggtgggaagctccacacggagaggcgcgccgcgcccgtgataaggttttacctggtacatcggcatggcggaaccaaagcaagagagggtggcgcgtgccaaacaccaacgctcagaaaccgtccgaggctacgactgggggcggacatctcccttgtgaccctgctgcggtcgttcgggaaaaaaaaaaaaagcagtccggtgtgctctgattggcccatgctctttgacgtcacggactcgacctttgacggagctaataggcgaaaaggagagacgggaagtattttttccgccccgcccagaaagggtggagcacaacgtcaaaagcagccaatgggagcccaggaggcggggcgcctgtgggagtcgtggagggaactttcccaggccccgaggcggatcgggtattgagtccatggagcgagctgagagctagaggtgagctgggctcgcggtctcccttctcgcgcgtcctccttgagaaccacggcgttccaacctccctggaaatggggggaacatggccgaggggcgtggcgaggcgtggaggccccggagcggcgtcctcagcgccccagccatccagtgctccttggttgcgccttaaggccgaggcaggctccttcggggtctttggctgcgggcaaaggattcggccctgtaaggagctgggttcggcctgtcccagacaggccctgcccacatcccatcacagggccgtgaacttgaagccctagcgtgaaatccccatagactgaatgcatttcctttctacctgttctctctccccttttatttttatttttatattatttaatttttaattttttatttttgtagagacggggatttcgctatgttgctgaggctgatctcgaactcctgagctcaagcaatccgcccgccttggccccccaaggtgctggaattacaggcctgatgcacgctgcctggcctttttaaaaaattgaggttattttggggaaggtagagcgtccagacacatcctaatttgcatagctgcgcagttttacaaaatgcaatgcatttctacctgttaggatatgtgatttctggctggtaagctacaccgaatcttggctagcacagttgcattccatgtcagatatgtaaacacaaattcgctctctgcatttaaatatattagatagatttaagtaactacatttaaatgtattcacatttaaatacattttcggtctgtatctaaatgcgctccctcctgaaaataaatatctgaagtgggccgggcgcggtggctcacacctataatcccagcactctgggaggccaaggcgggtggatcatgaggtcaggagctcatgcctagcctggccaacatggtgaaatccagtttctactaaaaatacaaaaattaactgggcatggttggcgggcgcctgtaatcccagctacttgggaggctgaggcaggagaatcgctggaacccaggaggcggaggttgcagtgagctgagatcgagccactgcagtccggcctgggtgacacagcaagactccgcctcaaaaaaaaaaaaaaaaatcagaagtggactgtagcctatagtgtgttgcctaataaatttatttttagagatacttctttcaattttctgtgaggtcatctgcagtttcacatggtagacagacttaggtgagattcttagcaaggtggaatgaagagtaaagaggtttgtttatttcacaagggtttattgaaggcctacaatgtggtaaatgctgtaggaaatacccaatgatttctctttcatggaggtttcctgccttctcttaacaagttatcaattaaacggtttactggaaattgctaagttaatgaacacacgggatacattctttggatgagcagacattggttgggcagaggaggaagaggagagtggtttagagagagacctgcttatacactgtagtgtttaaaagagcttgtgatgttcaggaaacaattgttcactgcgctacaatataggggacggccggttgcagtggctcacacctgtaatcctagcgctttgggaggccaaggagggcagatcacctgaggtcaggagttcaagacaagcctgcccaacatggtgaaaccccatctctactaaaaacacaaaaattagccgggtgtgatggtgggtgcctgt

SEQ ID NO: 1883067 - DNA, 4001 bp, Homo sapiens
tctgtcctttcctgttcttagactaaattacctgaaatacatcaaaatatatgctgtatgcttacctatatcaaaactatgttgtttaggtgccgggcacggtggctcacacctgtaatcccagcactttgggagttcaaggcgggcggatcgcctgaggtcaggagttcaagaccagcctggtcaacatggcaaaaccccgtctctactaaaaatacaaaaattagccaggtgcagtggacagcgcctgtaatctcagctactcatgaggctgaggcctgagaattccttgaacccaggaggccaaggtggcagtgagccgagatcatgccactgcactccagcctgggtgacagagtgaaactccgtctgaaaaaaacaaacaaacaaaaacaaacaaaaaaccagaccatattgtttagggatacttagctgacaaaataatagagacaagcaggacataattaccataaaaatcgggccctgggatgttggtggggaaggtttaagtggaaagaatggagcggtcacaatgtgtgtcaacctgggaggtggtgaccctggggttcgctttgtaattcctcaaaatgagcatttatgtgctactcacttttcagaggatagaattctgaactaaaatgtttaagcagccatacgcaaaaaaaaagaaaaaatatggatagatttttattttaattaaaacatttaaaaaatagagacaaggcagctgggcgtggtggctcacgcctgtaatcccagcaatttgggaggccgaggcaggcgaatcacgaggtcaggagatcgagaccatcctggctaacacggtgaaaccatgtctctactaaaaatacaaaaaaaagttagccaggcatggtggcgggcgcctgtagtcccatctactggggaggctgaggcaggagaatggcgtgaacccgggaggtggagcttgcagtgagccgagatcaggccactgcattccagcctgggcgacagagcaagactccaactcaaaaaaaaaaaaaaacatagagacaagggtcttgctatgttgctcagggtggtctcaaactctccgggctcaagcaatcctcccgcttcggtctcccaaagcgctgagattccaggcgtgaaccaccgcgctcgaccaggaaagatatatatatatataatatatattttataatatatcatgttatatattacacataatatacaatatgtataatacgcataataaaggtatatttaacatatataaaaatatatatatatataataattttttttttgagacggagtttcactcttgctgcccaggctcgagtgcaatggctcgatctcagctcactgcaagctccgcctccagggttcaaaccattctcctgcctcagcctcccgagtagctgggattacaggcgcccgacacatgcccggctaatttttgcatttttagtagagacgaggtttcaccatgttggccagactggtctcgaactcttgatctcaggtgatccgcccgcctcggcctcccaaagtgccgggattacaggcgtgagccacggcgcccggcctgaataaatcttttaaaacataaaaatctgggtgaccccctggccggccggcacagatgccggggtggggccgcgaatcggttgggacgcactctatccggcctaggggcacctgggccagcaacgggccgccgcgcgtgcgcagtgggcgggggggccccgcgctcctacctgcaagtggccagtgccgagtgctgggccgccgctcctgccgtgcatgttggggagccagtacatgcaggtgggctccacacggagaggggcgccgaccccgtgatagggctttacctggtacatcggggtggcgcgtgccagacaccaacggtcggaaaccgccagacaccaacgctcggaatccacgccaggccacgacggagggcgactacctcccttctgaccctgctgctggcgttcggaaaaaacgcagtccggtgtgctctgattggtccaggctctttgacgtcacggactcgacctttgacagagccactaggcgaaaaggagagacgggaagtattttttccgccccgcccggaaagggtggagcacaacgtcgaaagcagccgttgggagcccaggaggcggggcgcctgtgggagccgtggagggaactttcccagtccccgaggcggatccggtgttgcatccttggagcgagctgagagctcgaggtgagctgggctcgcggtcgcccctctcgcgcgccctctttaagaaccacggcgtccaacctccctggaaatggggggaacatggccgaggcgcgtggcgaggccgcctcgtggaggccccggagcggcatcctcagcgccccagcgatccggtgcccattaggtgcgccttgaagccgaggcaagctccttcggggtgctgggctgcgggcaaagaattcggccctgtgaagagttgggttcggcctgtctcaggccctgcccacatcccatcacagggccgtggacttgaagccggaacgtgaaatccctatagactgaatgcatttccttcctacctgttctctctccccttttatttttatttttatattattttatttttaatttttactttatttttttgtagagacggggatttagctatgttgcccaagctggtctggaactccggagctcaagcagtccgcccgccttggccccccaaagcgctggaattacaggcgtaatgcactgtgcctggcctttaaaaaaaaattgaggttattttggggacagtagagcgtccagacacatcctaatttgcatagctgcgcagttttaaaaaatgcaatgcatttttacctgttagggtatgtgatttctggctagtaagctacaccgaatcttggctagcacagttgaattccatgtcagatttgtaaacgcaaatttgctctctgcatttaaatatattagatatatttaggtaactacatttaaatgtattgagacatttaaataaatttgccgtctgtatctaaatatctgaagtggaccaggtgcggtggctcacacctataatcccatcactttgggaggccaaggcaagtggatcatgaggtcaggagttcacgaccagcctggccaacatggtgaaatcccatttctactaaaaatacaaaaattagctgggcgtggtggcaggcgcctgtaatcctagctacttgggaggctgaggcaggagaatcgctggaacccaggagacagaggttgcagtgagctgagattgcaccactgcagtctagcctgggtgacacagcaagactccatctcaaaaaaaaaaaagaaaaaaaatcagaactggacctgtagcctgtagtgtgttgccaaataaacttatttttagagatacttctttccattttctgtgaggtcatctgcagtttcacatggtagacagactttggtgagattcttagcaacatagaatgaagagtaaagaggtttgtttatttcacaagggtttatttaaggcctacaatgtgttaaatgctgtaggaaatacccactgatttctcttttcatggaggtttcctgccttctcttaacgagtgatcaattaaactgtttactggaacttgctaagttagtgaacacacgggatacattctttggatgagcagacattggttgggcagaggagcaagaggagagcagtttagacagagacctgcttatacactgtagtgtttaaaagagcttgtgatgttcaggaaacagttgttcactgtgctgcaatataggggacggccagttgcggtggctcacacctgtaatcctagtgctttggaaggccaaggcgggcagatcacctgaggtcaggagttagaaaccagcctggccaacatggtgaaaccccatctctattaaaaacacaaaaattagctgagtgtaatggtgggtgcctataatcccagcaacttgggaggctgagaca

SEQ ID NO: 1883068 - DNA, 4001 bp, Homo sapiens
ttcttagactaaattacctgaaatacatcaaaatatatgctgtatgcttacctatatcaaaactatgttgtttaggtgccgggcacggtggctcacacctgtaatcccagcactttgggagttcaaggcgggcggatcgcctgaggtcaggagttcaagaccagcctggtcaacatggcaaaaccccgtctctactaaaaatacaaaaattagccaggtgcagtggacagcgcctgtaatctcagctactcatgaggctgaggcctgagaattccttgaacccaggaggccaaggtggcagtgagccgagatcatgccactgcactccagcctgggtgacagagtgaaactccgtctgaaaaaaacaaacaaacaaaaacaaacaaaaaaccagaccatattgtttagggatacttagctgacaaaataatagagacaagcaggacataattaccataaaaatcgggccctgggatgttggtggggaaggtttaagtggaaagaatggagcggtcacaatgtgtgtcaacctgggaggtggtgaccctggggttcgctttgtaattcctcaaaatgagcatttatgtgctactcacttttcagaggatagaattctgaactaaaatgtttaagcagccatacgcaaaaaaaaagaaaaaatatggatagatttttattttaattaaaacatttaaaaaatagagacaaggcagctgggcgtggtggctcacgcctgtaatcccagcaatttgggaggccgaggcaggcgaatcacgaggtcaggagatcgagaccatcctggctaacacggtgaaaccatgtctctactaaaaatacaaaaaaaagttagccaggcatggtggcgggcgcctgtagtcccatctactggggaggctgaggcaggagaatggcgtgaacccgggaggtggagcttgcagtgagccgagatcaggccactgcattccagcctgggcgacagagcaagactccaactcaaaaaaaaaaaaaaacatagagacaagggtcttgctatgttgctcagggtggtctcaaactctccgggctcaagcaatcctcccgcttcggtctcccaaagcgctgagattccaggcgtgaaccaccgcgctcgaccaggaaagatatatatatatataatatatattttataatatatcatgttatatattacacataatatacaatatgtataatacgcataataaaggtatatttaacatatataaaaatatatatatatataataattttttttttgagacggagtttcactcttgctgcccaggctcgagtgcaatggctcgatctcagctcactgcaagctccgcctccagggttcaaaccattctcctgcctcagcctcccgagtagctgggattacaggcgcccgacacatgcccggctaatttttgcatttttagtagagacgaggtttcaccatgttggccagactggtctcgaactcttgatctcaggtgatccgcccgcctcggcctcccaaagtgccgggattacaggcgtgagccacggcgcccggcctgaataaatcttttaaaacataaaaatctgggtgaccccctggccggccggcacagatgccggggtggggccgcgaatcggttgggacgcactctatccggcctaggggcacctgggccagcaacgggccgccgcgcgtgcgcagtgggcgggggggccccgcgctcctacctgcaagtggccagtgccgagtgctgggccgccgctcctgccgtgcatgttggggagccagtacatgcaggtgggctccacacggagaggggcgccgaccccgtgatagggctttacctggtacatcggggtggcgcgtgccagacaccaacggtcggaaaccgccagacaccaacgctcggaatccacgccaggccacgacggagggcgactacctcccttctgaccctgctgctggcgttcggaaaaaacgcagtccggtgtgctctgattggtccaggctctttgacgtcacggactcgacctttgacagagccactaggcgaaaaggagagacgggaagtattttttccgccccgcccggaaagggtggagcacaacgtcgaaagcagccgttgggagcccaggaggcggggcgcctgtgggagccgtggagggaactttcccagtccccgaggcggatccggtgttgcatccttggagcgagctgagagctcgaggtgagctgggctcgcggtcgcccctctcgcgcgccctctttaagaaccacggcgtccaacctccctggaaatggggggaacatggccgaggcgcgtggcgaggccgcctcgtggaggccccggagcggcatcctcagcgccccagcgatccggtgcccattaggtgcgccttgaagccgaggcaagctccttcggggtgctgggctgcgggcaaagaattcggccctgtgaagagttgggttcggcctgtctcaggccctgcccacatcccatcacagggccgtggacttgaagccggaacgtgaaatccctatagactgaatgcatttccttcctacctgttctctctccccttttatttttatttttatattattttatttttaatttttactttatttttttgtagagacggggatttagctatgttgcccaagctggtctggaactccggagctcaagcagtccgcccgccttggccccccaaagcgctggaattacaggcgtaatgcactgtgcctggcctttaaaaaaaaattgaggttattttggggacagtagagcgtccagacacatcctaatttgcatagctgcgcagttttaaaaaatgcaatgcatttttacctgttagggtatgtgatttctggctagtaagctacaccgaatcttggctagcacagttgaattccatgtcagatttgtaaacgcaaatttgctctctgcatttaaatatattagatatatttaggtaactacatttaaatgtattgagacatttaaataaatttgccgtctgtatctaaatatctgaagtggaccaggtgcggtggctcacacctataatcccatcactttgggaggccaaggcaagtggatcatgaggtcaggagttcacgaccagcctggccaacatggtgaaatcccatttctactaaaaatacaaaaattagctgggcgtggtggcaggcgcctgtaatcctagctacttgggaggctgaggcaggagaatcgctggaacccaggagacagaggttgcagtgagctgagattgcaccactgcagtctagcctgggtgacacagcaagactccatctcaaaaaaaaaaaagaaaaaaaatcagaactggacctgtagcctgtagtgtgttgccaaataaacttatttttagagatacttctttccattttctgtgaggtcatctgcagtttcacatggtagacagactttggtgagattcttagcaacatagaatgaagagtaaagaggtttgtttatttcacaagggtttatttaaggcctacaatgtgttaaatgctgtaggaaatacccactgatttctcttttcatggaggtttcctgccttctcttaacgagtgatcaattaaactgtttactggaacttgctaagttagtgaacacacgggatacattctttggatgagcagacattggttgggcagaggagcaagaggagagcagtttagacagagacctgcttatacactgtagtgtttaaaagagcttgtgatgttcaggaaacagttgttcactgtgctgcaatataggggacggccagttgcggtggctcacacctgtaatcctagtgctttggaaggccaaggcgggcagatcacctgaggtcaggagttagaaaccagcctggccaacatggtgaaaccccatctctattaaaaacacaaaaattagctgagtgtaatggtgggtgcctataatcccagcaacttgggaggctgagacaggagaatcacttga

SEQ ID NO: 1883069 - DNA, 4001 bp, Homo sapiens
ccagggcatatagaagtggctcaatatttttgaagtgaatgacttgctagagcagcatttaggcaaactagtgcctaaagtcacacattttgggaactaccactctaaagttatttaattgtataataacttcaaaggaaaaaaatgtgttaatgcccctaggccactagagatccatttaataattattgcttcgcttcagttgagtcacttactactttagggaacagaagagatttctcagagagcacctcatgacctggaaaagtcttgcaaaatcattttcatactctgcatctccagctgaaaaacaatgataaaattagttaccatggaagttaaaggaatcatgctttgcattaacaccaacagtcttctggaacacatttggtaacattagatttcccatcaaagatatttgtttattttaatagttcaagcatgaaaaagagatatcccttttggaagctgcaaattgttgactcactgattctcatttaggaaaagggatttcacattactttatctattttctcaatagtcaaagcccatgttaagagagcttttaaacatatttaaaatatatggcttacctacatgttttacatgataatttatggttatagaagttagaaagtgcaatttcttttaatatccccgtggggaagttatataattctatagttttttaaaatatatggaaaagcaatatactttccgttaactgctaagattcatgaattttctccacaagttctccagaggaactactagaaaaaactccacgaatctcattatttgacagttttgttgaagtgaaattattaaaattgatattagatttaatgacttgtttccagtaaccaaaatggaaagtattctaccagctgtcgatggttccacaccctgacacatcgttaaaaccttagcttctgcctaaactttaaaccttaataatatttggcggtaggggaggggttacatttcaagtcaaacaaaggatgtatttccaaagcagcatttacaaaggttaatctgtgtatggactacaaaggggaaagtgcagtgccccagtgatcgatctaagacccccctctcgttgttgttgttgttgggtttttttggtctggttaataaaccacctagagggataatttttaaacttaatttgttgaaatggtactttactaatgtatgaaaaaaatttccccaaatttgagaatttttggtaagttgattttatatttgggaataaagatctcttgcttcttctactgacaccttctacacaaaagataaaaggtacttttacttggtaatccgcagggagaaaatttacagaaacccagagccaaaggtgctctcaggggatcccctgaaacattcaaagccattgcggccccagaaggtaaatggctttcgcaggaacacaggtctcctgactcacggcctaaccttcctttcccccacaccaaagctcgcgcggcaccagctagagtgaaggtcaaagtcaacagaataatctctgcagtccagggtctgtgagggtcctcctatccgagggagttttcatgaaagggcatttccgaacattttattccaaggacacagtctagtcaaaagacgtttgggatagggtaaacatgaggcaaaagaacacttacaaaagaaaaaagcgcagtttcttggaggcttgtcagaagctaagactggggagatgagaaccagggcccttggcgagagttggggtgggaatcgcgtaagaaaagcaatttctagagcggaaaggtgaccccacattacaaaaagaaatggagtagaaaaataggcttgactattctaaagctgcttcagaaagaatctccggaagaccacggaggaaccccgcaggggagccaggcggatactcagccgctcgcggtagaagggcgcgcaaagctgcggagccgcgtgtgtggagctccccagtgcactcactgctggctccccctcggtgctctgggcccttcccagctccctccacacagcccggctcccttcacacacccccgccccctccgagctccccgactcctccccgcgctccacggctcttcccgactccagtcagcgttcctcgggccctcggcgccacgagctgtccgggcacgcagcccctagcggcgcgtcgctgccaagccggcctccgcgcgcctccctccttccttctcccctggctgttcgcgatccagcttgggtaggcggggaagcagctggagtgcgaccgccgcggcagccaccctgcaaccgccagtcggaggtgcagtccgtaggccctggcccccgggtgggcccttggggagtcggcgccgctcccggggagctgcaaggctcgcccctgcccggcgtggagggcgcggggggcgcggaggtgagcgggtcggggaggagcgcgaaagaaggtagcggcggcggagttgagggtcaagatgcagtctgcgccacgcgctgcatccatcctccccgattctgcgccctcaccgggcgtccgccctgagctgcggggtccctcatctcctggcaccttaaggtggaaagtgagaagggtggagaagggtgtctgttccactgattccccctcctcctcctcttggttcctagagctaagggcaagtcctgaggttgggcccaggagaaagaaggcaaggagacattgtcccaggtaggatgtgtcccagcaggaaaggacaggcaggttactttcgcccccttgatagtctccctgctactttgggttgatgcagggcatttcatggaagatcatgcagtgctgctttgcgaacaggtatttctagcagtcatttggtttatttcccagtaatgtaatcgtggtgtttaggccatttctgttagaaagtaattggcctcttctttgactgtcctaaattatctttgaaccctgtgttcagcctcagccaaaacttgttgaaaattatgccctaaaaatcttgctcttaaaatagagcagagagataaagagcatttttgttggaagatttccatttattatctctcccaccccgtggagaaggattggtgtcagtttttactcctcgggcagttagttttttagatggaaagacagtccaggccatagttaattatcgctcatcagtataggagaaaaagaattcagactcctgccccacccccacccccacccccaacctcctgacttagattctggtccttttaacagccccgctgcttggaaccctttttgttttctaaaccacctccccatccttccttttctccactttattatttcttcattttattgatctgtttattttttctttctttaaccctataatttttttactccgattctctcttggttgcttcaaagcttagaggctatttaatggaaaagcaaaacaaaacaaaacaaaacacccgtcctaaataatttgcaggatgtttagaaacataaagagtaactatgtgtgctgccattgggatggctgcactctctgcctcttagctagtcactctgtcagggtatggggaaatgagacaatattgagaatgacaacttgagcaaattgtgcagtaaggaaatgaaaagctttatccaagtcactttttattgtactggtgctatggaaaatgtggtgaatgaacatagttgtattttagtactgaaaaaacaggacaggtgaagacaaatttttaaagaaaggattgtaaatgagttagaaaagtgagaaagaagatacaccaaaaatgtgaaagagtaagactgcaggcgtgataaaggacataggacatcaggagatgtatttatccctgctgggccagaaaccaggacattgaggtaactgagacattaacataacaataacattgataaatcacctaccccttaagggcccacatgtgttttcagcaaaaagagaaatctgatctagagaattattacatgtctttttgtcctgaatttttttgatgtattccat

SEQ ID NO: 1883070 - DNA, 4001 bp, Homo sapiens; identical to SEQ ID NO: 587006

SEQ ID NO: 1883071 - DNA, 4001 bp, Homo sapiens; identical to SEQ ID NO: 587023

SEQ ID NO: 1883072 - DNA, 4001 bp, Homo sapiens; identical to SEQ ID NO: 587040

SEQ ID NO: 1883073 - DNA, 4001 bp, Homo sapiens
tggatacttctcttttttttagatttctcattttaaaatatatacaatgcaagttttctttctggatcaatatactcgcatgagagaaaataattcagaaaaaaatatatttccttacttaaaaaaagggaaaggcaccaggcatggtggctcatgcctgtaatcccagcactttcggaggccaaggcaggaggatcacgaggtcaggagtttgagaccagcctggccaatatggtgaaaccccgtctctactgaaaaatacaaaaattagccaggcacggtggtgcacgccttagtcccagctacccggcaggctgaggcaggagaatggctggaacctgggaggcggaggttgcagtgagcccagatcacaccactgcactccagcctgggcgacagggcgagactctgtctccagaaaaaaaaaaaaaagggtagggggaaagctgtaaaacaaatgtttcatcttaaaatatataattaggcaatgtaaagttaaagattagaatgtttatcctatgcaacataaaataatatgcatagatctggtacataatttattagtttttactttagaaaaaaagtgagaaaaaggtttataaatttctcagtcccttttataaaaagttgcaactaaaaccagccatcacttatgtgtataaccatcaactctgaatataatattaattatacctaggaactggaatttacctagacgaattctggctgctttttgaaaaatgcacaattgtatcacagaacactgtggcttctacaatttgtaacaattttgaaaaggaaactcctgcttccataatatagggcaacaagaatactctttccatagtcatgatcctgtgtaaaaaaaaacctcatagtctgatttacctttatcaaaggtaaaatgattcacatttgcatggattactctgatcctcagtagttcctaaacacaaaatacattttgcataaacctttatctgggttttccaaagcaagtattacactggcagaagtccatgacctgaagaaaaagaaattgaatataaaaggtttaccgactttatcctttctaattttacgatagcttcaggcgttgagacccagctggtttcttgtgcctatccattgtgaacttctaacacttctcagtgccatcttttaaaggtggttgctttattttgcgacgtagaaaatcctttcgtccaacttcaatcatttgttcttcccaagacttcatttcattataataatgaattttatcatctttagcaagttgaatatatactttcttttgagaaccagacagatttttccagttttcatttacagtcttcagctttgcctgcggtgaaccatccttagcttcttggaagctttcagctacataaatgttataagctgaacgagatcattttggttttccaagcagtgttaactctcttttttattaaagctttcctttttaaatgttcctgcatgatttctttttccaaagacataatctgacttggagttagctgttcttgaattctgcttatctcttctttgtatgcctgccagtccaccctataagcatcttcatatattttttttctctgaattgggaagttccgtccaatgctcagcgattcttctaattagttctgtattttttgcatctgggttctgagctttaaatatgggtagttgttctttagaaaatcaaaggtaagaagttacaggtttctttggataacttgccaagacaggcgaaaaccatttccataaatacataaaactgaaggggaagcgcggtcgacttccacagctggtacacagctccgccaggaccttcccagggccctcagcacaccccacgtgcttcacaccagcagaccaggcagtgaccaggaaccagtctcggagagcctcctggcacgacagaaccaccccagcaatggcaactcgaacctgcctgtgaccctccggagtttgttatcatgcctgccactcgcgagacactatgtcattcaggctggagtgcagtggcgcgatctcggctcactgcaacttccgcctcccagactcaagggattctcctgcctcagcctcccgaatagctgggatttcaggcgcgtgccaccatgccaggctaatttttgtatttttagtagagacggggtttcgccatgttggccaggctggtctcgaactcctgacctcaggtgatccacccaccttggcctcccaacgtgctgggattacaggcgtgagccaccgcgcctggccctgaactggggtttttaaggggatcatggagggtgaggggctgggtaactggggtcattgatgggttggggtgagaggagtgtagaaacggcattctttcgtgagtcagttccttgtggggtccttcgggtcagctggcatcagttgtttcattggtgggcagacctgaaggaatatctcaaagtgaaaacatttggtgatgttcaagttgttatctgtagagtagttaaagggagctataatctagattctacatgattctaggacaataggcacccaacagctatgaggaagtggatccgagagcaaacggacccagcgatggacggtgaatttgccacaagcgtggtgtattttcattgctccccctcttcttccctgatttattttactattattattattattattattattattattattattattattttgagacagagtttcactcttgttgcccaggctggagtgcaacggcgctatctcggctcactgcaacctccacctcccaagttcaaacaattctcctgcctgggcctccctagcagcggggattacaggcacccaccaccatgcacagctaattttgcatttttagtagagatggggtttcaccatgttggacaggctggtcttggactcctgacctcaagtgatctgctcactttggcctccctaagtgctgggattacaggcgtgagccaccgtgcccagcctctgattaactgtataaagtttatagggatggccaagcacagtggctcacacctataatcccagcactttgggaggccaaggaaggaggatcacttgagctcaggagttcaagaccagcccgggcaactgtgagaccccatctctataaaaaaaaaaaaaaaaatagcagggtgtggtggtatgcacctgtggtcccagctactcaggaggctgaggcaggaggatcacttcagcccaggaggttgaggctgcagtgatctacaagcacgccactgcactccacattgggtaacaaagaaagaccctgtcacacacacacaaagtgtgtgtgacacttcaaatgtcaggcttcaaatgtatcatgcaccaacagccacatgggccaacctttctttcttttctttttctttttcttttttcttttttttttttttttttttgagacagagttttgctgctctgtggcccaggctggagtgcagtggcctgatctcagctcactgcaacatccgcctcccaaattcaagcaattctcgtgccttagcctcccgagtagctgcgactacaggcatgtgtcaccaagcccggctaatgtgttgtattttagtagagatggggtttcaccacgtagcccaggctggtgttgaactcctgagctcaggcaatccaccgccttggcctcccaaagttctgggattacaggtgtgagccgccgcacccagcccacattggccccctttctgatacacactaaacctgttcctgctccagggcctttgcactctctgttccctctgcccggagcgttcttcctccacaactacctgtggcctcactgaccgtcctagctaatatcacccctcaagcaccccgctcataatcttttcttttttctttttcgagacggagtcttgctctgttgctcaggctggagtgcaggtgcgcgatctcggctcactgcaacctccgcctcccggattcaagagattctcctgcctcatcctcctgag

SEQ ID NO: 1883074 - DNA, 4001 bp, Homo sapiens; identical to SEQ ID NO: 587057

SEQ ID NO: 1883075 - DNA, 4001 bp, Homo sapiens; identical to SEQ ID NO: 587058

SEQ ID NO: 1883076 - DNA, 4001 bp, Homo sapiens; identical to SEQ ID NO: 587060

SEQ ID NO: 1883077 - DNA, 4001 bp, Homo sapiens; identical to SEQ ID NO: 587075

SEQ ID NO: 1883078 - DNA, 4001 bp, Homo sapiens
gttacaggtctcccatagattagggctatttaccatatctccttacttattagagtcacaaatcttagcaggaagccagttatgcagattgaaacatgaacttcttagtctagcattttaatactttttaatggtgaaatttatctagacttatctataaagtcttttgcaatttgtggtatgctgagtaagaactacagaagaacaaaaataaaagatttttttaatggcaacttaaaaaattatcaccacttgtactacttacaaattttcctccaaaaagttactttgactcatagtcaatttttaatcttggaacaacttcttgctatcacaaatacttcaagtgcctaaaacatcttccttaccagccaatatctcccgctccactctaagaaatgcaaactcgttcaagtttaacctgaatgcaacataatttggaatctttcattaaaatatatatcacacattttgaagccaaacatattttaaaatacctgtttttggtgatttggggtacatatgcttatcagtataacatattttaaaagatttttttctacatactcaaatctgtgttccattcattttttcactcccacacctttttgtctatccgataattcaggaatctttacagaaacatcttgtttccattgaaataaacaacaagagtaggaaaaagagtgaagcgaaatggttctaaattctatgcaccaacaggcattaaacatgcataaacttttaaagagatgccaagactcactaaaaaggagaaaaaaaatacaacgaaggtttctgagtagtttttagttactcaatttaaaaactttatcttgtaagcaaactttaacatcatccagagcatcgcacttatatatgaaagaaaaagttctttatcacaccttcagaaattacaactacaaattcctaatcccttatttaaaatctttttggctagatatgtttcaaaattcagaacttttcttagaatagtacgtctgccatatattatgaaacacttccagcaagctgtactgtaatcaaacacaatatttctgtagaaaacttatgaatatttacacaaagggaacattcagttacacatagcctcacttcccttcaggtcaaactttactgctaaaggagttagaaacgacagacaaaggaatggggcctgtcatgacatgttaatttgaaatctaaatctttatctttgataactagttcagagtcagtgtaaacatttggtctttccttccacaaaaaaatgaaacagtgtatttaaaattaaaaatgaaacagtatattttatttcagaaggtaaaagcaaaatgaattaatctgtgaaactaagtcaatcacattatgatcttctagaacttgggtagctccactctggttaaagattccatttcttggcacaacagtaaaagacatcagataggcccgggggtaagcatccctggggtattcaaataacttgggtagcaatgaagagctgcagaagagcaaggagacccgagatgatgtagtgtgctgcggcatacctgagttgggcaaactcagcctccgaagattaaaggaaagagcccaagtaggaatctgtgtgatcactgttcttttgccaagacacggggtggacaataagattcctttacaaagcactggtgtaagtgttcgcctggtgctgcaaaaagcggctcactgggaatggggaggagcgtgtggtaagccagacctgcggcgagaagttgggtgaaaatgggtcttaaccatcgcttcctgcatctatcccagagggttgggtaccttcgtgggcggagcgcggcctgcccagagtgccttctagatcctgggtcaggcgccaagctccccagcatcatgcaggaagctgcagccccgcagagttaggacagctcatttggcacccggcgagcccttcccaggcccgcagcccagaatagagccggggcccaagacgcccactggagacagggtcgggtcccactaccgcgcaggcccggctcgcccccgacgtcaggcacggggcgggacccttgcagctgtccgtccagtcccgttccccggaaagtgaggggcgggaccctcgcggctttctatccaatcctgttccccggcgaatgcggggcgggaccctagcggccttcagtccaattcccgcacctttgaggcccaagggggagcgagccggtgctgctgcaggctgaggctgcggcagaggcggcgaggcgcgggcggtgaggacggacaggtccgttgaagcagcattccctccctcccctaatccttcaactcgggggcgggggaaagttaagtcgtgcagaaccgcaaaggtgcctggatttggtgggggagtagtgtcatcaagcatctcgcctgctggggtctcaggggtaccctcaaggttgggccgcggggctgctccgttgtagtgcttagatttctctcacttgatggcctcttgagtgcagagttgctcttgggttggtgggaagagcctccgagctctcattgccctctgctcctgcttctaccccttgccactctgcgacgaacctgttacccagccactgaaaacgtatcctctaccctttgaacccgtctaatggaaggtgtacttgtctgaaacctacttaattgtatgatcatttactcctgctctctagcaggtggactatttgcgtgtgtttgcagtgattcacgaaaagtttgtcttgggaactcccaactcctagtttgtctgcattccaccttctttcactagcttgttcatttctttttccctcttaaatatttgttaagcttgtttctttcttcccacagtcaccgacttagtccagttccctgtgatctcaaaacaattgttgcagcaggctcctggcagtctcaagcagttcatcttcttggtgtactggtatgtgacaattccttcacgtattgttcgtggttcttttccactttctgtgaattcatatctaattgcccccagaaagtcaattctaattaaatctagcataatcattttcttagtgctattggaaccatcttatttaacttaatctttgtggttgagaattcaagaaaactcttcaagaaagaatccaataatttatatttttaatgtgtaccggttggtgggttaagcactatagtgggtatgtaactaatactcttgcttccagttttctagagtctattaagtggcacagaggtaaacagaatagcttatcttctctgtatgtgtgtactagtcttctattgctgccttaaccaattacacaaatgcaacaattaaaacaacacaaatgtattatctcatagcttctgtaaatgtgaagtttgggtgggcttagctgagtacttggcttagaatttcacaaaaccgaaaccaaggtttctgtagatttggattcttttctggaggctctaggggagaatccacctccaggctatttcagattgttggtagaattcacactgacatttctatatccttactgtttgtcagcctgagcctctttcagttctttaaggccatctgcatcttcaaagacaccacaaatccttctcaagcattaaagcagtcttacttgtctgccactggccagagaaagctctttgctcttatggactcaagtgattagattagttccaattcgataatatccctattttaaggtcagttctgtagagaatatcacaatcacaggagtaatgatctcaccatattcgcaggttctggggattagcaggggtggaatcttgggggccattcatagtaattgtgcctaccacaatatggtggtttcaggcaggattattttgtttttataatgtgctttcacaggcattgaaaacaaattctgactttattgaattgtatgattaaccactctaagataaggaaattcacttaaagttggttgccctaggggcacatggctagaaagtggcagagtctgtacttggatccagat

SEQ ID NO: 1883079 - DNA, 4001 bp, Homo sapiens
tttgttttttaagtgccaggggtttatttccctcacatgtgggatggctcacatacacaacacacaaaggcgttggcaccgtgggagagggcagcacccctggcttctgcttggcctcacagtgtaagaagggagaggatgggttctctctcctcccctcactagggcctaggggacccaggagcaaattccatccctttcacctctcagccaaggagaagccacattggtgacatttagttccaacaattacagtaagtggagaagggattggtctggtcccgaccattacacggtgaaggtatacatagtaaaggaagatacagtttggatgaggccacaatagggtgcagatgacaccatcagaagcatgtgcaggggaggggcagtcactcagcttctgggctgcttagttcctgggttggcaggaagggtagggaagacggatggggctcattgtttggcattgatgatgtctacgaattcgggcttgagggaaacaccactcatgaggaaggcagccacgtcaggctggctggccagctccttgcaggttgccttggtcacagagcctccataaatgataccagtgctctgagccactgcatcagagatgttggacttaagccatcctcggagcttcttgtgtacctcctgggcctgttggggtgttgcagtcttgccagtaccagtggcccacacgggatcataggccaagatgaccttgctccagtccttcacattatctgcgatgacctttgtctgctcaaaaacaaccttctcagtgatgccagcttccctttcatctagcttctccccaatgcaggcgattactccgagtctctctgccagagcatgggccacttttctgcccaatcagctcatctgactccccaaagacacgccttctgagtgccccaggaccacaccacccacgtgactcctaagtctttgaccatgccagggctgatctccccagtaaaggccccattagtcactttgtagcagttctgcggagccacagcaatcttgggagctagcttctgccgggccaactcgttatacgcagtggcgagagcacaaatcaccttggtgtcggcaggcacagtggccgcgttctgagtgccgatgagctcccccagacatttcttccgcccgttcatcttccagttcctccccacgaagaacttcctggagggcgccatggcgctggagctgaggcgctgtaggtcagtgtcagcgcctaaaacgggttttattaatacttggcaaggttgttaggcggattaaatgagatcttgtaactacagtgttttacacattgtgatcatttatcaaatagcagttatttactagtgcaaaggactagcagcaatgttaatatcaatatactgttaccttttgtccctaatttctccatagtacagtttccaatatttctgttttcttttgtgaattgttagaccactggtattggattcggacagaaaggcattcacaaaaatacagttcaatgtgagaataaccctaaagatgtatgcaaaatgctctggagttagagcaccaggagctgtaagcagaatgaagacctcttttgggcttaagaactaagtaaaggggagctgaacaaagattctaggcattttggatttatctcaatgtggcacatatttcaggtttgtaaaatagttcagttgactacgtgtctgtctcctccactagagccagcgtaggtaccatgtcttaagtcatctttggatctccagtactgtggccactctagggagagttgaattgacgcgccttgatcaccagggcagaaaaggattctctggagagggatggggcagtcggaaggggtaggaaaaacctggatccgtttccaaggagctgaaggcagctcagatatggggcacatctcggcgctaatgtcccaagctgctagcgaggaacagagagaacaccggctcttcttcccggctcctggcccggcagggttacttccgggagggggcggggagacaagaggaggcgtgccgggaaggaggccgtttgtagtgtaccaggcggaagtgtgccaaaggtatcggtgctgtcgcttccggtccgggtaaacgaaccttaggtacactggtgtgtggcctcccaagataggcttctgagggcaagtcagcgactgaagacgggagcgccagaatctgtggactcaagagtctagaatcaagtggaaaaaccggaaaaaaggccaggaacctgaatacgacctaatagctgtttccgagggggcaacttccacggagagccttctgccctggtaacggccaaagaggaggagatggcgccagtcagggagcggccgtggcccagacagtgaggaagcgcgaaggcggagcaaccgaggaatcctccggagaagaatcagagccgtcgctaccgccactaccgccaccaccatggaaggagcaaagccgacattgcagctcgtgtaccaggcagtgcaggcgctttaccacgacccagatcccagcggaaaggagcgcgcctctttttggcttggggagctgcagcgttcggtgaggggcccagagaggcagttctgtgccgcacggccggggcggggtggaacctaggctccgggggagaacctgagcccggcagttgacctcgtgaggtcctccttggggaggagctgctgtcgtggggtggggctgcgaagctacatctttgccgcttttgggaaactagtcgcacctgatcggtcgcgaactggccctttccccacccggcagaatctgatttgtaggtcttatactcttcgattgtggcatcaatctaatcttgtttaagttctccctttgccgttgcttcttgggccgtgcttttccgttttgtcttcctcccaccaaatccaaccccagtgtttctccaccttccgcttaagaaggctttattcgtctcccctccgtgtccaagacttgcatctggcattttgctcccagtcgtagccttatgcctcactctttttgcctattttcactccagtttgagtctgttcttctcgaaacttctcaggtttctagattcttactcatgcgagttttccccttgctttggagtggcaacataatatgaagaaaaaacagtaattctgctttcagaaaatctttggagttctcattttgtttcatattaatcctctaaccttgttatttctctggcttttagatttttatttataagatgggtatcactgctgctttgattattccatataaaactgtgtgtgcatccggtgagatatttaattgtagcttatatctgttgtatttctgcattctttgattcatgttttatgcttcctgccctaattttcacacctttgctgtgcttcatttctgtgtaaatgtgtattcttggttatctggctgacttaggttctaatgtaggatgtactttaaaaattaagtactttgaaaactaaagaggctttttttacaggctgacaaaatactcacctttacctttatttttgcattttatactcacaaccatattttttttggcccccttccctttattttaactcataactgatacttaaaggtgctctgccttattaaatcagctcctaggctgcaagtgcataatatttaaaaatttgcaactttgactttttaaaaatctggtcttggtatggagcaactttgccttttttttttttttttttttgagacagagtctcgctttgtcgcccaggctggagtgcagtggtcccatctcagctcactgcaacctcctcctcccgggttcaagagattctcctgcctcagcctcccgagtagctgggattacaggtgcctgccctgacacccgactaatttttttttttttttcttgagacagagtctggctctgttgcccaggctggaggagtgcagtggtgctatctcggcacactgcaacctcctcctcccaggttcaagtgattctcctgtctcagc

SEQ ID NO: 1883080 - DNA, 4001 bp, Homo sapiens
cgcacacatgtaatcccagctactttggatgctgaggcaggagaatttctagagccaggaaggtgaaggtttcagtgagctaatatcacactactacagtccagtttgggcaatagagtgagactctgtctcaaaaaaatgaataatgataataataatattgatggtacatatgggtgctgacattctggtagttaatgtactaagcacattgcatgcacattttatttaatctacacagaaacttcattaagggtttaaagtaccgttgaatgtaacataagaaattggggggttaattaacattccctaagtcatatactttaatttaataatgatggcaatccaagctctgtggttctgaaaatgagatttgttaatttgatttgcattcccccatctttaggagtactagcaatatttgacaacgttataggtcatttatagttcttcttttgagaatcgccttgtgatactctttgcctattctccttttggaggattaattttttcttattggttcgtaagaattaatatatactattttagagatactgaccctttatccaatgtgttgaagatattactcctcatgtgttattatttacatttggcacctatggtgaattgaactttgaaaaataaaataatatctgtccatttttctagggtgtctagtttgatgccaggcttagaaaggccaatctcacctagaacttctatgcaattcatcatcgtttaagtctaatgattttcattttattacaactaaatcactatttgtaactagtaaggtagaaatgcaacaatatttgtttccatacagtaagtcaataccaaaaagagaacttattaaataattgactatttccttgtgaatattaatatatcactttatcacatgataaaatattacatacatgcagctctcttactgcattttccactgtgttccatgaatcttctcattctagtgccagtattgccctctcttcagcactgtagctttatagttcttttcacattctgatgaagtttctctcatttttttgttttaagaattttctgtgcattctagtgtgatctcaatcctctcccttcccagttttaaaccgtgagacttctgtccagcaagactttttcacgctccaaggcaggcaagcttccctccttcacagggacccgagaactcagctttcagagctgttcctgcggaagcctcatgtcctccacgtgtgctccagaggcagagggagaccaactggagccccttccctttctcattcccagctgtgatgacagcagaaactgcaaaatttgagctaggacaacacaacaaccaagagagacattgttctacatctcattatgcatatttcaaacatgtgtctctatatacttcttacagaggtggtggtaatctgtgcatgccctactgaattttcacaattatattactgtacttgttttgtccccttatttccatctgtgaatccaggtgcactgcagatattagtctgctttctgagggtagggatgacaaataaaatatacaatacccagggaatttggaagttcagatatataacaagtttttagttcaagtatgttccaaatatttcatgacatggcacccagtactactttaaaaacaaacaagcaaacaaacaaacttacactcctactttaatgaacaaaaattgtctaataaagagatcacacccacaggattacaggcacccccccccccgccccccgccacacacacacacatttaccttagagcagagtccaaggcccaccaacacacatgatcctcagtccttttaataaagaacattcaaccctcctcagagtggccttgggcagttgcctccaagtgtccttgcagatgtgaaaaggaagttggttcacagccctaatcagaggcttcctggcaggacaaggtcctggcatcagcattagctgctgcaactctgaagggcagggtgtgagcctgctgtgggactgccccctcctagggctgggcctgctgactccaggggtcagctttccccatatctgcactccctctgctggaggcctgaactctccatgcccctggctctcttctgcagagggcctgctctcagctgccacagagggtgctgcagaactggcctgagcagagaggcaggagctcctctgcaggtcctcccaggcaccacccttctggaaggaaggcgtgggagtcccctaagacacatcctcagtcacttctccctgcttgtgactcaggaagaccagccttccccactgccttctgtgctagggatcacttccttgttgagtgggacctgagttttgagaggatcttctgctcctgttcatctgggccctttctttcaagaccccagagacgaaggcatgtggtgggccctagccctgcttctagctttcctgtctcttggtaagtgtgctgcctacagagaggctcacaggttgggttttgttttggatttttcttctttagcaagggacgccatactaaggaatacctcattatattttatgttgttcccattgcagccagtcagatatctactaacttggaagcgaaaataaagtcaggcaccaggcagatggggtcatctgctgtaatcacctgtgatcttcctgtagaaaatgccttctacatccactggtacctacgccaggaggggaaggccccacagcatcttctgtactatgacatctgcaactccagggatatgttggaatcaggagtcagtcaggaaagcatgatacttatggaagtagaaggataagctggaaatttatacctccaaaactaaatgaaaatgcctctggggtctattactgtgccacctaggacaggcagagtgattcagacctgctctacaccacactgaatatctgtcttgtggctgcttctggtacacaagagagagccgtcccctctcatttcctgccctgaatttactgtattctgtacaaagagaaacagcttaactcctgatctcccccctaatattacactctcctgtcagcagctgtaccctgttccccaccctcccccaggactttcctgaagactaagctgccatctcagctaagcctcagctaagcagcctggctgagagcaaggttttctcagctctcctaggacatgggggaggcccactcactctgtttcttagggtccagctgtgaagcgagatattttggacagcaaatgggaagggtatttatactgaatcatgtatccaatcatggtccagagatcgcagctgagagtgctgcttactccttatgtctataacaatataggcaatattataaataccactaaaacactaggcctagatatgcagttaaacactctctccctctgccctcccttttattctctctcctttcttacttccttgcttgcttttattattttttcttccctccctccctccctccctctctccctcccttccttccttccttttttcatttcttccttccttgcttttctctctctttctttcctttttgggtacataatccgaatattttttcaacaaaatcatttgaaataatttttctttacatgttcatgccaacattgatatagctagtttatttgttcagttttcattttaaaattttagacatttgttgtattattttgttttgtttcatatttgttttgcatatgtaaactatttacatggaactaaagtcataattttaacgaagatgcatttggagattttaacttacattctagatttctttttctctctcttttttttttttttttttttttgagacggattctcagtctgtcactcaggctggagtgcagtggagcaatctcggctcactgcaacctccgcctcctgggttcaagagattctcctacctcagcctcccaagtagctgggatttcaggtgcccgccagcacatccagctaatttttgtatttttggtagagacagggtttcct

SEQ ID NO: 1883081 - DNA, 4001 bp, Homo sapiens
tgtgaactgtgtatttcctttgtatttcccatataccacagagcagaggttagtctgcgttaaactaaactgccttgaacagccagatggctaagatttctgaatttgaaagaaccgttctatactcatgaaactgagtaggtcttgatcacacagcacattctcacacacaacagaaacactgagatttgcaaggaattgctttattttgtatcgtgctcccttgccctctactgtcactgcatgatatggcttctgcctaagtctttgacctcatcctatgagcgatccccctgctcattacccttaattcctgccgatttctcagcttaatatctttgttacttcagggagtatatgaatattgttcccttggcctggaatatcccccaggatttattcatttggctggctccttctcttcctatggatctcacctcttcagagatgatggacatgaccacattaactaaagcagatttcttatttcatgcccatatattagagcttgccattaaaaaaaatactttgtttttggccatttatttgtggtggctactccctctaccaaaatgtaagctccatgagggaacacttattttcatcttgttccttcactgtttcatcagtgattaagtagcccttgctagataataaatgtttaacaagtattgttgatgaatgaatattatttactacccatgagagggaatcctctgacatcttcctactgatctcctcctaaactgcccaaatttgtgttctgtttcccaatgggaacaagagtctctctttttccgtgtcttctgattttactaaaaattttctgggatgcttcaccagatctacatttgtttgaacagattcctcccagctcgcaagagaaagggatacttacggtaaggggcagtgggcagctgtcaatacccagtcaaggtgaatgagagaccccacgcagggttctgggaaggactgaagatagaccatgtaaggaatagtaaaattatatgtcagctcctgattatctttagagtctttagccagagcagctcctggagaatcaaggggccataggtggaaagggaaaaagaagttaaaaggccagaactggctagggtagttttccctaacctaaggttttcaaatgtaatgtaaaggtcttcaatttacctttcatattttaatcaaggaaaattatgcatgtcctctaagttatacacaataagaaaattgacacatggttttgctgagatgaaattacattaaaattctgtgaaacttacttacatgctgatcagaagctcctattggcagtgctgtgtgttacaaagatgaaaaaaataatgactacttgaaatttttttttaattcacttttgccataaatgggggtaaaaaagtatggcgtgatttaaatttttttaaattcacttttgccataaattggggtaaaaaattactgcctgactttggtgatgaaagaaatagaaaagcttagggcttccagagcccctgacccagctcaccccccttttccaggcccatgttctctaatgtggttccttttgttttcttcaacggttgttttatttaaatgtcctccgcttcctagctgtttagttgtgcccagctactcctctttccaatctttcatagactatcctgggtgtcacaataggcagaaacaaagccccaaactctcaccagctgcactcaagagagcgacgatgagaaaacccttcgtggcagacagatctcgccaggaacagacaagttgatcaagctgtaaactgtcccaatctttagtccaagtgtccttgccaagaacagctgtggagattatgggcagaagacagatgagaggagagcagtcttcacatgagtccttatcaagacccaaatatatacggcattgctgggagccgtctctgatgtgggtgaaagagagtggcacagaccaagccgaggtcctggtgcctcctttcctatcctacaaatcttgcctggagttattatgtacctgctgattttccttctcctctctatgacacaacctttctttgttgtctccttctccctctgtgacttaaaccgctctccctgcccatcttgctgccatctcacctcttccagagacttccagaggattggggtatgaaatgcacttaataaatcattgcttttttcattccttgtaattttagtgatgaggaagctatggttctcttggaagttagtggcaaagtcaggactcagaactcagtctccatattctctgtgtcaaggctgaactctatcttagcctgtgttcccagaaaagagcaatggttaagaaatccctccatcgttttgtgttcttagaaatgaattaccacaaagagctacctttcctatatgacttaaataagactctctgccccttctttctcccagctcccagaaaattttgcatggttctcttgcttacctgtgatgcatcaaatacagacctttcctcttttgcccggacttgctgacatggccagacatggaccatccaactccccattttttgtttcaaaaatgattagctgagattagaatggtttgtctcttcgaaactagctacattaaaaaataaacatttcctattcagccaactaactgaggcttccccctgattgtaaaacaactcccactataaatctccccacctcaaacttatctttttctccctataaaaattccagggcaaaaccaccctgccaagatacttcataatcttcagatcttggatgctctcctattggatgatctgaatgcaaccaatctccttactagttcactttttgtcttctatgctgattactctcaaaatgcatcccattttttctttttattagctacccttatatggtaacttccagcctgtcccacagagacgggtaataacagtaggttcaatcccacattttatatagagtagactggaaaaatgcaaactatatagtatcaaactgatctttatcagagtaattaaggagctgatcagttataaaagtccataaacataacattcctatatctgtaaaaattataggcagacttagttctcctaaaatttaattattaacttaaaacctcatcagtatgttcccatgtactctaaacttttggggacaatatttctttagtacccaaaggttttaaaataataattattaaaataataaagtcagtatttgttttgtaccatgtgacaaatactgtgctatatgcccagcatgtgtgacctaatttatcctttatcacaggcctatacattaaatatcgttattatccattttcaagctgaagctctgtatggttaaaaaccttgctcacaaccatactgttgaagcccacgacccccaacattttaggaaatccagcatccctctacttgttccaattatttatctggtaggactgggccttatttctgctaagttctttgcttatctccagccttctttgtcccagcacatgaaaacagctgtcttcattttatttcttaattcaccactaacctaattctagggtgggtttcagacttttactgaagctttggagatattacaggaaattttggcaccagcctgaaaacatctttaaatagtatatcagaaatcactttgtgaatgtttatgaatcacctacagtccacggagtctgttaacctataacctggtttctgccacattgctggaacctaccctgaattccttttttattttcttgttttcttcatgtctttagtcagctcacatttctgctgcccagaagccccaagtagagagagacaaacatctacccttttaagctatcggaggagaactgaaaatttttgttactatcttacattgagaaatccatattttctctctctattctcaatctctgcctccctcccacaaagcctcaccaatgagaatatgaaggcgactattgttagtttcctttcttttaaaatgtctttttctt

SEQ ID NO: 1883082 - DNA, 4001 bp, Homo sapiens
ctgcctttcagcgcactgcaccatttttttcctggggagtagtataccctgtgggttaaagcactttggacccagccagtgctgtgccaccacagccattcaggtcttgggggatggtgaatgacccaggatgagtttcctgtctggtgcagtgcctgcccttgcagggtttccagatctccacctgcgctagtgtcagggttcatgtaagtagaggagctctcttgtggttcatatcgcaacagtccattgcagagacgtggactgctgaagctcttttacttaccgttttcctgtaatagggagtccctcggggctcttggttgatcttggttaagctggctgcttcctttcttctctttctatgcctctggtgtttgctgtgaattcacccttggactctagtgttctcttctatttgaggtatttttattcctaattttggctcttctttctggagagggtggctgtctggtatctgtcgtcagccattttcaaccaggtaactgagttttgaccaagttggtgaaaatttaatataagttgttatagtgttaggactgctgagatcaaatgcagtgttgtgtcacttaatgttaagcaattgcgtcattgttctaacatcatagagtgtacttacacaaacctgaatctaggctatattgccatagtctattgctcctaggctataaacctatacaacatgttactatactgaatactgtaggcagttgtaacacaatggtaagtatttgtgtttctaaacatatctaaacctagaaaaggtacaatattaaatacaatataaaagataaaaaatggcacacctgtatagggccacttaccataaatggagcttgtgagtctggaaattgctctggatgagtcggtgagtgaatgtgaaggcccaggacattactgtacactgctgtagacttgataaacactgtattcttagggtacactaaacttataaaaaatatttttcttcaataataaatcaacttcagcttactgtaacatttttactttacaaacttaaatttctaaaaaactttctgactcttgtaataatactcgaaacagcaacacattatacagctgtacaaaaatattttttcctgatattcttattttataagctttttttctattaattaaaaatttttttttttttaccttttaactcttttctaaaaaaggaagacatgggggctgggcgcagtggctcatgcctgtaattccagcactttgggaggccaaggcgagcacatcacttgagcccggaagttcaagaccagcctgggtaatatggcaagactccttctctgcaaaaaatagaaaaatcagttgggcatggtggtgtgcacctgtagtcccatctacttaggaggctgaggtgggagagtcgattgagcctggaagattgagggtgcagtgagtcgtgatggcaccactgcactacagcctaggcgacagaaaaaccctatattaaaaaacaaacaaacaaaaaaaacaacgaagacatgatcacacacattagcctgggcctttcctaagccttcacattcactcatttgatattactgtgctgtgtggtttggatatatgagccctccagacctcatgttgaaatttgatccccagtgttggaggagaggcctcatgggaagtatttgggccatggaggtagatccctcgtgaatagattaatgctattccttggaggtgaggagtgagtgaattctcagtcttaattcccacaatatctggttgttaaaatgagtctggccccttccccttctttctcttgcttcctcttttgccctgtgatctctgcacgtgctggctccccttcactttctgccgtgagaggaagcagcctgaggccctcagaaaatgcattggtgctagtgccatgcttcttgtgtagcttgcagaactgcgagccaaataaacctctattctttataaattatccagccttgggtattcctttatagcaacactaaatggtagtccatttagacacactgtctttcacttctacatcttgtctcactggaaaggtcttcaggggcaattaacaggcatggagccataatgtcttaagataacaatgctttcttctggaatacctcctgaaggacctgcctggggtttttttatagcttacttttctttatcaatagaaggattatactctatttactctaaaaatatagtaaatccataaactagtagcggagttgttttattttcattagcaagtattatgtgctgtacataattgttgtgtgctacacttttatttgactagcagtgcagtaggtttgtttataccagcatcaccacaaacatgaataatgcattgtgctgtgacattactaggtgactggaatttttcagttccgtgatgatctcatgggaccagtgttgtatatgcagcctgtcattgactgaaatgtcattatgcagtgcatggcggtagtatgtctagctgttaaacgtctcttgtgctcctagacttcagttttattattagaaaggaccttactaataatttaatttaactctattaacattttatagatggaaaaatcgaggttcaaagaggataagtgacttgcccagggttctctaggttgttagcaactctaggactagaatcagttttccagctaaatctaatgttcttcccacactatgtcacaccttcctcccttcagtctcgttccttggtggcctcctgtcttcttcatagcagtcatagttatcagaagggattctcataactccatttgtatccattttatttaccccggcaactgcttccctatctcctatgttgctagctgataggcactggcatgtagtaaaaacagggaatcgccatatttcctagtcctcagaggctattttataatcttaacatttctgttaagattagaggcttaacatttctgttttagattcacacgagaagaatcattgagaagccactattcttgaatctggagaactcaggagagatcagatcagtcctattaggttaggtccatcctggaatgtttgttaactggctctaaggggcatttgttctgtggatggattgggatggaaccagtttttggggtctttcctgattgagatccacctgactagtgctgtttcatcaaataagcctccagagaaagaaaagtaaagtgataccttgacatatctttaacatgttttagtttaatgggataagatctgtttttagatataaggatttgtgaattgaacagaattatagttgaaagcaaagggatgagaggatttttatatagcaacaatgatagtatgaaatccatgctattgcaaggacaactgtgttatgcttatgtttgtgcctgtctcttctactagactgaagagggcagacaccatgtcttatttaattttatatctccaatgtatatctccttgtagacaataaagtatggttggttgaatcaagaatcttttcttctttaaaattcaagactgatgttaaatattttgagccttcttgcggttattcatctttctgaagctgtcctccaggttatctccagattatttacctctctgtgaagtgtaagctaactgcctctacattttgttatcagtcaggtagcaggcatatactatgtttaaaatgttgtattgtaatattaggtgccattgtggcgagtgtgattatgatcaatttagtggggatgagataagagagaaatactcagaacaacttaaagaggaagttcttacattaaaagtttagaatttagaaaaacatactaatacttgcaaatagttacagaagtatttaacaagcagaaatggaactcctcattaccagtttaatctctaacagcattctaggcactataaagaaacagtcctcatcccatctcggttgacttttattatttacacttttatctcatagtcagctttctggatatttaaagagagaa

SEQ ID NO: 1883083 - DNA, 4001 bp, Homo sapiens; identical to SEQ ID NO: 587119

SEQ ID NO: 1883084 - DNA, 4001 bp, Homo sapiens
ctttactttttagttacatattatttacttaaataaaattttaaagttatagcaaaatattttcacttgcaaattattttgtaacttttaaccttcaaagccacaagtatcttattttatgctaatcttcctatatttgatttttctttcctgcttagttctttaactggccttcatttggatatatattgtaaactgtgatcatatgtctccttttggcattattaattaaataggtccttctttaactgttacatttttaaattcattagatattattttgtataattttcgagctttccaggcttgtttttattttctttaatatctattcatatttctgtttctttattgtcctcttaaataatagttattttgtagcatattttcctatctggtaggtaaagaggtagagaactaggcattgctgagctcactcacatgctaggtttactctcctagatttttaaaatccattatctcatttaatgctaaaaatgacccttggcagataagtattaccatatcagttttatacataagactttaagcttcagagagattttgtgagcagctcacccaaagtaacaagctggtagatagcaaatctaagaatcaaatctgtatctacctggtaccataaactatgaaattttcattattaatttatattcctattttatttttgtctctttttaaggctttatataatattctaacttgtttatgttttcagatgtattgctaattactttgtgattttaaaaactcagaaaatcttttttgaaagcttgaatttaattaagatgaacaccaatttgtataattatggctttagaatacctgttatttattcaggttgcagtttaaattcttaaaaatcctttggaattttatcatgttttataatacagatctagttacaaccttgggcaagacagctggtggctaatatgttgtgcttatttagaggaaaatttatcatcaattaatggcattgtgacagaagaaaaaaaagcaagctctgaaattataaatcataaaacataagccagaaatggagatctagtcttccttcctcaacccatcacttccacacaaccagcaaggaagatatttgcctagaagaaccaggtggtaaagaccattaactctaatcatttcattgctgataattgtatataagcatatgcaataatagtcatattattacagcaactagtcaccattcattcagggattattaagtgtcaatcttcatatgtacatcatttccttcaattgtcaaaaccctgtgaggattatagtatagttctcatttaaggaatgaggaaacaggccggggacagtggctcatgcctgcaatctcagcactttgggaggccaaagagaggggatcacttgaggtcaggagtttgagaccagcctggccaacatggtgaaaccctgtctctactggaaatacaaaaattagccgggcgtggtggtgcgcacctgtaatccaagctactcaggaggctgaggcaggagaattgcttgaacccgggaggtggaggctgtagtgagccgggatcacaccactgcactctagcctgggtgacagacagagcaaaactccatctcaaaacaacaacaaaaaaaaaaaaaaaagaaagaaatgagggaacagacatactgtgctgtgagtgatggagctgagatgtgaagcagccttcctctttaaccgctgtgcactagtgcctctacaaatgagtaggcagagccagaggcagaaggtctgaggagtgtgtccctgctcatttacgccccttcgctgctcagatgaaggcactggttcagcctatcagtggcagaagtggtccttggaagaaggagctcttgacctttcttgctcttttagggtgtgtgttattgtgaccaacagagtgaagcctttctagcaagttttcaacactttggccatctagccaggaagctgctcctctggtggcttcctgaagtggcagacatcatggaatcacttgagacaagaacttagaacactggcaaattccgtttcatgtcttcttaattacagaggaactagtagtcacaagcaagccttcatgtggccagttatgaatggaaaaacccatccaaccttgatatcataggcccaaatagttctgaacttcaatgagtaaaattaaatatggtttgcaggagaatttaaccagtatagactcttaatctacataattctggttcaaatatagccctagcagattccttggcctgtattatccaaatcattcccttatatctatttttgtcttattcatagacacttgatttacatagttgccatttatatgatagaattacaatgattaaattaatttaacctgtgtaagcagccaagttggatcatttaaacaaaaatcagcggtaagggctgaattatatgactgactctacctcaaagcagtgcaccatttactcacatattaaatgagacaagcactctccctgcaaagaccctcagtccctcatctccctcctcccaatgactttgacatcctgtgttaagatcaatcctgctgaaagtggccactcttggctcctggcagctgttgcagcagctgcctcttaacagtcaggttcacatcatggtgaacacacaataattgtatttcatagttcagagaatcagcattcctgctgagctactacagactccacacacggagacacaagtaccaccttcactgcagccagtttccttacaaataccagctgttgatcacagcagtgaacagcttcacaaaagtccatcccaacattggaaacaataagagcaacagaacagagcctctaaaaaaagtattttgtagcatgacacagatacacatacagatatatatctcatagtaaatgataagaagaaaatttttttaccctgaaaaacttcaaaaagccaatgattcttttaacttttggaacatagaatacttatttctggttctacactcagagatgctgattcagtaggcactgggtggagttctggaatatgaatttttaataagctccctgatgagtctggcataggtaggctgcacaactcactttgagaaacactgtttgggagtcttgatcagttctagagtagtggtaaaattatctaattatgaaaacataattatacaaaataataataacatgagccccacttgttcagggcacatagaggaattgcagaaacaagctatagtatttgtagccaagaagttatagttagggtgataaactgtcctagtttgcttaaaactaagaggttttccagaatgtgtgactttgagcactaaaggttcaacaatacaaggcacagttagggcttcaaagtaagtataaacaaattgctgagaacttgatgagtaaccaattctgactaagagaaaaggagaaagctttaacaaaggagtttgcatttttgtaggaactcagcaaataggaaaagactcatacaaaggaaacagcatttgcaaagccatagaggtaacaaaatatctgaaaacattcaggcaataccaaatggaaagactgaatgagattaggaactcagaagaaacaaggctggagttagactacaaaaactaatgttggcactttgaaaaaaataatcatttcacacatgctctgttgtgatacgtcccttgtattagagttaaaacaagaaattctttttggaatagattggattagatgaggaaagtgaagagggcctgtgttgacaatgaaaccagtattggttagaacagaaaagacgcagcttctcaaggatgttttagggagacaattactaggacaattcagtgtggcagctgacagaagagatgagaacattttcaaggcttcctcaagaccaatgactgtgataaatgctattaaaagagtttgggatcataggaggaagaacatttctttttggtgagaaagctaagataaattcagtcttgaat

SEQ ID NO: 1883085 - DNA, 4001 bp, Homo sapiens; identical to SEQ ID NO: 587140

SEQ ID NO: 1883086 - DNA, 4001 bp, Homo sapiens
cgcaggcatccaaatgctgaagcctccacctcctgaaaacgtctctcctttcggcctccctctctccggctggatgaccccaaatctcgtcctaacgctcctccactgcccctctctccaccacctgctaaggaagggccacgctccttaagctgaggcgccagctgctttacaagttttgagggaaaagaacggatttctctggttaggccactctgggtataaacgacccaacggcctgggacaccccacgatggggttttcttttggagtctggatagagcagagcgtgcagtactggtcgtcccattgcgggctagctcgccaaagacgccccttccttgcccttctccctaggctcctgagagagccctggagcgttctggaaatcctgctacctttaggacctgggggatccgagtaggggggtcaccttccccgtccccagcgaagtcggcgccggaactgccctaatggaaaccagccgccgggcgctccgggagggctcaggccgaccccggggtccattagaggcgccccaggccgagggagcccgcggcggctggaaggtgaacttgacatcccggctccaccgaccccgcagcggctcgcacctcatccccactccggccagaccaaagtagaatcctgggtgtgcgcgtgatttcccagggagggcggactcggggctttccctgtcgcaccctccattgggggaccgcccccaagtccccgagagcccctcgggcagagtccttagggctcagagcatgggaggacctggcttgcctggtggaggcgagtagccgaggggtcggtggagctgcgccccaaatgagttcccggcgcgcgattctccccgaccccgaccctttgtccgcctccccctccctcgtcccggcccttggctcaggggacccaggcggcggcggcggaggtggcagaggccagagcccagaggcgcagcccgggcagctaggagggtcgcacgtggagccgtcccccggacccgcacagcgacgaaggggggaggctgcaggcgcgcggggtgggggctggggcgcagcccgagaagtgggaggggatcgggtgaggggtggtctctgaggaggagccaggctggaccgtattgttccgcgctcggccggggagggcgcggggcgctcggcttcccgtgttcctctccccgccccagccccgtgggcgcgagaggaggcggggggctccttgtgcaccagagacgcagctgccttgttcgcccggtggggtgtggatcctccgagcggtgctgggaagggggttctctctgcccgcgcgcccaggactctacccagggcggaggtcccgagtgggccgccccccgcagcgccctgggttcgcgggcccagaggctggaggcagcggggagctagggtccttcaccctcccctcgccgcgtgcctccgcaggagtcgggctccccgttccccgcgatggccgcgggccgcagtcgtacggagccgccgcgcggaccccggggcgcccctccctagcggggcgcagctccttcttgttccccgccctgccagcgggatggggggcggcgggtcggccctgagggtctgcgccgaccaccgcgggggcatcaactggctgagcctgagccccgacgggcagcgcctgctgacgggcagcgaggacggcacggcccggctctggagcaccgcggacggccagtgctgcgcgctcctgcaaggtagaccctcccactccctccctgacctcttcgccgcagctcaccggccccagaccgcggaccccagctcctgcgcccgcagacccctttctagaagtccagcccccgctcatcccggcacactagcggaagagcgcttgtctgggcccagcatctggctgttgagcgcacggcagggcagggtgaggtctgggggtggggtgcgggtgcagagcagggtgcggccgggatcgggtgggtgggtcgaggggcgtccgctacaaaggcgaagatcatttgtcaaccagcggcaggaaatctcccttgacaacaatgttaacaaacaaaaagttgcacctatactccttctaagcaaaccttcccttgtctctaggtgccttgtggcctctttgtggccaattgtgctcttctgctggcatttcctgttgacgactctcacagcaacagtagacgcttgttaagggccagcggtgcggagaagtgtgccgtcgtcacactatgttaccccacatacagacgtggaaacaggctgggagttaagtaattcgcccaggtcgcacagccagtgaggggtagatggcagtctgagccctctcattgctgtaaaccctgcctgcatgcctgttggtttctatttgtgccctgtactcactcaggaggtcagtgtgcctcgggtgcaccttcccctgggcctgtcccatgcactgtgaggtccctttcagctctggccctcctactgcccaggtagcacacgtagtcccctggatgagccgcgaggctttctgctgtgggtagttctttatcaccgcgggcttttccaccatcatcagtgaactctctgtggcctcgcccaggccttccaacttaggtaggatattagccccaatattggctaatcctgatactgctggttttaaataagaacagttgaccaggctcggtggctcacacttgtaatcccaacactttgggaggccaaggtgggtggatcaccagaggtcaggagtttgagaccagcctggccaacatgatgaaaccctgtgtctaataaaaatacaaaaaattagctgggcgtggtggcgggcgcctgtaattccaactactcgggaggctgaggcaggagaatcacttgaacccaggaggcagaggttgcagtgagccaagatcgtgccactgcactccagcctgggtgacagagccagactctgtctaaaaaaaaaaaaaaaagaaaagaaaagaaaaaaatattacatagttagggcagatatttcaaacccaacagggatgacttttggattaccggttacttgggagttggtgtggataatggagaggtggccacaaactaacacacatcccccccaaacagccacacacacttataggcattcaaccaggaatggaaaatatgaggtcttttagaaatgttaagtccagttggtattgctcccaaacataagactgtcttgggggtagaggggtgggtggtgtttcagaaatgcagatccccaggcctgggctccagtgatgcagtcctccatgaatagggctgtagaactggcatttcttcttgttgttgttttttgagatggagtttcgctcttgttgcccaggctggagtgcagtggcacgatcttggctcactgcaacctccgcctcccgggttcaagcgattctcctgccttggcctcctgaatagctgggattacaggtgctcgccaccacgcccagctaatttttttgtatttttattagacgtggggcttcatcatgttggccaggctggtcttgaactcccgacctcaggtgatccacccgccttggcctcccgaagtgctgagattacaagtgtgagccactgcacccggcctagaattggcatttctaacaagcttttgggtgggtcttatgcacagctggccccgggagcccctgggctggggacgggttgtgggagcccagcttagcccacaattaggtggggtttctccccagtgaggccccaggctttgccaggctgccggtagcctggtgggcacttggctttgcccccacggcagctctggagcctcaccaagcctccagggcccaccctcctgcccagctctgtgtctggcacctgtgcctccttccttcacacccactttggtgaccctcacggctgcttgtccccttgaggtactgacactcacttcccagggagggtgcccaaccttctgccctaattgagggcagggctatccccgctcaagcaggacactggaat

SEQ ID NO: 1883087 - DNA, 4001 bp, Homo sapiens
ctcttattttaaaatgtacagttaagtaattattgactatagtcaacctattgtgccatcgaaaatagtaggtcttattcgttctatttttttgtacccattaaccatccccaccttccctccagccccccactaaccttcctagccccaatttttaaaaatacataagtacacatatacacaggggtgcatattcttccttgtgcctcaggctccagtctggcttggatcctgtattcagttaaaattttaatacagtcatgcacttcataatgatgttttggaaaaagactgcatatacaacagtgcatatacaaaggtggtcccataagattacaatggagttgaaaaattcctatcgtctagtgacatcatacctgctaaaacatcagaatgcaatgtattactcatgtgttacttgatattaataatgactatgtcactggtttatgtatttactatactttttattatattattatttaacttattttttaaaagttaactgtaaaacagcctcaggcaggtccttcaggagggattccagaagaagacactgttataggagatgacagctccctgtgtgtcactgcttctgaaaaccttccagtgggacaagatgtggaagtggaaggctgagattgatcataatgaccctgtgtaggcctaggctaatgtgtgtgtttatgtcttagtttttttaaaaaatggctaaaaagttaaaaaaaaaaagaaaaaaagcaaaggtagaaaaaagcttgtagaataaggatataagaaaaatatttttgtacagtggtacagtgtgtgttttaagctaattgttattacaaaacagttaaaacgtaaaaaaatttggaagatttataaagttatagtgagtgaaagtttattaaaggaagaaaagtattttttataaactgagtgtagcctaagtgtacagtgtttatgaagtgtttagtgggtacaataatgtcctagaccttcatgttgggccaccactcactcatttactcacccacagcaacttccagttccgcaagctccattcatggtaagcgccccatacaggtgtgccatttttatcttttataccgcatttgtactgtaccttttccatgtttacatatgtttagacacacagatacttaccatgaattacaatggtctgcggtattcagtacagccccatgctgtcaggtttgcagcctggaagcagcaggccacaccacagagccgaggtgtgtccaggctccaccatctaggtcgtcaaagtacattctgtggtgttcgtacagcaacaaaatcgcctaatgacgcaatcctcagaccttaccctgttgttaaggtacacatgactcttattttgttcctcccggatttcctgcattaatttttactttttaaaatattacattaatatattatttgattgccagtttttctggtgctcccttaaattgcacagcctgccagcccttccctggctcccctttctttttctgcttttcttagtgcttcaacagacctgggacgttctttttctttctttttttttttaattttcttctttttttctttttcttgttttgttttgttttgttttgagatagagttcgctctgttgcccaggctggaatgcagtggtgcgttcacggctcaatgcagcaacgacctccagggctcaggcgatcccccgacctcagcctccggagaagcttggaccacaggcgcgcgccaccacgcccagctaattatatattttttgtagagacaggtctcactatgtcgcctaggctggtcacaaatgttgcttttttttccctccaggcagagctagtctctgttttgcctacctcgccccctcctgggcccagttagaaacctcatcacataatttcatttctttccaaacttgaaaccttctaaacttgaaaccttctaaacttgaaaccttccaaactcaccacttggcggcgttgatccatccgcccgcgcacaaagagaagatcgcggaacttcagagttaaggggagccgtttcccgcagcgctagccggcagtatttccaaggcgcaagttgcggagtttctgtttcctttttcctctggcgagctttgcgttccctgtgcgccggaagtgatcccctgcgtggctgggctgctcgggttagatcgtcaggtgagggaggaagggatagccagcgcgaaggaagtgctggagtcgtgtgttttggctgcgcgtgatcctgcgtgggtcgggaggtgtttctgtgtaggtgtctggccctttcatcagtcgtgcggaggaccgcgtgatttccttccagttctcctcggttttcaggtggtggcgccatcttcggtaaagggtgtccacctctccctatggtgtggctggctagcccgggggtctctacgctgcttggtctttgttaacggagatgaaggcagtaatttttcagtaacaggtttcagatataagtcccttggtgatgctaatatttatggaggccttactatgcattaagaacttttttagaagtttagaaaatggcagtgaataaagcagatacaaatctctgctctaagggagcttgcatagtaatgaaatttgagaagacagtggattggaagtgggattaactcagaatcaaaattttgtcgatgggttggaggaagaggaagttatttgggaccaaaaagacatacaggtgtgagtttatttgggagggaggaaggaatcctcatcagatgtgcaggaatgttggtacgttgtggtcacaaaattggagtgcataaaaattatgaatatagttaggaatttaggactggtgagttgtacttttgccataagaggtaatgtttttttcttattttgtttttttccttcaggaaaagcctaaagattagactgtaagaaaagaaaatagaagccatgtttcgaagacctgtattacaggtagtcacttgtctgtattaatactgagatgtattactatcagccacagtgatcagaagacttctttaggcttttaactacaggggcaaaagacctttgagctcacccacccacctctatactcatttgatatggaggattggggacgattttgccagtgtaaattatgttcactaaaacaaaaaaaaagttcaggtttattcacacgtaataggaatcattaatttttaaaatgtgtgtgtgttgcttgaatttaaccagtgagaggacattaaaggtctttagtgacctaaagactgtaggaatcattgttccaacttttttcttaaggcatgtagttgcttttttgaccatctacctcctgtgttgctaaacgttcctcttcccccatctttccacactgaagagagcatctcaagtctcagtggtcaccagagatttcactatgtagaaaatgccttctcattccacttagtatgggtcctcacttttccagacactagcccaccttgagccagcttagactaccatttttcctcacttaccacattcgggcaccagctcctgtagattcttctttggctctcctactccccatcctcctgtgaagaccaatgaagaaccagttcctccatgactctgtcattttccccaccttaatcctatattcttggatccccactttaacctgtatgtatctttaatctatttttttctgtattgaaatgtgaaacatgaaaaagttattgcttcttaacactaacgttacagtattaaaatgtctttaaataagagttaaaagtttaatttaaaaaattatccaagttaaataatcctttcctaatcttctccagtagatttttgtgtgccccaaatgagacattgttattataaatctctgtgtaagatttatgaggtctagcttgtctgagcactcaaatgacatttccagaatcatgacacaggttctcattagcagtttgattctatagtatgttgtactcatatctttattttcttatctgccctctgctcctaagt

SEQ ID NO: 1883088 - DNA, 4001 bp, Homo sapiens; identical to SEQ ID NO: 587154

SEQ ID NO: 1883089 - DNA, 4001 bp, Homo sapiens
aaattggctataaacgtttaaaataagaagtcagaccccatctcaaatcaaatacatactgaaatacttaatatgagctgtaaagctaaatgtaagagctaaaatgacaaactccttacaagaaacgcagaagtaaatttttataatcttttattcaataacgatttatttattttttacatttaggtttgttttatttaagtttaatgttaattccatactgtgtttcagtaagaacaatacagattctatatctgtggctccagtcagatatccagtagaacaaattagcttcaagttacacatactgaacaaaagtgattgagctagaagaggggaggagtgaggggaagcaggtagggggatggagaaggagtggaaacaaataattgaacacgcatgcaggcccttttccacaccacctgcaacgctaacccgcttcagtgggagagtaaaagtaggcaagaatgagcagccacgattgttgaactgttaccagcaccatgcttttcagcaacatttcagtagagtttgaaaaactttttacagcaaaaccatttcaaaactctctccccaaacaaaccttaaccatctcaagctaacaccgagttactttcaaacattggtataaaatacggtttaaacaattagaaaaactgaaaaatgataccacttttgcctctatagtgtgattaatatctcccttagacgcttgcatcacctagaagcgtcacctaatggctttcaaaggtaatttccatttctaatggtaatcttgccacatctggcacggagacaatacagtaatgctgagaaagcctgtatgcggtcctgttagtgtcttaaagaacctaaaagctgggaccagtaaaatccacagaaattcactcttgcctttaagaacttttgaaaactgtttaaaaaacaaacaaacaaacaaacaaacaaacaaacaaaaaacagggcaggaacctaaattctgacgccaaatgtaaaagtcagatttggtggttctcagtgacaatggggagttgccaaggggtgggatagggaagagcagggtggtcggagatggtttttcttgttggcttttatgtctcactgattttcatcttccacctcctgcagcgcttctttattctgttcttcaccatcaccctgcatgcctgaagtccatagtgtccttatagctttcttcactcagcgtatccagttctgcaattgtatcatcaaaagctgcttttgccaacctgcaggcatggtcaggggaattaagaatttcgtagtagaatacagaaaaatttgagagcaagacctaagcgagtaggatgcattggtggaagttctgtcattgcaatatcactagcagctttataagccactaggctgttctccacagcctccttcctgtcatttcctgtggcaaattctgccagatacctgtggtagtcccctttcattttataatagaaaactttggactcgccagtgttagctgctggaatgaggtttttgtccagtacatccagaatgtcacaacagagtaactttagctcagtctcaatcatttgctgatattcccaaatcatttttagcttgtcttctccttccttgttttcttctttctgttcaatactgctgattattctccaggaggctcttctagctccaattacattcttatatgcaacagatgggaagtttatttcttcaactgtcagttccacatccatccctgctactttcttcattgactacaccatttcttggaagatactgccagttcagttccagagcacattgtattgctcagcctgctcggccagctttacctggtaccagatcctctcgatcatccacagcggcagccgctcccacagggtctgcgcgaccgatggaagtggatagtgtctctgcctctcgctccgcttctgggcagcaaaaatggcgacaccacaatccgggactttcccctgcccacgcggaaaactgctcagctctgtggcaaccgcttcctggcaactaatgatttcttaaataacacaacaaaaaagcataatcaagaagaaactgataaacttcatcaaattgaaaaacatttttttccaaacaccaagaagaatatataatctaagctgcataatgagagacaatatttccaattacatatcttctcgggctctagtatccggaatacaaacaaaaccaaaacaaactcttgtatgtcaataataaaaggacaaattaccaattaaaaatggtcaagggacttgaatatatgttttaccaaagaagatatacaaattgctaatatgaacataaaaatatgctcaatatattttgctattaggaaaataaaaatcaaatcacaatgagataataatgaacacactatattggctataacaaagagacaataacaagtgtcggcaaatgtggaaagtatggaatttctatgcattgcagctggaaaggtaaaataatgtagtcattttataaaacaatttggcaattcttcaaaattttaaacacagaattgccacatggctcagaaatttttctccacatatgtatgcaaaggaaatgaaaacctaagtcacacaaagacttgtatgtgaatgttcatagcagcaatgtttataagagccaaaggggaataccatccaaatatccatcagctagtgaaaaaatatgtgtcatatttatgcaataaaatcctcagcagtcaaagggaattaagcaataatccatgctacattggaaataaacctcaaaaatagtaaactaagtgaaacaaactaggtttcaaaaagattacataatttataattccacatataagaagagtccataaaaagctcattgatagacagaaaataaactaatggatgtctaaggcctgggtgatggtggagagtgaatgaaaacaagacagattttactctgagatgatgaacatattttaaagttagttgtgattatcaatatgtaactctgttataatattaaaaacaggctgggcgcgatggctcatgtctgtaatcccagaactttgggaggccgagacaggcggatcatttgaggccaggagttcgagaccagcctgaccaacgtggtgaaaccccatctctactaaaagtacaaacaaattagccgggcgtagtgacgcatgcctgtagtcccagctactcaggaggctgaggcaggagaatcgcttgaaccgggaggcagaagttacagtgagccgagatcccgccactgcactccagactgtgcgacagagcaagactccgtctcaaaaaaaaatcaaaaataaaaaaaattgatatttacaatgaaaatgtcattgtattatgtaaattatatcccattaaagcctatcaaaaattaacatgccaaaagtattaaaatagcttctgactttaagaaatccaagtaacagacttttaacaccaaagttatttctgttgatttaataagtattaaagaagaagaagatactttaaatatcacaagaggacacaagtgcgaccaaaaacattatagaggttacgtaagcaaaaagaaaacagtttgtaaggagtatttacggataggaaccatctggttttactagactagaaaactgaagtcatttacagaagactactgtaactcaattgttacaaataagtaatgatgtcatcatagaatgaggaaaaattaaaaattaattaattaaaaatatttggagaagcaatctaacataaagttggttgatggcacccgtctctacagtcagagtagcctattgctaatgcaaaagctgcacattcatcgcttcttcaaaaccaatctcaatacccaaatctgatactaatctctaaatttattactgtaatttatgagaagatatctgcctattttttattacataacatggctaatgttcagtatttgaaggttttattaaaaataacttaaattttttatttaaaacttattatggcagttaaaaatgt

SEQ ID NO: 1883090 - DNA, 4001 bp, Homo sapiens; identical to SEQ ID NO: 587159

SEQ ID NO: 1883091 - DNA, 4001 bp, Homo sapiens; identical to SEQ ID NO: 587174

SEQ ID NO: 1883092 - DNA, 4001 bp, Homo sapiens; identical to SEQ ID NO: 587177

SEQ ID NO: 1883093 - DNA, 4001 bp, Homo sapiens; identical to SEQ ID NO: 587179

SEQ ID NO: 1883094 - DNA, 4001 bp, Homo sapiens
gaattgcttgaaactggaaggcagaggttgcagtgagctgagaccgcaccactgcactccagcctgcgtgtaagagtgaaactctgtcttaaaaaaaaaattcaaaggaaccagaagttgattcaatgtaaacataataagatagataaaacactagactgatgggaaaaaaagaaataattcaaataaaaacaattagaataaaaagtaaaaacaaaaacaaaaacagatgcttgtgaggttgtggagaaattgaatgcttatatgctgctggtgaaagtataaatttatttaaccattgagaaaagcagcttggcattttttcaaaaacctgaaaacagaattaccattcccaatcccgcaattgggaacatacccagtgaatgtaagtttttctaccatgaacacacatgcacgcgtatgtttattacagcacgattcacaatagcaaaaacaagaaataatcctgtatgtcttcaatggtagactggataaggaaaatgtggtatgtaaacaccatgaaataggatgcaactataagaaagaacaacatcatgtactttgcagcaacgtcgatggaactagagaccgttatttttagaaaactagtgcaggaacagaaaataaaaaactgtatgttgtcacttataagtgggagcaaaataatgagaacacgtggacacaaataagagaacaacagacactgaggctcagttcagggtagaggatcagaggatgaagaaaatcagaaaacaaatctgttgggtactatgcttagtacctgagtgataaaataatctgtacacaaaaacttcatgatatgattttacctatacaacaaacctgcacatgtacccctgaacctaaaataaaaggtaaaaaaaaaaaaaaaaaatcggctgggtgcggtggctcacacctgtaaccccagcccattgggaggctgaggcaggcagatcacctgaggccaaaagttggagaccaacctggccaacatggtgaaatcccgtctctactacaaatacaaaaattagttgggcctggtggcacacacctgtaattccagccactcgggaggctaaggcaggacaattacttgaacctgggaggcggaggttgtaatgaggtgagatcgcaccactgcactccagcctggaggacagagcgagactccctctcaaaaaaaaaaaaaaaaaaaaaaaaaaaagcatttcttggaaattactatcttgaagaaaatattcaagcctaggcaaccacagcctgccaattaatctctgatgacataaccaagaaatttttacctggatctcacaaataaactacataactgtaccaaaccaattattgaatctggtttgcttcgtcatgaaacttataacagacttttcttcaagtctctcccatggatcacaacccacaaaccatagctgggcactctatgattcttgaatcacactttgatcagattctcatttttagagtgactcccgtacatctctaaaaggaaaaatgaggaactaaggaccccaggaccacagctctttccactcatgaatcttgcaccctgagtcaggattctcccctgatgactttcccatccctgtacaatctgggtgagatgaggcgctgggagtgcagagcaaaccagagaggcctccagtccagggtaaagccactgcagaggaaaaagacagaaatcccagggtcccaggcgctggcccaggcaccatcttgcggctggaggggacgagagccgagctgggccaaagacgatttgggtcgtcaggctctggagctgactgcgagaaagtctgggacctgctacagccactttctgccggttccaaccagcccccacccctctctcacgatgacagacccagcactcaccatttcccggcttccagggggtcccggtcttttagccataaatctgcagatacctgcaggacacaaggacacataggcttggcctctaggagcagaggacacagagcagtgaagagaagaactgcagctctggacgcagaaaaacacaaaggacccgcaaaattacggaagtagcctgttctttccagctgcatgcctgattggacagtttctagaccacggctcctgattggataaggtttcaggccccacccttcatgccctgagtgagggaatatttgatcagacactgggctgagcgaagcaaaaataacagcctaggctgcagccttcacaggcagggcttcttccttgatctgagccaggccaacttcagaggatatttgcatttaaccttgtgtataatgtcatatgcatttataaatgatatataatatttattcataaattgaaataatgacaattattttaaaatttaggattttatgcccttccttgctgcggatcctttgcagtgatatggtgtgactttctggctccacccaaatctaatctcaaattgtaattcccgtccatgtgcggtggctcacacctataatcccagcactttgggaggccgaggcgggcaggtcactagttcaggagttcgagacaggcctggcaaatacggtgaaaccccgtcaatactaaaaatacaaaaattagccaggcgtggcagcgtgcctgttagtcccggctactcgggagactgaggcaggagaattgcttgaacccagggggtggaggttgcagtgagccgagatggcgccattgcactgcagcctgggtgacacagagagacttcctctgaaagaaaaaaaaaattgtaattcccatttgtcagggcagggaccgggcaggaggtgattggatcattggtgtggattatcctcatgctgttctggtagtagtaagggagctctcaagacacctgatggtttaaaaatgtggcacgtcctccccggttctctctctttttccaccatgtaagatgtgccttgctttcccttcaccttctgtcatggtcatgaatttaagtttcccaaggattctgcagccatgtagggctatgattcaatttactttaaaaaaaaaattacgcggtttgagctatttgtctgtagcagtgtgaaaatggactaatacatgcggacagcctgagatttcagaagggaggcaatcctctgcagtaaaatatgagccacatgtaaatttttaattttctagtagccaaatgttaaaaaaaaaaaaaaaaaaaggtggggccgggcgcagtggctcacgcctgtaatcccagcactttgagaggccgaggtggggaaccacctgaagtcaggagttcgagaccagcctggcttacatgatgaaacccctgctctaccaaaagtagaagaattagctgggcgtggtgacaggcatttgtgatcccagctactagggaggctgagacaggagaatcgcttgaacccaagaggcagaggttgcagtgagccgagatcacaccacagcaccccagcctggtgacagagaaactctgtctcaaaataaaaaagaaagaaacaggtggaataacaggtggaattgattgcaacaacttaatcagcccaatatatccaaaatattattattttaatatgtgattactatgtaatggttaataaagcacatacatttttgaagctaaatctctgaatgtaatcttgtattttacctttctagcacactgaagttcacactagccacattccagcaccctgtagctatgtcagaggcgtctgaagcagagaaactgcatctggaataggtgctgggtaaaatggggctgagacctacaggactgcatttccatgaggcccggctttctaagtcacaggataaatagaagattggaacaagatccattttacaaagaccttgctgataaaacagtttgcagtaaagaagccacaaaaatccaccgaaaccaaggtgggaatgaaagggacctctggttgtcctcaggaatcactacacgctaattataatgcattagcatgtgaaagacattcccaccagcgccgtgacagtta

SEQ ID NO: 1883095 - DNA, 4001 bp, Homo sapiens
gtttgagcagaagcagaaaaaaacttctccaggacagtactcaagggcctgtctggctgtttggagggaaacaggacccaaagaaggtaggactctaaaaggtcttcaaggctgggaggttctggacaagctgaactgtttctaggcgaaaaccccaatgtggatggcgagtcttgctctcaaggagtaggtggtcctacaagtacctgggtgggcccgcttggttctgggtttgagtctgccctccacctaaggccactgttccctcacctctcctttcttagatcaatccctgccacgtgaagtcgaacgccaagagtttactccagaagcttcctttcaactggtcaccagctccccatccactgaaatcctacccatcctccacgtgcattattacagtctttgtgtggcatgaaagggacctctgcataaactactttattaagaaaatattagtcttttactcatggataataaagtacatggttttctcacaattctgatggggccaggaaaccctgtgtaaggccttcacactatgtggtgggaggtgtcgactgtgcgctgctcactccagcccagcttcttactgacaagtggctggaatatgtggggctgtccttggactcctgccaggaagccgaaactctttgcttgagaggagctgatggtaagaggagcccgatccctcactggccgcccacccgcaggatgaagtcctggcatgcaagccccttcctagtctctctctgcagactcctttcccactgcctccaaaccaaaaccatcttctccaggctcatggactcctttctgtgcctgcacacgccctgcactgtcccgtctctctgcgcctttgcccaggcactcctccctccctgaaagcaccaccggtctagctgggcctgaaatcctagccgtccctaaaagcccggctcaaatcacagaggcgcagagcatcaggccaggaggggtggacagcggtaccaagaggccccctgacactccttcccccggagcccaccgcaagcttccacctgggcgccaacactcaccccttcctattttgcacaattattgcccgcgtacctgcctgcctggtccttgaacacacagccactgtgtgtcttttcacacttccaggtgtgcaagcctgggcaagttaacttctctaagccccaggtttttcttttgcatgacagagataacaccagtacccatcccacaggcttgctgtgaggacagaaggacagactaaggcctcaacaggacttggtgcagtacctggctctatattcccttccgcgccgaccctggggagctgggcacgtaaggggtgtcggtatacgcggattcgaagcctcacaactcccaggtaccactaagccgctggggggagctgggggagggacccacaggccgagcgccaagcagagaaaagagcctcgggtggggggacgcagatgtagggttcagcggctggggcgggggcaggaagccccggaggggccaaggatcttggcgtggggcggcccggggcggggacaaccgttccgccagcgctcgggctcggcccggagtggggggcccggctggcaagcgcagtaggccccggcagacgccgcggccctgttccccggagccccaggcgcggtagtacggctcggctcccgcagcccccgtgtgccgggcccgggtcgcccggggaatccaggccgcgagttcgtgcgcgcgctggtcgcccttaccggagctgcggccgcctcctccatggccctgcgctgtcccccgcggcccagataaagtcgtcgccgctgctgcgcgcggccccacgcagggcccgcctcccggtgctctccgcaggcggcgcccgcccagccctgtctctgccgccgctgctccctgactgcccctgccctgcgccgcccgcagttgcgtcaacgcctttagcgcccggccggtccgcactgtatcctgggagccggcgcggccgacgaaggcacatgaggcttcctggaggcaggcagccgcacagccccacctgcagctccggaggcgaactgcaggcgcgaccccgcctggcccgcgcccgggagctgaccccgcgacccctggccgacccctcgccccttccccgactgccgcgtgtgcgcgcgcagtcactgcgctggccccgcgacccaggccgagggactcggttaccgaaagagtccccctcataagacccgcctggccgcgcccgcgggcaagcaggggcttccaggcagggccctccccggtgaccgcgggcagtgtggccccctcgcccagctgggccccggcgcggccgaacaggcacttctgccgcccgaggtcctgggcctggaggtttgggctgttttcggggggcagctgtaactcatccccatctgtgtttgaagtggaataaatacttcgaacaataggaatataccggtagatgctacttagcattttctaccatgtgtttattacagtaaatattttttaatggcatgagcaatggaacgcaataccatcattgaacattattttggggaagaaattggtatggacagatgttcatgatattttaagagaaaaagcctgtccagaacgatcctgtctttgttttaaaattaacactttaaaacaatatatgacatcatatgtagtattatataccgtgtatatgtgtatctatagttttgaaagtttggaagcatacaaatgtcaacatagactaagtagttttctttaatagagcacaggccgtttttacgcattttattttcccaattcatgtttttatttttcaataacaaggatagtatttttaaacgagagaaaaataaacatttaaaagtccttaagaggctgaggatggagggcgccttggacgggggcccccacgtggttacagaggcgcattgcctttcagattcctgggctgagtggggctctttccagctggggaacctgcgacatgtgatgtggggtctatggggcttgccaggcctagggaccgggatctgaacattctcccctagtttctcttcatcagcgtgggctgtacgttcagtgtataaaaatggaattgccccaggagtcgtgtgggcgaagaccttactcatagtgttgccgatgctcctgcgtccgacttgcttctttgggtcgcaggcacaacctagctattctctgatgcctctcatctctgggcgattgtccctcaaatgagggggtttagagatttcctgcctggagcctttggcatcattttgtcttttggagtaaatccgacaaagggtaaaatcaccctactcaccccgtgagctgtaggagaatgtccctggacctgccccaggtttttcctgtttttttttttttttcccttcagctcttccacgtgattccttcccctctcaagtaacacatctcctctcctaggggtggactcgtgttttatgggtctgcagcttgtgtaatcaggaagaacattattaagtaaaagcctcataaaattacaaatttagaaggaggcacagagctggtgcaggaaaggcactctgaagcttccttagcttcactgtaatgtcctggattaaaaaaaaaaaaaagccagccttgtctaggctgggacatgtgcaccacggagattgtagggggaactgggaatcaggagacctgtcagttctgtcattaaccagtcgagacccttgggcaagtcagtcagcccttgcctcacatgtaaagtgaggagattggagtagatcattctgcaaatgtccctgagtccagccttcctttcaccacttgatacgggacccagtagaagaccaccgcttcctctctcactgtggcctttttgcgggtcaccctgcatgataatttacctctattatcaagacaacaatgtgttggcaagtccctgccatgttgcctggaagagctactcccggattaccttggaaaagggccttattcctgtttgaggagacaga

SEQ ID NO: 1883096 - DNA, 4001 bp, Homo sapiens
ttttttcacatccattcggctcagaatgaagtaaacttttgacatctgctcaatttggatcatgagtacaaaggctccattttcttttactttgctatgtatttagatctcttccaatattactaatcaaaaatagcaaaaaagaattatggacatgtcataggaaaagctccttcaggccgggcaaggtggctcatgcctgtaatccgagcactttgggaggccgaggcgggcggatcacgaggtcaggagttcgagaccagcctgaccaacatggtgaaaccgtctctactaaaaatacaaaaatcagccaggcgtggtggcgcccgcctgtaatcccagctatttaggaggctgaggcaggagaattcgcttgaaccggggagttggaggttgcagtgagctgagattgtgccactgcactccagcctgggcgacagagtgagactcagtctcaaaaaaaaaaaaaaaaaagaaaagaaaaacctctttcagtaagacccaagtgcaagtcgtgatagaaaaaccaccaccacgaaaacatttgctcctatcacgatttaaaaccatagtaccagtttcattctctccccaactcaagtgagtttcatcttaaaaaaaaaaaaaaaaacatcaaagacagacatcctctgctaactccatcacatcacaccaccccaagtgttgctcacctttcttcaccaagggctggaaaagaacagtctacacagaactgcggcagccgcctccttctcctcacccgtctacaacagaggtgctcacactgtacgccttcatctggtgtctccctactcaattgtctcacaccctcagtccaaccctcataactctacttcctgcagggatactttgaccaacacccaaatatgatcatgcctctgccttgaagtactgcatttgcagctggagcaagagggagaccccagcctcggaccttgctggtcagccccccaccccgcccccagcctcacggccctgggcgcctcccctgtgctgagtcctcagtaccacccatcattacccctcagggatgctcctccctggtcctcaaagaccctattgccatttcatctgcaacatcttatttaagtctgacctgaagtcactccttccccagttgaaactgatcctccctcccctgggtgtccatgcatcctgatagttgaggtaactaacagggcggctacccctggatcgcccccacatgttaacgtgaccaacacctctgtaggactgcatccaacaagggaccccagctccgtgctcccccagatcggacccaggcactcagaagatgttttgaatgagcccagacgcctgaaataacccccctccacaccctgccttcgtttccctcctagctcagtgcccaccactggctgcgatcgggggtctgcatgagccaagtaggagagaaaaaagggggttaccctctgcaagagacggggacattccccaacagcccccttcttccccctagagacccaggcaccgcagggtagtggacttcaggggcctggatgggcagagaagctccaggggaagggacggcaacaaacccactcttggggaagagcgggatcccctgtgcagagaacaagcccctagctcacctgcgtccaggtggtcacagtggcaggtgccctgcacaagcttccagaggacggtggggtccgaggaagggcagtgagatgaggggccagccgctgctccggacccactacctgtagcgtcccccaacccaactcggcagcacccgacaacccgcagagacgtctggaggagccgcccccaagaaccccagtgcagtgccggctctgcagcaagtgggtgccggccacgctcgcgctgggcacagccccggagccagagcgccgccccccacaacgcgtgtctgaggtgtcagtcgccgtaggaagagtctggggtccggaagtgcgggcattgcagtcctgcacctcaaaacactgcgtaaaagcagctcccccagggactacaactcccagaaccccccacgacgccatgcttccggttaggctaccctgcacttccagccacagccacggctgcagtcacgtgggaggtggccatgggctggcagggtgtggcgccgggcttctggttgacacagagctgggggtgaatgacaccatgcccagccggcttttccttttgtttctacaaaaagattttgtctctttgtaaaaggttttttgtctggtttcctggatcaggtttgcacatcaggaattggagtcctttgcacattcaactacgtagatttccaccctgtggtagattctacctgtggtttctaccgcgtggttctagagtgaattataaacagtaggccaggcgcggtggctcttgcctgtaatcccagcacttcgggaggctaaggcgggcagatcacgaggtcaggagttcgagaccatcctggctaacacggtgaaaccctggctctactaaaaatacaaaaaattagctcggtgtcatggtgtacacctttaatcccagctactcaggaggctgaggcaggagaatggtgtgaacccagcaggcgaaggttgcagtgagccgagatcgcaccattgcactccagccctgagcgacagtgtgtgactccgtcaaaaaaaaaaaaaaaaaaaaaaaacaaaacaaaaccaaaataaacagtagaaatcatctccataaaaatgattcatttacaaatcttgtgggtgtagactctttttagaataatccttttggggttgggcgcggtggctcatgcctgtaaacccagcactttggaaggtcaagctaggtggatcacctgaggtcaggagtttgagaccagcctgaccaacacggtgaaaccccctctctactaaaaatacaaaaattggccaggtgcagtggctcacgcctgtaatcctagcactttgggaggccaagatgggcaatcacctgaggtcgggagttcgagatcagcctgaccaacatggcgaaaccccgtctctactaaaaatacaaaaaaaaaaattagccaggtgtggtggcgcatgcctgtaatctgagctacttgggaggctgaggcaggagaatcgcttgaacccaagaggcggaggttgcagtgagccaagattgcaccattgcactccagcctgggcaaaaagaactaaacttcatctcaaaaataaaaataaaaataaataaataaaaacattagctgggcatggtggtggacacctgtaatcccagctactcaggaggctgaggcacaattgtttgaatcacttgaacccgggaggcagaggttgcagtaagccgagatcacaccatggcactccagcctgggcgacagagcaagactgtctcaaaatatatatatatatatatatatatatatatatatatatatatatatatatatatatatgtgtgtgtgtgtgtgtgtgtgtgtgtgtgtgtgtgtgtgtacacacacacacacacacacacacatatatataaaaaaggaataatccttttggggttttatgtcatttgttcctttcttcctatttaggtcatttttgttatacattttttttccaaattgtcctttaatcaggacatatttttaactcagatatttgttatgcctattactttttcaagatttctctataaatttgcattttagatcagtgagggaaaaatacaccacgtagaccctcaaacaccatgggtttgaacttcgaaggtccacttatatgcaggttttttccaaccgaactcagaaaatacagtatttgagggatgtgaaactcaaacatatagaagcccaacttttcatgtacacagttccacaaggccaactgtgggacttgagtatggcagatttgggtatgagggtgattatggtttgggtcatgttaaattataatacccagctggccacggtggctcacgcctgtaatcccagcactttgggaggccaaggcaggtggatcacc

SEQ ID NO: 1883097 - DNA, 4001 bp, Homo sapiens
tcaagcgattctcttgcctcagcctcttgagtagctgggattacaggcgtgtgccactactgcccagctaatttttttgggggggtatttttagtagacacggggttttaccacattggccaggccggtatccaactcctgacctcaaatgatacacctgccttggcctcccaaagtgctgggattacaggagtgagccacagcacccggccatggtcgagttttataattgtaagattactctaagcctggcgtgatggctcatgcctgtaatcccagcactttgggaggccaaggcgggcggatcacgaggtcaggagttcgagaccagcctgaccaacatgatgaaaccccatctctactaaaaatacaaaaatcagcctggcgtgggggtgcccgcctgtaatcccagctatttaggaggctgaggcaggagaatcgcttgaaccggggagttggaggttgcagtgagctgagattgtgccactgcactccagcctgggcgacagagtgagactcagtctcaaaaaaaaagaaaaaaaaaggaaaagaaaaacctctttcagtaagacccaagcgcaagtgtgatagaaaaaccaccataaaaacatttgctcttatcaagatttaaaaccatagtaccagtttcattctctccccaaatcaagtgagtttcatcttaaaaaaagcatcagacagacatcctccgccaactccatcacatcacaccaccccgagtgttgctcacctttcttcaccaagggctagaaaagaacagtctacacggaactggcgcagccgcctccttctccgccagtctccaacagaggtgctggcactgtcccgccttagtctggcgtctcccgtctccctactcaattttctcacaccctcagtccaaccctcataactctacttcctgcaggggtactttgaccaacacccaaatatgatcatgcctctgccttgaagtactgcatttgcagctggagcaagagggagaccccagcctcggaccttgctggtcaggcccccaccccgcccccagcctcacggggcgccccccctgtgccgagtcctcagtatcacccatcattactccttagggatgctcctccctggtcctcaaagaccctattgtcctttcatctgcaacatcttatttttctttaagtctgacctgaagtcagttgaccttccccagttgaaactgatcctccctcccctgggtgtccatgcatcctgacagttgaggtaactaacagggcgcctacccctggatcgcccccacatgttaacgtgaccaacacctctgtaggactgcatccaacgagggaccccagctccgtgctcccccagatcggacccaggcactcagtagatgttttgaatgagcccagacgcctgaaataacccccctccacaccctgccttcgtttccctcctagctcagtgcccaccactggctgtgatcagggttctgcatgagccaggttggagaggaagaagggggttaccctctgcaagagacggggactttccccaacagccccactcttccccctagagacccaggcaccgcagtgcagtggagatcaggggcctggatgggcagagaagctccaggggaagggacggcaacaaacccactcttggggaagagcggggtcccctgtgcagagaacaagcccccagctcacccgcgtccaagtggtcacagtggcaggtgccctgcgcgagcttccaggggacggtggggtccgaggaggcagagctgcggggaggggcagtgagatgaggggccagccgctgctcgggacccaccactacctgtggcgtcccccagcccaacttggcagcacccgacaacccgcggagacgtctggaggagccgcccccaggaccccagtgcagtgccggctctgcagcaagtgggtgccggccacgctggcgctgcgcacagcccgggagccaagacgccgttcctcccacacgtgtctgaggtgtcagtcgccatgggaacagcctggggtccggaagtgcgcgcattgcagtcttgcacctcaaaacactgcgtaaaagaaccccctgggactacaactcccagaacccccccacgatgccatgattccggttaggccaccctgcacttccagccacagccatggctgcagtcacatgggaggtggccatgggctggcagggtgtggcgctatggctctggctgacacagagctgggggtgaatgcgccctcttacatgtcccccatggccaagggtggccctcatgggccccacgtgtctgatctgatctgccccaagccctgttccatcctgtggggcgggatatggctggcccgaactcgaagtcccacctgggactggcactgggcctccttcctagagagtctgttacctggggagatcataaaaatatttatttatttagagatagagttttgctcgtcgcccaggctggagtgcagtggcatgatcttggcccactgcaacctctgcctcccaggttcaagcggttctcctgcctcggcctccctagtagctgggattacaggcacccaccaccatgcccagctaattttttgtatttttaatagagatggggtttcaccatattggccagactggtctcgaactcctgacctcaggtgatccacccacctgggcctcccaattgctgggattacaggtgtgagccaccatgcctggccaagaattttttaagactatgctctggctctgtcacccaggctggagtgcagctgcacgatcagagctcactgcaggctccaactcctgggctcaagtgatcctcccccatcagcttccccagtagctgaaactgcaggcccgcaccaccatgctggctaatttttttatttcttattttgtaaagatagggtctccctatgttgcccaggctagactttaactcctgggctcaatgaatcctcctgctgggattacaggcgtgagccacagtgcctggctaaaaactttatttttatattaaggcctatccttcagtcctcatgatagtccccaaaatagatgtcattactttcatttcataggcgaggaatcagaggtagcccatctcaatatttaccttggaggaacccctgcataaaaatgatgtctgggacccgggcgtggtggcttgctcgtgtaatcccagctacttgggaggctgaggcgggaggctcagttgaggtcagaagtcaaggctgcagtgagccaggattgcactgctgcactccagcctgggaaacagtgagacctccatctctttttttaaaaaaattttatctgtaggccaggcacagtggctcacgcctgtaatcccagcactttgggaagccaaggcaagtggatcacttgaggtcaggagtttgaggccaacatggctaagtctcgtctcttctaaaaatacaaaaattagccgggcgtggtggcacctgtaatcctatctactcaggaggctgagacaggagaattgcttgaacccgggagtggaggttgcagtgagtagagatcgtactattgcattccagcctgggcgacagaacacgagcccatctcaaaaaaaaaaaaaggccgggtgcggtggcttacatctgtaatcccagtactttgggaggctgaggcaggcagatcacgaggtctggagttcgagaccagcctagccaatgtggtgaaaccctgtctctactaaaaatacaaaaattagccggatgcagtggcgagtgtctgtaatcccagctactcgggaggctgaggcagaagaatcacttgaatccaggaggcgaaggttgcagtgagccaagatcacaccattgcactgcagcctgaatgaaagagcgagactccatcaccaaataacttaaaaaataaatttatccaaaacttacaaagtgagagtaaaagaagtttaataaagtttaaaatgatgctttttgtatgcttgaccatttctacctttg

SEQ ID NO: 1883098 - DNA, 4001 bp, Homo sapiens
agcgggaaggggaggtggtcttgattcatttaatattagcgttttgcaataaagtagagcagcataaaacataactgaagaattcattttccccaggataatgcacccttcctcctgtttctacagtaaagcacatcattttgctattaaaaatgtccatttttcacaactgacttttccttaactctagtcaacactgctcttcaaaagaacctagccaattactgtaccttgtaggcagagttgcaaaatttttacttccctaagaaacttttccattttttaaatgctttccaaattaagcaggactcacattaactgtgatcttaagtagcagtttagtgaggtttgaaaacaaacttttcattaacgcattcatccaattaaagtgacatagtaagtgggactactgacacagatttaaggattacagctttatattaaaagtcggtccaaagatggtaactcagagttcatttgagaccctctgacttttggcttttaaaaattgtgccccactcgagtccccagatagaactacatttagcaaccgtctcctcctgacttcctggtactaaaagccacaaccacaagggctatttcgtgggtttgctgtaaaacaacatttgctccagtcaactcactggaaaatagactatctctactgagtacccgctgaggtgtgggtgctcacgatgtttaaaaacaaaaccacgtgtctacgcggcagcgacaccgcaggtgttacgtgccgggtttcttcccaggatggagaccggcgcgggctgggccgggaagcagcccctggcgggctgggccgggaagcagcccccggcgccccggcggaaggagaaaaggagaacggtaaaaatagccggcggccacggcccacgtgcagccgcgggagaaccgagcgcgggcgcgtggagaggggtccgtacctccaaacatgcgcggtgagaggtgagctggtaaggagccgatcaccaggcgcggcccgccggggctcccgcccaccggccggtgctggccgccgccgccgccatcctcagggctgctgtgcaccgagtcctgcgagtcctgcggaccgctgctgctgttcgggatgctgaaggaggactgcgccgcgcgggcccccgacgccacgccccccaggaaacagctgcgcggggctgccggggccaccgcggcgccgcccgaggcgctgggctggtgagcgctgggcacctgagccgggaacctccccgcggcggcggccccccggcccccagccctggtcccggtcccattggccactccgctgctactggaaggtagatccgagccgagtacgcgcgcgtgcgccgttagcggcggccaggccgctctgcctggcgctcctgtccgccctgctccggaccgggccgcgcgctgtgccccgagagccaagagggtaggagcgaacgcgggagctagagggcagggccgaggcgccgcggccggcccagagaggcccccgcacgtccagggccgccgctcggcgccccgaggggcagtcggcgcccggcgcgctcttctcggggcggtgggcaaggctggcggcctgacgcgggcgcgggagacgaggagacgcggagaggaaggtgtcccggctgcaggcacccctcgctggctccagcaggaaggggcgactcaggtggccgtgcgactgccgctggtttcggtgcgccatgacgggccgctgccgctttctgccgtcgcgcttggcgccccgggcctccccaccgcctcctctccggcggccgctgttaccgccgccatcctccggctcccacggcgactggcggctgagtgggaggcgcccgcccagactccgccggagccaccttccctcctcccccagccacccagccgttattaacggagaaagaggaaaaacgggtggcgcgcgaggggaggacgaagaatgagagggagggaggggtggcccgcgcttcccggcaaccgtggcttcgctcccccgcaaccgtggcttcgctccccctgcgagattaatttcacaggggattaatttctcatttacaaataaaaatgtaagtttagaacagaatgttttaaaaaggtaaaagcattcactgcatactatatgccagcactatacttaggacatacaggacatatacgactgtatatgtgagcgcttatctcacttctcttgtagaatggttattattaaacttatttgagaggtgaagtgattgacagccgttgaaggattacttgagaccatggaaactataacttgcagagtcagaatttgagttcaattctgatatcaaagctatgcttttcctactatgttaacctgcctaataaaactacgcttctgagacgaggaaagatgtttctgatgtttagtgatgtatattacattaacgttgataatatgatctcattaggtagtattgaataactctaatttcatgttttaaatgcctagggggaggactggaaagataatcaccaactttttttttttttttgagttggagtttcgctcttgtggcccaggccagagtgcagtcctgtgatcttggctcactgcagcctctgccttccgatttccagcctctgccttccgatttcaggtgattctcctgcctcaaccttctgagtagctggcatcacaggcgcctgccaccacgcccagctaatttttgtatttttagtagagatggggtttcactgtgttggccaggctggtctcgaactcctgacgtcatgacccgcccgccttggcctcccaaagtgctgggattacaggcgtgagccaccgcaccaatcaccaaaatattaaaaatggttagctctaagaggtgcttactttctcttttcaactctttattttttgacattctccccccagtgatttcacattagtttcccagaatgtatagtgttatttttaaaaaacctctgagacatgaacattctgttggaaatttttttctgttattttttctttgtctttgaacttttaaaaatagcttgcagtttggaaacaattggtcaattaaatcttctgcttgattaaaattgtaatgggtacaggtgctattattccattctgttccagtttttataatatattttatatattttatgaaggaataaattcaaggatctaaatgaagtgaattatgaaatgtttctataaatctttgtatttttctattaatcaccgtattttaattatatacttttatattgacttactattatttatattacagaattggctatcacatatataatatttttctatatagaggcataatgtgtaattttgaagtgactgattcctaagtgaaatgatctaaataaatttgtcagaatttataatgtctaaggcaaccatcacaaaatggtattttggaaagattattattatgaagagaatatattttcctccattatctctttgtttttatctttttaaaggtaatcatagcctcctggtgtcgcacatccatgggaataatgaatttatttggactagaaactaagacctgctggaatgtcaccagaatagaacctcttaatgaagttcaaagctgtgaaggcatgtttcttccaaaaatgctgtcatttgtaaacattcataaacatttaataatattatgattcacttttaagaattattgtaaaatactgttgttgatttaaaaaaaaattagaactggctcacctcaatgagtattttacgttttaaagtagttttctgagaaggctgtgtacttacaaatttgagtataaattttggaatttgagtattaacatatcccattgtaaggcaatcttgactataagttagtcttctgtttcagaatgcgaagatacagaaagatgttttttggggtagcttcaatatataaattttgaggatagattaaacagtcaaatatctatttgtaatagctaatgtataaatttaattatgcatacatatttaaaaatcggat

SEQ ID NO: 1883099 - DNA, 4001 bp, Homo sapiens
atgcttatcttctatacttctatttattttcataaagcgggaaggggaggtggtcttgattcatttaatattagcgttttgcaataaagtagagcagcataaaatataactgaagaagaattcattttccccaggaaaatgcacccttcctcctgtttctacagtaaagcacatcattttgctattaaaaatgtccatttttcacaactgacttttccttaactctagtcaacactgctcttcaaaagaacctagccaattactgtaccttgtaggcagagttgcaaaatttttgcttccctaagaaacttttccattttttaaatgctttccaaattaagcaggactcacattaactgtgatcttaagtagcagtttagtgaggtttgaaaacaaacttttcattaacgcattcatccaattaaagtgacatagtaggtgggactactgacacagatttaaggattacagctttatattaaaagtcagtccaaagatggtaactcagagttcatttgagaccctttgacttttggcttttaaaaattgtgccccactcgagtaccagatagaactacatttagcaaccgtctcctcctgacttcctggtactaaaagccacaaccacaagggctatttcgtgggtttgctgtaaaacaacatttgctccagtcaactcactggaaaatagactatctctactgagtacccgctgaggtgtgggtgctcacgatgtttaaaaacaaaaccacgtgtctacgcggcagcgacaccgcaggtgttacgtgccgggtttcttcccaggatggagaccggcgcgggctgggccgggaagcagcccccggcgccccggccgaaggagaaaaggagaagggtaaaaatagccggcggccacggcccacgtgcagccgcgggaggaccgagcgcgggcgcgtggagaggggtccgtacctccaaacatgcgcggtgagaggtgagctggtaaggagccgatcaccaggagcggcccgccggggctccagcccaccggccggtgccggccgccgccgccatcctcagggctgctgtgcaccgagtcctgcgagtcctacgggccgctgctgctgttcgggatgctgaaagaggactgcgccgcgaaggcccccgacgccacgcccccccgaggaaacagctgcggggccgccgcggcgccgccgggctggtgagcgctgggcacctgggccgggaacctccccgcggcggcggcctccggcccccggctctggtcccggtcccattggccactccgctgctactggaaggtagatccgagccgagtacgcgcgcgtgcgccgtgagcggcggccaggccgctctgcttggcgctcatgtccgccctgctccggaccgggccgcgcgctgtgccccgagagccaagaaggcaggagcgaacgcgggagctagagggcagggccgaggcgctgcggccggcccagagaggcccccgcacgtccagggccgccgcccggcgccccgaggggcagtcggcgcccggcgcgctcttctcggggcggtgggcaaggctggcggcctgacgcgggcgcgggagacgaggagacgcggagaagaaggtgtcccggctgcaggcacccctcgctgtctccagcaggaaggggcgactcaggtggcggtgcgactgccgctggtttcggttctggtgcgccatgacgggccgctgccgctttctgccgccgcgcttggcgccccgggcctccgcaccgcctagtctccggcggccgctgctaccgccgccatcctccggctcccacggcggctggcggctgagtgggaggcgcccgcccagactccgccggagccaccttccctcctcccccagccacccagccgttattaacggagaaagaggaaaaacgggtggcgcgcgaggggaggacgaagaatgggagggagggaggggtggcccgcgcttcccggcaaccgtcgcttccctccccctgcgagattaatttcacaggggattaatttctcatttacaaataaaaatgtaagtttagaacagaatgttttaacaaggtaaaagcattcactgcatactatatgccagcactatacttaggacatataggacatatacgactgtatatgtgagcgcttatctcacttctcttgtagaatggttattattaaacttatttgagaggtgaagtgattgacagccgttgaaggattacttgagaccatggaaactataacttgcagagtcagaatttgagttcaattctgacatcaaagctatgcttttcctactgtgtcaacctgcataataaaactacacttctgagacgaggcaagatgtttttgatgtttagtgatgtatattacattaacattgataatatgatctcattaggtagtattgagtaactctaatttcatgctttaaatgcctagggggaggactggaaagataatcaccaacttttttttttttttttttgagatggagttttgctcttgtcgcccaggccagagtgcagtcctgtgatcttggctcactgcagcctctgccttccgatttccagcctctgccttccgatttcaagtgattctcctgcctcaacctcctgagtagctggcatcacaggcgcctgccaccacgcccagctaacttttgtatttttagtagagatggggtttcactatgttggccaggctggtctcgaactcctgacctcatgatccgcccgccttggcctcccaaagtgctgggattacaggtgtgagccaccgcaccaattaccaaaatattaaaaatggttagctctaagaggtgcttgctttctcttttcaactctttattttttgacattttccccccagtgatttcacattagtttcccagaatgtatagtgttatttttaaaaaacctctgagacatgaacattctgttggaaatttttttctgttgttattttttctttgtctttgaacttttaaaaatagcttgcagtttggaaacaattggtcaattaaatcttctgcttggttaaaattgtaatgggtacaggtgctattattccattctgttccagtttttataatatattttatatattttatgaaggaataaattcaaggatctaaatgaagtgaattatgaaatgtttctataaatctttgtatttttctattatcaccatattttaattatatacttttatattgacttactattatttatattacagaattgggtatcacatatataatatttttctatatagaggcataatgtataattttgaagtgactgattcctaagtgaaatgatctaaataaatttgtcagaatttataatgtctaaggcaaccatcacaaaatggtattttggaaagattattattatgaagagaatatattttcctccattatctctttgtttttatctttttaaaggtaatcatagcctcctggtatcgcacatccatgggaatactgaatttatttggactagaaactaacacctgctggaatgtcaccagaatagaacctcttaatgaagttcaaagctgtgaaggcatgtttcttccaaaaatgctgtcatttgtaaacattcataaacatttaataatattatgattcactttaaagaattattgtaaaatactgttgttgatttaaaaaaaaattagaactggctcacctcaatgagtattttacattttaaagtagttttctgagaaggctgtgtacttacaaatttgagtataaattttggaatttgagtattaacatatcccattgtaaggcaaccttgactataagttagtcttctatttcagaatgcgaagatacagacagatgttttttggggtagcttcaatatataaattttgaggatagattaaagagtcaaatatctatttgtaatagctaatgtataaatttaattatgcatacatatttaaaaatcggatatgcaataatagattgatttaga

SEQ ID NO: 1883100 - DNA, 4001 bp, Homo sapiens
acatatcagaactggagaaaacaatatattcactcactgggttcatgttctatatatatccactggataaaaatatttttgttgttcaaattttctttatctttatgaatttttttatgatttgtcaaccaacatttgaggaaaacattttaagatctcgctatggaaatggatttgaccatttcttcctctagagctatgaattttcactttctaggtgctgaatgcattttattaaatttatacaacttcagaactgttaaatgttcctagtgagctgaatatttcatcattaaaaaacaatgcttatctctcacagtggtgtgtgtgtgtgtgtgtttgtgtgtgttagtggaaatgagaaaattgaacaaagcctagtgacagttcaaaaagatatatatcactattgtttgttaatgagagtcaaatgtaatgcaacttttctggaagatattctgcaatgtttacaaaaagttgtaatggcttgcccattgatctacataaacaactatcaaagaaattttatgaaactatctacgagttgaaaatttgataaatgttacatccatatgacatatcatgaagtcataaaaatgacagagccatattaattaccataaaagtaaatccaatatttataaataaatgaaaaagtcaatcgcagtcatatataatcgttaaaaatatatgtgtgcatgtgcatgtgtgtttaaatattcatttagtataaatttattatttttagagactggtgtggacattcactgtattcagcattctctgtattacctcaatttaattttacaacatacctactttcctgttctaatcagatgaaagatgacattactttcatttacaaaggatttatatatacatgtataggcatgaagatagtctttatatattatcatgttaaaaacatgttgcttggtaaatattagtatgacctcaactatataataacacagatttaaatgtacatattttctaaaagaacccagtagactgaatatggttcctttgtgttataggaatttggggattcttttcctgaatctctgttttaaaacagttatctaacattcatatattgagaaatgaaaaaaatatcaaagtcttgctgtcattcagaccaaatgactccttagcacggtaaattagaacacaaactaaatttcacaaagggatatgtatgaattgattggggccatgtagtccagaaaaaacaaaacaccataattttaaaaggtgatctcttaattacatgcgtttctgaaacatcaccatcattggtgtttgtctggatcttctgtggtactgtaatttgcagaactggtgtttcagaatctgcatgaggaaaagcatatgtgagcattcccagtgtattcatgtcacagtgtcctttcttatcactctttaagcttccatcacacacacacacacacacacacacacacacacacacacacacacacacacacgagtccagttccaggaagacgctcctccaggcgtgggaggtttaccctagctctgcccaaggacacttcagggtttggtgacttcagccctgcgtgggagaagtgtgggctgctgctcccagaccccatccggcatccccacttcccactgcagcctggggtccgacacttgtaagcagttctggggcccccttcccagcctggcctgcgcttctaggccttgccaaaggcgaaagcggaaaggcggcctcctctcctgcagggctctttacttacgtgggcccgcggaggtcagccggcccaggcctgagaggatcagcaagagagacagcattgcgtagccggcggcccagccacagggatggccgttgtccttggaacggctgcagctcgaggccagggtggtggaggccgagcggagcggaagggccgtggggtccgcggggcgcggcggggacccagctccgtggatcccgaggcgggtggatcctacagccccgcgcgcccacccacagtgggctgcaccggaggaggcacgtgggagcctgcatttctgggtacgtgggctcttttttctaaagagttgacatttacaacgcattcaggggtaacatagggttataaagcacatttctactctagaccttttgctgatgaagccttggcaatatgattgttcaacatcatagccttctgggaagacagttgaattactgtagtgaaggaaaacagaaaaaaaaaaaataagaatcatagtatgtttagcagcagccaattgccaattttagtaatatctacttctagttttctgctcttaagactcaggtgaaaacacaaacagatactaaaaactaaaaaatcaatttcttagaaaactgtctaaggagtttaagtaaaatgcgaaatatggatatatggatgtattttattattttagtacgatttataagtatcaggcaaaaaaatcacacctataaaattacttcataaaaacaatcaaaatccatttatttattgacttttccacacttttgtttcttagaaaagctttatggcttagggagacttaatgaaaagccagacatattttcccccatcaatatggagttcacacaaggaatgataatatagttagttggaaataattttattttatctcttactgtataagtaggtggtttgcctaatttcaattttttttcaatttattatttattgtaacatttgtattgtagtaaaatacacaatataaaaattatgatcttaatgctttttaagcctacttttcagtggaattaaatacatccatattgctgggcaaccatcactatcattcacctccaaaactttggatttcaccaatttttacataaactgacttgtttgtgatttcgtgtattgatttgtgtacccaatacaaaaattgacatacatattgacatacagaactatttcatgaccacaaggaacctatatactacggctatagagtatactgacctaccttactcgtaattcctagtcactggcaaacactaatccagtctccacaatccatctccataatattatttttgatactatatataagaagcattatatagtatctcttgaaatttgttttttcactcatatcattcccttgagatacatcaaatttttttcttgtattaataattcattttgttacttctgagtagtatacataatacaaatgttccacaggttatttaaccattcatccatcaaacaatatttgggtagtttccagtttttaaatttgcaaaaaacattgctatgaatgttcatgtacaagtttttatatataaatcaaattatacattagttagactaagtgagaaaacagtagactgaaataaatgaaaattcgaaataaatgaagagacatcccaactgataccacaaaaatagaaacgatcatgagggaatactatgaacatttatatgccaagaggttggataaagaaggagagatagatactttttcacatgcatacaatctattaagattgaatcatgaaaaatagaaaatctgagcaggccaataatgaataagaagattgaattaataataagaagactcccaccaaataaaagtgcaagactttatagctgaatctaccaaacatctggagaattgataccaatccttcaaaactctcctgagaaattgaagaagaggcaattcttccaaactcactttaatagacaaacattattctgaaaccaaacccagacaagggaatcacaaagaatgaaaacaacaggtagaccgtggtggcacacacctggaatcccagcaattagggaggttgagacgggtggatcacctgaggtcaggagttcgagaccagcctggccaacatggtgaaaccctgtctctacgaaaaatacaaaaattagccgggcatggtggtgggcacctgtagtcccagctacttgggaggctggggcaggagaatcacttgaacccaggaggcggaggttgcagtg

SEQ ID NO: 1883101 - DNA, 4001 bp, Homo sapiens
tttttaaatcattatagttaaaagaaacacactgaatttccatattacaaatgcctttataaaaattctggaaattagacaagtgaggaattcaaagattatcagtgataaacaatggaaagggagagttggcattactgatctcaggaaaaaggaaattaaacaaagatgtaatgtcacctcttctttccaatcagaaagggaagctgtcatagggctcatacaccacagcatagctagtaattcacttgggaggcagcgtggaggggtgttcaaagctgcatgataagcatgttggtaaataaaactcagctactagaggaagaaaaggtaaagaaagggtatatggggaaggggaaaagatataaatagtatatccttatgtgaaacagagaggaaagatttctgaaaccactaaacggaaaaaaaaatttggaggcctataattactaaataacaatagattatcttatactggaagaagccatgtgagaagtattctcctgctgaattattagagaaggaccattcactaccatccaatctcggactgtgaaattgatgtgatcattaacagataagcctgcccagaggtcatcactattcagatcctcactgacttagtaaaagctaagacaaatcactaggggatcactagggctagaactaggataccagaaaactcagttatcaagataaatcatatcttaatgcaacctttttaaaaatcaatgcaaaaaaacaccatgatgaaaaaaataccaaaattttcaagacagacaggatctgatcctgtagttacatgattcatttcacttgcctcaccctaatcctggtcctggggggatccaagttttctgctacctccttaaatttcaaacttgggggatcctatacctagcattttggccccaagggatcttatccctaaaatccttcatcatcaacagaaacacacacacacagtctcacacattcgtaaacatcaaaatgctccctcttgtgaacctgttctcagctgtcagctctgcctccaagaagtgcaatcctgcccacattcagcacctttggtcttgacattaaacgcaacttgaacaacatttcatagtaaaaatattattaaaattacattatgttctggatctgtttttgcatccgatgatgaaatcttctctggaattgtggtctgcaggaagattttatgaggatctaaaaataaatataaactatgttattttgatacctgtggtcttatgttattcatttctaactctgattctgcatttgtttctctacattagcagctatttttaaaataatctacacatctcgccctttccactgtctttctagtcattcttacctacaaatttctgacccctggtcaagatctcaaatttttattcccattctcccctgcaaatccctctctcaacacacacacagacacacacacacacgcacagttggcactggcacagctaagttaacactaagtaccagattcagtgttataaacagatgtggaaatgagaaaacacagatgcatcaagaaaggttttgcagggacaaatatagaatattgaatacaaggatgatctgcacttttcaatggggcaggtggaggataacagttgccaaatcagtaaatccttgatagatagctttttttacagtgatgcaattattcgtagagtagcagaattttgtatgtggaaaaaaccacatatttcatttttgttcattttccgcatcaggaagccatcccagagaagttaaacgattttctgtcggaggctgcctctctgcctttttggccacagaccttgaagcaaggggccaggagaaagcgggagagcgtggagccagggtaaagtctgggctggacctgggccgtggaaagagtgaacaaggtctccctcggaagcctggattcctggacttactgaggtctgcatgcatcccaccaagtccagtgagaagcaccagaagaaggaacatggctcgctgtcttagagccctggcgatgaacagcagttgagacgttgagagctggagaggcgcagctcgcgcagggctgagcgcgcgtgaggcggcccaggaaggctgcggagaggaaaagcgcacagacgaagcgggaggtgattggaagtaggtaacgcgctgctggcaggcagctgagcactcaagagaagcgtctcagcattgatacgccagtcagtttattgttaaaaaagaaaggattcctaattgtcaattctcaggttagggtggtgcctggtgacgcttttgcttatatcttttacttagaccatcgcttttttaattaacttccagttacagtgagaaaagaaacaaatataaacatattctggttactgacagcaatcaagtttcttcccattacattaatataccatgcaaacagtttagctagaaccaggcaaaatgcatgtttgcagaaaatgttgcaaacgctgtgattttaacattccatggctggggacaccattataggacagctattgaatgccgaacagcccatacagtccctgctcagacggacttccaacaaatcttctctaatgtcccaaactattactgctacattctgtgtaatcctgcaatccctagcttttacttctttattcagaccttttaaaattctgcctctagcagaagcagaaacagtttagtttattggggtccataggcactctttcctttgcaggtcctagcacacatcatattaaatacactaaaatacagccacatccccacattaactgtaaattttcagtaaaaatctgaaagcgtgtttataaatacgctttgaaattacttggatgcaaatctaagggacgttatcagcagaacaataacaaaaatatttaaaaaaagaaccaagagacaaagaagtaaagtcacaagacatgaaattaatagtagaatggatacaattgcttaatgaagcagaaatttggaatatcaggttggcaaactctgacagaaaagaacaaggaaagaaaaaaagtaggaatgcaaaaataaaattaagttatatggaaaatagaaatagaactgcctgtatctagagaatagcatttccccaccaaaaaagagaaaaatcaaaataggaggaaatatttaaagaaataatggaaaaagtttctgtacatttaaaaagttagagaatgaccttagattgaaagaacccagagattgcaaactgggcattgaagaggaaaacacacacacacacacacacacacacacacacacacacacctgaaatttaaaatgataacaaagagaaaatcctagaatcttctaaaggaaaagaacaggttgcctaccaaggaacaagaatcaaatcaacattcatagccatactgaacacatgaaatcaatgggttaatattattaaattgttaactgaaaagaaatctgaaatattattcaaatgtgagggcatgagttttaaaattctcttcaatatataaattcaaataaaatttgacgtaaaaatacatatcagaaaggcatttcgtagaagaaaccacatgataaggaaaacagaagattatattaaatgatgtcacagtaacagcaatcaaatatctttccagagtttgtttatatgtgagagaaaaatactacatcaaataatgaaaacatatatatctaataatctagaagcatacttttagacaatatgactatgatgggaagaatggagaggggcaatgtcaaaatgataatgttctcaatttgaaacattctaacatgtatttatataactaaatagctttaaaatgtatcaacaaaaattgataggagtataggggaaagctggcaaaagtatcatcaggattggagattgaaacacatctcttataattatttatagatcaagcaggcaaaatttaacaaaaatatatgagagttggatgactcaaataagtatgatctagtaaacatttgtacaattctagatcaac

SEQ ID NO: 1883102 - DNA, 4001 bp, Homo sapiens; identical to SEQ ID NO: 587226

SEQ ID NO: 1883103 - DNA, 4001 bp, Homo sapiens
acagcaatagcaccttcatgcagtcagaaagatgaatgagataatacatctaaagtatgtttaagtgtccaacacacagtggacttacacaaatctaagttctcttctcccttactggggttactgctttgctcctgcagtgggaaaagcatcaagagtcacaagtctttctcttggctaatgaaaacagagaattattttaactccagtaaagtcaacaaaaggccaattctagcagccatttaaagtcacagtccaattactgaggcaaattacaaatgactctttggtttaacttggaagaaaacagaagccattaaaaagatagtaagatgccttctttttaaaattaacatgtctggaagtaaaaaagatgaacaaagccaatttacaggaatgtggacagggttgttggattaacagcgagaggaataataaaaatgtcctaggctgggagcagtggttcacatctgtaatcccagtgctttgggaggctgaggtgggaggattgcttgaggccaggagttcaagaccagcctgggcaatatagcgcaacccagtctctacaaaataataaataaatgaataaacattaaaaatttagccaggtgtggtggcatgcacctggagtcctagctacttgggaggctgagaaaggagaatcacttgagctcagaagttcaaggctacagtgagccatgatcacaccactgcactccagcctaggcaacagagcaagactgtctcacaaagaaaagtcctaaattctctcccagataagtttaaaactctgaagatagtaactcttttttttttttcttcaaagactatcacattgattagccaggagccaccaatggaaagagcagtagttcctgaatcaagacagagagctaggttcaagtcagttctggcacttactggctgtatgacaaaaatccttcacttcactttccacagctgtaaaacagggatacgggataataatacctagttattgtgaggtttatatgagataatgtttatgaaacatctagcaaaaagtaagcacacaatgtagctgttaattacatgtgactgatgctggaaggccttaacccaggagcagaaaagctttgcagaaagcttttaccataagctgcaactgtatgatgtgcatgaggtggacttaatgctgggctctaacttgggctgccactggtttcagaaaggttcctaaaaatagcatgaagctgtggcacaagattttttttttcctatcaatccctaactaggattcatggagatatcagaaatctttttggaccagatcttagctatgctacatttcaaagttaaatcttaagtataggagctgcgctatattaaaaaggaaacaaaaaaatttatgatatcccatcatctttgcctctcaaagccccttccttttagcacccagaatgccacccaattaaagggatgtctagattcttgtgtaatgagtaaaaagcctgccttgctcacctctgaaaccccagccaagtggaatttactgggaactggtcacacttgtcagctgcatagtgacctttaactctctctgcacctagctcatcactgttcagaagaaacagagacctagggaggcccgaccttccttatgagtcttgcttagggtactagcttctgaaaggacaagacagtccccactctggggatgatgtttcttgctaaacagaggtttacctggttgaacaccagaaaaagtagatgtttgcatttgggtgcttctctgtatgaaggacaggtattctctgttcatgagagtcacctcagctccacgaaaaccttgttcaacaaaggcacacagagctcgggccactggaggaagcagcaagcaccctgatgtcatgcttactccagggcaaaactctgtggagggattggtaagcaggggtccctgtgctatttaaattatctccacctgctacttccctttttttttttttttttcccatttgctaagcccatgttttgccctgctgaggagcagctagagatttatcattcattacatgatacttccttctggccctcacatatttaacctccttcaacctcagatcctgcatcaaggaagaattcacagctctgtgccacagaattaatttcttctggcttttccccctttctttttaaccattcatccagctctacagagcacaaggccgactacagaattagtttaaaagaaaaaaaaaaaattaagctactttccaagcaggtaaaatttgcttttacatattttctatctctttctctgcttcaggcccttgtaaacatctaaggctgaagccctctccctggccaggggttcttatttactttttcacagtctggtagctttcaagtttaactgtcttttttggggggctaagtggatgagagaggtaagagttcccacctattagaagggcagagacaaagaatcccacactcctgaaatttcattaaaaaactgataccagggcaactgatggtagacagctgtgtggggggttaaatctatggtttgggaaactgtagtaaaaggacagcgaataataatctaatttaagcatagttaccatcaactatgggccaggcgctgcactggtttttaaaaaatatattatcttttaaaatctgaagtctaattgtggttgtcccactgcctgtgggagattagttcgtctccccccatgcatcaaaatctgtgtatactcaagtcccgtagtcggccctgcagaacctgagggtacagaaagtcaaccttccttataagtaggttttgcatcctgcaaatactgcattttcaatccacgtttggctgaagaaaatccacatataagtggaccagcacagttcacacctgtggctgttcaagggtcaactaagtatgactgctcctatttcactgatgagaaaatgaaggccttgcatgcccagtggccaagaagcagacctgggactcaaacccaatctgattccacagcccaggcttccacctgctggcctgtaatctacagaagtgcaggacgactatctcccatcacaataaaacccccagaacctctcagagtcctactgctccctgccactcaccaagtggcttaagaagggggaatttaggttctgagtccactgctgtcagagacaaagaaaacaaagcgggggggcggggagcagaggtagagctggaagacaatgttcacactgttccttctggagaggcccattgccttaaaggaagggtgcacccaaaatcagccttgatttatttaactgccacattttagactaactcactgctgctgaaaaggagtgggaaaagtaaaactggcaaagtgacatgctcttgtagctaaattggccagagaggccattgtctggcccaaagaatcacataactgggagctgaaacatctgggttccagtcccaattctctgtgggagtccaggcaaatcacttcccttctttgaatccccatgtcttcattgctaaacatgggtgttggatgggataaaacttaaggaatcattctgctctaacatttttggcctctagggtgcaaaataaatgacaaatagctagttgacaagtatggatactgcacaaccaatccaacactttagcccagtgtctgggagccaagggaagcatgagaaacctgtaatggtgtccatatccacaaacatgctttgattagtaggaagctaatacacatcttttcaacatgatgtacaacatagatgaagactccaaatggcagacaggcaggacaagccctcattttcaagggttgaaaatcactcctgccctgagacagaaggcatgggttaaatatttcctgaatccctatctttgctagctccatcccatctcctcttcgaggccaggccaccaatagctctcactgggtcatgtctacaaacactgttacctttcatttatgctttccctctccaatccattctccaca

SEQ ID NO: 1883104 - DNA, 4001 bp, Homo sapiens
gctggtctcaaatacttggcctcaagtgatcctcctgtcttggcctcccaaagtgctgggattacaggtgtgagccactgcacctagcctggtaggcatttctttctagcactgtgctcaatgatgagtcttcagggctagatatcaaatcttatactttcccacttaaatgagttataacaatcaaaacgtcaaggaaaattttatgtttggggaatgaactgttacatccactaattccctttccaggtagaaaacattccaaagaagtgattattaatgcaggttgcatgtgctatacatgagtaaatttgagaccaacagggctgcaaaggccctctggctctgctgtggtcattcattctgctgtcacacagacgagtcatcatgtcaggggctgctgcccaatacccacaggcccaaatgtccagagttctcacttaaccttactctttggcttctcaaaatgagtctcctttttccaaagatggtgtgagtttttatgtctctgtaactttgccccttacgttccttttccctgcaaggaaggcctgtctccttccagttttggtgaattcctacacaaccttcaaagaacacctttagagtcactttctgagaattcttccatagctgacttgaccagcccttataaccagcttcttaccaggagtggttaattaggggtgcagattttggacctagacaagtgtggctttgaattctagctgtactgctgaccagtgggtatgagtttgggtgacttcttattctgctaagcctcgattccgtcatatatcaactgggaacaaccatggtacctactaccctagatgggcatgagtattaaaggaaataaactataaagtacgggacacagtgctagaccacaggaagcctgacacaagggtattattattcacagctcttcaatggcatgaaacagaaatgatgttaatttactcaatgagtggtcacttcaaagaatggaccccaccttctatgtcttggtaacaccattatttttatttttattttttctgagatggagttttgctcttgttgcccaggctggagtacaacggcatcatctcagctcactgcaacctctgcctcctaggttcactgattctcctgcctcagcctcccaagtagctaggattacaggcatgcgccaccacgtctggctaatttttgtatttttagtggagatggggtttcgccatgttggccaggctggtcttgaactcctgacctcgagtgatccacctgcctcggtctctcaaagtgctgggattacaggcgtgagccactgcgccaggccgataacaccactttttaacaaaatgtctggcacagagcagtcaatagtccctgctagcgaaagacaggactgaccgtgctggctcatcaacttctctgcccacagcggaccttcttacacctggctgggtaggcgtctatggtctggttgacaagaatcctgtcactctcatagctatgcaaaggctacctgctgtgcttgagaagaaaagtgtggctagaaaaaattctgaaaataaaatagtactgaaaagaggacaatgagcagcaaaaatatggaagcaactcaatccctttttctctctctgtgcaatttggaaaaaggtcttagtgtatcatacagatgtgtgtaagagaaagttggagatacctcctgggcaggcaatggaagaagtgtggccaagactcctggtcacctaccatagcttcgaagctacaggagaagagtttgtggaaagagagggggcattggctcagcagcgaatggccaggttgctacaggagtattctggaatagtgaattactatacaggccttggagttggaaatgggttcaaatctcacttctgcagttcctggatttgagatcttaagcaagtcatttgacttctctgtgcctaatttcctcatcagtaactgggacaatgacagtcccacttccaataagtagatatgtaataaaacaaacaaacaacaagaaaaaacaaaaaaacaaaggaaaagaaaagaaaataagtaaatatgcatgtctcagacatttcatctatggagcttttttacctggaagtcccaggcctgaaatataagcagtaaaccaatttttggtatagtttttcatccattatttgctctatattaaataaaagtacaattctaactcccagtgaccaaagatgaggaatgtaagtgattcccagaggtcactttgtcagggattggtagaacctggatcagaacctgggcttctggaatgttctttcagtgcatgttatggtttcccacgtgcactgcagacacttctctaaatgccaaaggatggagggccaggggaggggggaaattgttattaggtattaattcaagagtgttagaatagtgtcagtcttaaggctaccatgaacctaacaattagttgtatttctctctttgctcttgcctgtaagaatcttagggtcaaatccgtggcccacttccagacactgtatgtgactttttgttactcattttgtggagaaatcacactcctggaattcaccttactttgctacctttattctccctttgtcctcatttcttattatttaaattgtgttaaaatatgtgttagtctgttataaagtaggttattaaagaaagaggaggaccgggtgaagaggctcacgcctgtaatcccagcactttgggaggtcaaggcaggaggatcacctgagcccaggagttcgagaccagcctgggcaacatagtaagaccttgtctctacaaaaattaaaaaatcagctgggtgtggtgtgacgcacccagagtcccaagttacttgggaggctgagatgggaggatcacttgggcccgggaggttgaggctacaataagccatgattgtgccactgtactccagcctaagcgacagaacaagacgttgtctttaagaaaaaaaaaaaaaaaaaggaaagaggttcaatgaaatgcaacttcaaaaatcataaattccctacaaaacccaaatctgtccacaggactatttgttttgctatcaaaagcctgccttagaagtctcctgagacagatggctggattcatcacagaagcaggacttcagtaatgtaatgctggggctattttgggcactgtggatgttgtggttctggcagggaaaaagcctggggtggccctcccagcctgggcagcgcaggagctgcataccagggtgccatgctgcagatggataaggaggcacagccagcagagcttgtgctgcttgccaggagaaccatgctaagttgatcgccttctccacacttcagcttcatgggcacagaaaccactgctgtgaggagaaatggccagtgggcctgcattttgcgagcacagagtggtgcgtggagagggtgaggagggctggctctcagccacacaggctgcaggtgaatcctggcccccacgtactagctgtgagaaacagtgtaaatcacttaacctttctgcgccccgaagttgagataatagcattttctctctgtgtaaccatggttaagaatgaggtacgttaacacatgcgaagtgctcaacacaatgcccagcactctgtgaggcacttacaagtgatggccttataaaatattacgtacgtagttttttatccgaagattctaaaataatgaattgtcattttcttttgtcttacaagccataaacctgtattaagaatttatgggctgggtgtggtggctcatgccggtagtctccagcactttgggaggccaaggcaggtggatcacataactcaggagtttgagaccagcctgggcaatatggtgaaaccccgtctccacaaaaaatacaaaaattagctgggcatggtggtgcacacctgtagtcccagctactcaggagactgaggtgggaagatagcttgagcctgtgaggtggaggctgcagtgagctatgatcacgccactgca

SEQ ID NO: 1883105 - DNA, 4001 bp, Homo sapiens
cttatgtttgttttagtggtatttgggagtgggacagagctcattgcatttgcaatgacaaaatttgccatttaaaaactggaattcaatgagcctttttttttttttaaagccgcttggttatattgtagaaaatggacttcatggttctgttggttttgtattggatggtatacagagtagaattgtatcccccagaaagacatgttgaagtcctaactcccagtacatgtgagtgtggccttatttgaaaatagggtctttacagatgttatcaaggtaagatgagattatatgatattaaggtgaaccttaatccaatggctgttgttcttgtaagaaaaaggaaatttggacacagacacacagagaggagaatgccatgtgcagtgaaggcagagattgaagtgatgcatctacaaaccaaggaacactacggactgtccacagccaccgcaagctaggagagggtgtggaactgattctcagttcctccagaaggaagcaaccctgccaacactttaatttcagacttctagctcccagaactgtgagacagtaaatttctgttgttttcaatcacccagtttttggttctttgttacagcagtcccatgaaactaatacagataggtattaagttacgtgatttagtgttcttagaaatgggggccctttgagaaactttcagtattcttagaaatggaagatgctttgagaaatggaaggtgatttttccctgaagcagcaatttattctctatatcatttgttatctggcagtttcattgagtaaatgtcttaattattcttcaacactataaaattgtcatggtacagaacacatctgatgtgtcttcttatatctggctaacttttaaaatgccaatctgatttatttggaaagctatcaagccaaacagagccagctgaacactgagaaatctaatcagaagaaagggagaaaaagaaaggaaaaaagagagagagagagaaggagagaagggaagagaagggaagggagaaagaaaggaaaggaagggagagagggagggaggaaggaaagagagagagaaagaagcaaggaaggacagaaagaaagaaaggaaggaaggaagaaaggaaagaagagaaaaagaaagaaagagagaaggaaggggggagggaggaggaaacagtgagagaaagagagaaagaaggaaggaggaaagagcaaggaaggaaggagaaagaaagaaaggcaagagaggaaggaaggaaggaaagaaagaaaagagagagaatgaaaataaaaagaaagagaaagaaagtaagaaagaaagaaaagaaaagaaagaaagagggagtccaaatatatcttcattcattttgacctgaactctggaaaatcttccagcaatatgaacccaatatccagattctagtccctccacacagattcctctagggactttctgtttttgcagttgccctggggctatagcttttcccaaagagctagaaaacactagttctaaaggacacattaataaatgcaggtgaccacaaggacttgtggagaacaaagagaaacaatgataagagccccaggaaagacctcactagcagattttctgtctcctttgcatctgtttacctctcgtgtcagagtgaggacctagctggatccaggaaacccaggcaaaatctgcttcccagtagagttcactattggtgaagaaatagccccaaaactagatttcacacagttcaaaagccagttctcccaaaataaatttgccagttagtgaacctacctgaatacctaaggtctttccccaggttttgattctgcctcaacgttgccgcagctgccttggcttagaattgttagtccaggaattcttctaagtgtgaatgactgggctttcctttaaatccatttttgctgttttatgtcccctaaactgtctctttgggcttctgctctgctcctgttcctgcccctgcctgtatctacttctgtttccatggggaagtgtttgggaaattggaaccttgggtccttttttttttacccctcttcaatgaaaagaacatttgactagctcttggctagtatttttggcctttcagtgaaatggttgttggtgaattacaacttgataaaatgatccagaggccagatatcctatccaagaaagcatcttttgctttaggaaggcaatagaaggtcattaggattaggtagactgaattctattctggcttgctttttttttttttttttttttttgagacagagtctcgctctattgcccaggctggagtacagtacagtgacatgatctcagctcactgcatcctcggcctcccgggttcagccaattctcctgcctcagcctcccgagtagctgggattacaggcacccaccaccatgactggctaatttttggtagagacgtggtttctaccatgttggccaggctggtctcaaactcctgacttcaggtggtccccctgcctcagcctcccaaagtgctgggattacagacatgagccaccatgcccagcctctggcttgtttttcactcactgaggtagagctctatatccccaagctccagtttccctgtaaaatggagataatattgccaacttcacagatgtagggattaaatgaccctggggataacttgaatgcttttttaaaaattatgatttacttaaaaatgtgtatattaaatcaggtaaagttactccttatagcttataaacaattataaaacaaaaaataatgatttacaaaggagagaggtgcaaaccaggccagtgacattctgaataatagcattaatctaatataacaaatagttttgttttatggaaactgaatcacaaacattgcttttagtggtagaaagatacatttgcttattttccatttcacttttgcccactggatccttttgatttttgaggcacggtgggccatcatttgaactgttaacactatcacagttatttttcattttaatggtgacgccagctttagccatccacggcacttactgcaagttggtgcatctaaggatgggaactgtgtggccacacagatgaggatgccactgtttccatcacagggctcctgcacgggtgatgattcaattctctcaccctcttctgtatttaaatgactcagaagctttcatccgtgatgccattttgccatcatgaagtatagagatctcatttatatcttccttttttcacacttcaagactattgaaggaattgatgccatttcagcctttaaaacaatacatatgtcatcaccaaatcatggaatcctaataagttgagatcatttggatgattctaaatttgctaataatagatttttttcacaattaccatgaaacagaagaatgatagtatatcctcagatccccccaggaatttgctgactgtcacattttcaggcaaattggccaaaatgtaggaaagtgtctggcatgtagtaggtacttggtaaagaaaagttttttatgaaattcatgccaaaaccatccagtaaagccagagatttccaaactttatacttaaagttccatcaactggacttcaatgattctatgtctcaaaaaaattaaaaagcattagggaaaatattactcaacttaaaccttgacaaagttgaattggaatattaagtaactagcaacactggtgccagaagtgagtaaagttatctgcagagtgcaaaattcgtcacggtccttgcccacagacttgtagtctacataagaaccaaaagggcgtgaagaaattactgtaaaacctatcacattaaggagcaagaggctatggaaaggacacccattctcacaatgagaaaggttgtccttgtagagaaactggaggccttcacccatagacgatccagagtgtgaaaattacagggccaggacacagagcagcttttggaagattcaaaccccagaagctgatagctgctcaga

SEQ ID NO: 1883106 - DNA, 4001 bp, Homo sapiens
tgctcccttccacattatggattctggtgagtgcctgccagaggaatgtctgacagctctaccctcaactggatcatctttagcccaaattacaataatttaagtgaatcaaattactataaaaagatacttcattattaattcactggacatttactgagggcctactctgtgccaggcaatgctctgaacttgccctacctattggatgctacgtgctaaatgttatagacaatgtactctcgtacattctataaattatataggatataatgagtactatattctctatgctttacatgctatattaaacatcacaccctatagtctacatacaatggataatatacaaaatatattatatatgtattatgtctactagaacagtcttttgccacaataggaatttagtaaatatacattgaatgaatgaatgaatgaatatgatacttaataccatattctagcagagcttggtcattgaagagttattcttccaaacccttccctttcctacccccctcttgaaggctaagaagattttcatctttcaccacctgttctggattcttggaacaggtaaattcattggcctacgcaagtctgagctctaggtctgaacccgcatggacctgagggtgcaccgagaaaagaaaggctgacaactggatcccgggaatgtcaaggccaccctgggcttgaagggaccggccatgcctccaagccttgcccagagagggggttcaggatgctgcgtggttccaggtgatctattgctttctcgagtttaaagttcagaggatcatgaagtaccacagctggaaggggtgtaagtgacactgcctagcctaactctcttaaaaatcatagccctactcctgcctccccaaatcagatacgacaggcataggctctgactgttccttaagtcttagtggcaatactccctgaccagttttgcggggttgctcccagttccattgcttttgtaacaggtggccagaaagcctggggtcccgtgataagagtttcagttctttccaggatggatggaaagaaggaaggaaggatggatggatggatgaatgaatgagcgggtgagcggatggatggatggatggatggatggatggatagatgggccagagactgggaacggtaatgccggccagacgggtccgagcgcctcgggagccccagccctcctccggctgcggggccgctgctcctgctcccgggccgtcacggagccctgagggagggggcgggcgagcgggggccttggggcggccagggcgctgggagggaggactgggcggtggggaccggaggggagggagggccttggaggcggagaggagggacgggctgggagagggcccggactaggggcggcgggcaccgcaggagctccgcgcggctgcagcgcgggcgggagcggggacgcgatgtcgccgccgccgcctccttgcgggccggggctgcgcctccggggctgagccgccgccagagccgacagccgagcagccgctgggcgctcccgcggcgcaggaggatgggctgcggcgggagccgggcggatgccatcgagccccgctactacgagagctggacccgggagacagaatccacctggctcacctacaccgactcggacgcgccgcccagcgccgccgccccggacagcggccccgaagcgggcggcctgcactcgggtaagtggccgggcccctgcagaccctcgcccgcccgctaccccgggcgccttggcccgggcactgagagaggagccggttccctgaggaattgatggcgcggcgggggtggctgggaggaagcagaggcaggacctgcccactgatcagtggacagatgcaagcccagggagtggggtcgaccagagccccttaccgaaggctgcgccgatgccccagcttccagcagcccaatgctctttggccttgtccaaagcttgctcgctggtcgggagaccggtgggtgggaggacagcccacctcctccgcacacatatccctcagccacccaccccctgatccgcccagggccgcctccgccccgctttggcccatctgccatcccctggccacctgcgtacccagccgggtgacttctcatccattggccacctggtgcccctctctccctggatttatacacaaggcgcctgcctgggatcgcctgggtggagtctttcttgtcgcttccccttttctccctctaggaaatgagcccactcgcgggcttcaaagaccagaatcccagtttaggtcaaaataaatgcaccccgccccatcgctagttctgcactttaggttacttttggagcagttgttccatagcaaaggacttctctccctaccctatggtgtcccaatgctttgcaggaggcagggcacacatgtggattttgactataaattaaatactcttgcctaggtcattcctcatccagcagaaatctgataaaaggagatgcaaagaattgtctggtcaggtcataagtcaggattttattttattttatttttttattttttagcagaacaagtaattatagcgcagagatgcaaactgttgccacagactgacctttaatcataaacatattggtgacattaaaaggaaaaaatctcactacttattacatggatgttgtccaaagcaaggtcaatatttggataaaaatgttttaagtgtttcttcacccactgatattattggcatttttgaataatgaaatctaaaatggaaaatagggttaatttgaagcataatgtataacatatggaagaggaaggaaatgcgaattacttttacaaggttaagaatcttaaatccatgcctactaaatagagctgtcactttaatcaagaataggtttctccatttttaaggaccaaagctggctccttttccacattaactttgtgacttggttttattttaaaattgaggactgtctgtgaaagctgtacaatacattacactatatttgtctccagtttttctgactcacagtggcaatcagaatggttattttgtattgccaatgcttttagcaagtcaccaaatggtgtgttggctgaattcagtgtcagcatgaggatagatatgagccttttagagggacctggtaaatgttagatgtgacagggtttcccaaggaggtatggtacttctcagcagagagtcaaaggccagagatgtactccgaagaaataagggtgaaaagatctagcatgaaaaaaataataataaaaaacaaccaaaaccccgtaagtacagctttaagaaatggttgccgtggtgactgggagtatatggtgtgtgtgtgtatgtgcgtatatgcatatgtatgggtatgaaagagttattatgggatggctctatatgtacatacatgttcctcacaactttcctgacactccttgatttattactctgccatactaattcatatcccatccatcatgagatctggtcactgcaacaggtggggcctgggacagacacactcattcatggtaccctgccaaacatgggccagccctgccagagaggtggtcctgaaggcctgcatcctccagaggagaagctccacttcagccccaggacagcaccctgaaattggcaagacgcttgtatgggcagggtcattttaattccctgggaatttctgttagcctcaggggagagggatatttctgaagaccaagattaaatcaaggccttctttgggggtgtactggcattccctagggcctttgggaatggcttgacttctgtgggtttttcagactgggagctggtcatctttagtcagaatgggtcatccgtgaaagctacagatctcctgggtttcagccaccctgggagactggccaggattctgtattcctttcatcttctctgccccctcacttccacctcacccaccccctgccagtgctttactcatgattttactcccaagctgctgg

SEQ ID NO: 1883107 - DNA, 4001 bp, Homo sapiens
ctctgtcgctcagactggagcgcggtggcacaatctctgctcactgcaacctctgcctcccaggctcaagcaattctcatgcctcagcctcccacgtacagctgggactacaggagtgagccaccacacccggctaatttttgaattttttttttttttttggtagagatggggtcaccatgttgcctgggctggtcttgaactcctggcctcaagtgatctgcctgccttggcctcccaaagtgctgggattacaggcatgagccaccgcgcacggcccacatctttcctctaaccttgcaggatatgacagctgagcagcatctttacttattaaaagtatttatttccagaaagagaaaattaaaactaagcactacttggcccaaaccaaacccctctagagatccagaacacacagggggcgctctttgggaggggtgctgagtgttagctgaaccccggggccctagcctttggctcccttcctcccttttgcaatcccccaagtgtgccgatgtgtgtgggatgtcagacaacacctggtctccctggctggggactgcttggacttgtaccgggagggacttcaggttttcagctaggttgatcatcctggaagctgaggaacttgaggtctcacaatgaagctgaggagaaggtcaggggtgggagcgcgttttctacttggtgccgctcaaggccatctgacagcctgagaggagtttggacacatttcacctcccctgcttccagcggccggggtgggttgcttctctagctcactggtccgagagttctctcctccactggggaaagatgcacggggacactgccagaattctagcctctcagataatggctaagggactaaagggacacactggagcctcattccgaggaaaagagccagacagaaaagatctgaacatctttgaatgcttgatgcctttgccaaaaaggcaattggaccccagtcaacaatgcaagtataaacacatgtgcacggaccatcaggggatcagggcaagctgggccaggctggcgaggttagctcagggagaaccaagccccagacgactacccgtggccaccccctgcattcattctccaaggcccacggtgggaggaaagggttttgctgttccctgctcttttggcagtgcacaggtcaggccctggcacagagtgggaactcagtatgaagtgaatgaacaggctgagttcccacccaaacttatgctcatggtgaagtgaaaaaggaaactggcaggcagggctggggcactgatcccagggctgaggtgcatctgatcggagtctgagaagcccagaatcctcagcattctgggaagcccctccttcaagggatgctctgcgtggaaagtgggctccctgtaggtatgttctagcaggattaagcaggattaacgaggctaagggccccgccacctggcagatgaaaatccttctccagtggagaggctgcatgtggccagactctctttgccctaactttgcagagcacccacctggctaggaaccttggagcgcatgttccttgtgtgcaagactcacagtaacccttgtttcagggggacacgaagagcaaagcttcgaagagctcttccatcctcccaggttatggaggaaggtgtggcggcttcttcctacgctacgatgctcccgccactttatgggacctggggagtgggaggggactgggtggaaggttaggatcgggatcgggggagcttttgttcctccatctcagttctaatggtcagccccagcaggaacaagccattctagccaaagccttgacaataatggaatttgtgttaataacctgggcacaggagagcagtgagggtagggacacaatgctttctttgtgcctgacagttgggtgccttgagccaaaaacctcctgaaactccctgaagataacgtgagcatttcttcccatgacaggggctccatgacttccaataacccaggcagccacagctgctcccctccctgaaagtgcctgggcaagaacaacagagtgcgtcactgctgttcaagggcagctgccagagatgctgagacaactgcacagcccaggcctgttttgggggccgggagggggtggtgggtggggaatgagactgaagaggcagggtcttactacttctacttcagtgcctctggggagtggaggggtataggccagggaagcaaataactactccgagctgtagctcagctgtgattccttgtgagagatcaaaggcccagccgacttttgttgcgttgggaaatctagctgcctgggacaggctgagtccctgatggttcataaagaaggtcaaatcaaccagcttcctgtgatgtagttaactggggacttattttgtgccagacactgtgttaggtgccttcagtgtattatcttgtgtgagcctcaaagtaacatctgtgacacaggtactgtcatcatcctgattttataaacgagaaaatgaaggctccagaggttaaggaacttgcccaaggtcagagacagcatgtggcagggccaggatggggacccaggctgccagcctcccaaacctagtttcttaacccctacctgacccccagtctatcagagagcagatgccataatcagaggaccacaattccatctccagcgagacagatgcgaggaagggaagagggatgccctgtgtgcatctgcccgcactgcgagtccttgccactccttagatcaacggagccagagatcttgccaccaacacactggcaaagcagctggtttgtctacactttctgtggagaacaaagttcattttgataaaggttggggtgctgggagggtttttgtttgtagtgagcattcagaataaaagaaccctcttgaaaccacttccctttcagatctgtcatggattaaactctggagactcaaagccacaccttcccacttcctgcagccggctagagaccaacatatgcacacccagattctttggacttcagctgagagcctccacagatggtcagcctctgcatgagaggtcagcgctgagttggtcagcaccctgcctctgcatgaagcagagaggccccaccccccaacttttttttttaacagacagggtctcagtctatcacctagggtggagtgcagtggtgcaatcagagctcactgtggcctcgaactcgtgcgctcaagcagtcctcctgctttagcctcccaagtagctgggactacaggcgtgcatattttttggtagagtcggggtctctctttgttgcccaggctggtctcaaacttcttgcttgaaatgatgcccccacgttggccttccaaagtgttggattacaggcgtaagccactggaccctgtgagggtgcttttaacttgggcctgtttcctctcaagtgaccttactctggatttgctagagatggagccattggtcagatgtgtgccaaacttctcaccacactgaagcaatctctttcctgtacttttgagagctctgccaaggaggggagaagctagtaagacaaggagaaccgtcaggggctgggatgacagacgagggcctctgccgccagcacagcaccggacttcctgtagctgtcacatcagagaggctctacagttgtggtctcccatgttaaaaccaagagacccactcagatttgtgggtcaggaggttgaaaaggctattttgcaccgggattccaaaacactgggagggcttcactgcccagggaagcatgaggcaatggaaagagtatcagccaggggctcacgcctgagttctaactccagctttgccagtgtggggtttttataacttgaggaagtcattgcaactttccacgggcctcattttcttcatcaggaaaaatcaggaggttggactagatggtctctatgagcttccagctctaacttcctaagaatctatgattctcttcctttcccattctggagataa

SEQ ID NO: 1883108 - DNA, 4001 bp, Homo sapiens; identical to SEQ ID NO: 587270

SEQ ID NO: 1883109 - DNA, 4001 bp, Homo sapiens
gagcacctttgaagtagtgtgatcagaagacgaggctggccgacccctctgtggaaaggacacagccctccagctgtggcaatgggtgtgcaggccacaggctcacctgtcctaaggcggggctgctctgcctttgtttggattgtgtgtggtatcatggctctcctgcagtcaggctgccacacttcctaagtgtgcacgtgtggggaggggaggagtggggagtgtgagtgattctgggtgctcaggtgcatgacagctggtctcccctcatggagttaccactgtaaccggactccaggcttccaccatcggccctcgaattttacataggatggttggccccgggaaaaggagcctctgaagttttaaaatccaatatggctccaacattaagctcacactggggaccagctcaaaacccacccatttcacattccccaaaacgtttcgtttggtgggcctgtgatttagctcccaagaggtcacagatacaaacacaacgaagcgagctattagggctggacatgcactcagtgacgcagctgtccctccaccctggcccgggtcaggttctgccaactccacacgcacactcttcgtttgaagggtcccaatgggtttgaggacctgtaagactggtacgcacggcggaccccatgaacacccagaacaacagtgagtagagtttatgatacgttgtaactagaatgaccccaaatatctttatttacttggcattgtacttcccaaagaagaatattgcagccactgggcctcccttcagagtgcagagaggcagctccaggagctgagcctgctgggatgcaactcctcctcctagcaccatggactccttcatctttcagtcaaggctgccagtggctaccacgtggccctcccattcctggagctctcagctgcatccgccacctgctctctcgacggacttttttttttttgagatggagtctcactctgtcgcccaggctggagtgcagtggcacgatcttggctcactacaacctccgcctcccaggttcaagcaattctcctgcctcagactcctgagaagctgggattacaggcggcagctaccatgccctgctaatcttggtggactttacactggacacatgtgtgctgagcgctaacacaaaggccaggcaagtgtcccctggagacagaggggtggaaggctaggtcacaggcatggctgtcaacggaccctgctgtgcacccattctggccgcgaagtagcttcatgcattctctgcccaagataaatgcagagaaaactcggctctacaggctcacagggagtgacggctgctggccccaggaaggaagatgctccttacgggacacctgctgtgagccccttctgtcaccccacccccgcctgggtggtgaggaggccaacagggcaagatgcagagcctcccggcccctcacacccccatgggctcctcaccaccattctctccccaggccttttctgtggacctgaccttcttcagcgacccaggaggcaggaagggaagcctgagtgttagaaggaaagacaactaagagcagcagcctgaccgcagctgagcacggtcgtgctcctccctggggaagtgccaagggagggaccccctgctctacccggagccctggagccctgctaagcagggtggaaagcctgcagcccggggggtaccgcgactgtggcccaaccatccagtgtgtgagccctggatgatgaggccaccaagagcaaggcagcccgcttggacaactgaccatcatctgacgaggcagcgcatcacccacgtctctgctgttcacatttaatcctgcacaagagcgtcacaaagtgacagcattgtgagggactaacgaccaggcacaggtgaccctggacgcggccagtggcttcctgcagggcgctcaaaacccaagtccttatgatccgccgcatctactgccgagacaccagctgctccgtccccacctgtgctcaagcacctgaaggcccttccaacggcgcccgctgggcaggggacaaaccagacacgaaacacacatgcgcttttaccagcctggactctgtaagagaaaggcacccccatatcccccctggggagatttccacttatcctgcagggccctcactgcctcaccgggctctgccagggcctgccccgcaggggcaagtgcttttcctacacagggtctgtgggccaggacagacccagaggagcttctgctacgggctgaatggtcactctgaaattcccatgtggaagccctaggcccgacgtgatggtatgaggaggtctctgggaggtgatttggcttcgatggggtgataggggtcatgggatccgggccctcacaaggaaaaggtgacaccaaagcccctcctgacatgaggatgcctctgaaccaggaggcgctcgccggaaacggaccctgttggcacctctacctcggacttccagcctgcagagctggagagaataaacctgtgttgtctgtggggctgccggtggtgtcctggtaaggcagccctgtgactccatgaccgacagctgctctctacaatcttccgtgagcacgaagaaactcatactcatgctgcaaataaaagatttggggaacttttaagcacaccaacctcccggcttcaacagctgtcaacattcagccaatactgttgtgtctttctcctctttattagaatcgtaaagtacatcccaggcgccacgtcatttccccacaaagacgtccaaatgcatctgagtgaggattcctccgtaaccctgtgtcaccatcaccgctagcagccaattccgcacccccacccgactcacggcccacccacccgactcacggcccacccacgcaactcacggcccaccacgcaactcacggccacccacccgactcacagcccacccacccgactcacggccacccacacgactcagtccatccacccgactcacggcccacccacccgactcagtccatccacccgactcacggcccacccacccgactcagtccatccacccgactcacggcccacccacccgactcagtccatccacccgactcacggcccacccacccgactcagtccatccacccgactcacggcccacccacccgactcagtccatccacccgactcacggcccacccacccgactcagtccatccacccgactcacggcccacccacccgactcagtccatccacccgactcacggcctacccacccgactcacggcccgtgcccacatttccatgattgtctcaaaagtgacttcgcactcggtttgctcctaccagggtcacacacagccccctcggcctttctgcgtgcccgtcttcccacagaaacgtcgccgtctggtggcatctccagccggatctggctcagggcttcctctcggtgtgttcaaccttctcctcatccccctatttcttgtaaactcgtttctgattccaacattacatatgcatctgttggctggaattttttttttgagacggagtttcactcttactgcccaggctggagtgcaatggcgcaaccttggctcaccacaacctccacctcccggattcaaacgattctcctgcctcagcctcccgagtagctgggatttcaggcgtgagccaccacgcctggcctggctgcaattcttaaagaaaaacaggcaaaagcaaaaataattggctaacctgaaacacggcagtgtcccgacccattcccacgggggtcttcccttgggaacaccactggcagatttttatttctggctggataagcagacaccttaagtttaaaacaaagaggtcacctcttcccccacgaaatgcgatgtggtggatatggccacctcactgccctgagacccaacttgatctcccaactccaggtgcatgacccaggctctgaccaacagagctgggtggaggccgttcctgcagcactgggggt

SEQ ID NO: 1883110 - DNA, 4001 bp, Homo sapiens; identical to SEQ ID NO: 587276

SEQ ID NO: 1883111 - DNA, 4001 bp, Homo sapiens
atctagatgatttgtttgttcaaagtatctttcatctcctagggataaaaagccctgctttgtcacatttgcaatttccctcatgtaaataacacccactatggctcatttcaagcttcccaagtgacatcactgaatggaaagttaaagagagaaagtctttcagatgtaaacaatctcaattatatttataaataatagtaaaaggtagtggaatcactagcatatgaattttgagtatcatatttgcttttaacataatgtaattgcaagtttgcataatttaatatttaataataattgcatttaacaactagctcccaaaatccttgaaaatttatcactgggtaggagtgagcatgtcccattggctccagcacaccactacatgttgctcttcagggaccttaaaagatactttgaacaaacaaatcatctggatcaaactatctccagagttcccaagggtgccaacctctttgctaccccactttagaaatacccaaaacacaggttaaactatgcacagtatttattaagaatgccatttacaataccttacacttgtatcacgctttacacttttcaaagtagtgcttttatggcacggtgggactgtctgaccctgcagagtgaatttaaatcgctgggtaatagctttttaatgtataatgggtgaaaagatagtcctgggagccgtttgtcaaagagaaaggcgaaggagtggaactggcagccccacaaggaagtcgggaagctggttggcccctacccggttcctggttctctcctggaaatggctccaacattgtgcaagcaagtgggtgtgcaatagttttgagcacgcatctctctctctgtctctctctctctctctctcggatttaattagaatttccgttttttccaacaaagagttggacgggatacgttctaagacttttacaaactgtaaaatgatgagcgaggtaacattcaaatatgctcttaacagaacagctcagtaatggtttcctccacatcaaaacgtgcctattgctgcagcagacgcttatgcagagtctacatgcactctcaccgcaaaaattcacacagccagtagtcgtggccgagtggttaaggcgatggactagaaatccattggggtctccccgcgcaggttcgaatcctgccgactacgggaatgtcagctttttgccgtcaacacttactttttgtgttttagagcgttctgctcaaaccttccacagatttcaggaatttacaaacggctgaaacacaacagggacccaaacgggagaggagagaatgaaggggcgagaatgcgtgcttgtggttacaacgtgggcccgggagggggagacgggaggaaccacgccagacatgctgaaaggaagaaacgcaaagcatcgcgagtcacacagacacactgcagagacagctccgaactctgtccctgcatacgcccgcccctcacgaacccaccgcgttctctgccgcgagccctcgtgggcgccgggttgccacgggaagcggtgcgcatgcgcggggacgcctaacggggcaggagcccgccaggtcccctcgttactcctggaaaccaccggagccttggcgattggaggggaaaaggccaggcgattcaagatggcggaggacctggacgagctcttggatgaagtcgagtccaagttttgcacacctgaccttctaagacggggtatggtcgagcagcccaaaggctgcggcggcggcacccacagtagcgaccggaaccaagccaaggcgaaagagacgctcaggttaaccgggcgggaggggtggactgttctggtaaagccctgctccaggccctagagctgcccctccgccgcccaacccaaaagaaacgtgcccgcgacctccagcccctccttgcatcagggttcagaccctcagcgccctaccctccgcggcagcgcattcgtcgaccctcttcgcggattctggcacctcttcactcagcgcagactccgccccccggcatgccccagagggctggcccccgccccgccccgccccgccccgccccgccccgccccgcccgcagagcccgcagtccgcgccagtctccttcatcctgtttctggctgccagcgcgtaggaggttctagtcggggaccgggatacccctcaggcgccccgttcttaaccccgagagggctgtgctgacctcggccgcattttgcctctgtgtggccaagcggttctcatctccctgtgaggtgccctgttagacagcctcatcccattgcctcagaccccactccccaggtcaatcctatttgtctttagctcagttttgttgttttgtttgttttttgagatggagtctcgctctgtcgcccaggttggagtgcagtggcacgatcgtagctcactgcagcctccaactcccgggttcaaagatcctcccacctcggcctaccctagctgggattacaggcacgagcctgtaatctgggattacgtaaactgggattacaggcacgagcccggttaatttgtattttttgtagagacagtctcactgtgttggccaggctggtcttgaactcctgagttcaagctgtcctcccgcctctgcctcccctaactgctaggattacagttgcgagccatcgcacctgactcagtttgttttatttttttaactcagggagttaagatgagattaaattcattacaaaagggttaattattgtgaacattaaaccgtctaccttccttctctccatggccccctagttaagggtgccagacatacatatggaaatttaaggacatttcttaaggtattttggttttttatctaaaaactacctttcaaatttaccagtcgtttttcctccatgtaattattaaataataggatttccttcacttcctcatttcccccacaacccctcaaaaaaaaaaaacaaaatgtttgcataagaatattgaccttcagtaactcttgctagaatcttttggaaattgcctcttgcctagaatattttggaaacgcttgtgaaattacacggaggcaactttggatcaatctaagaacgtcatctccgttaatttttttgctgcatctttggtttggttttggttttttggtgtgtgtatgtgtgatttcccaaagtattatccaactctgttactatccagttcacctggcttacctccagtgatatttatttattttatttacttatttatttatttttgagtttcgctctgtcgcccaggctggagtgcagtggcccacctcagctcactgcaagctccgcctcccattcccctgcctcagcctcccgagtagctgagactacaggcgcccgccaccacgcctggctaattttttgtatttctggtagaaacggggtttcaccgtgttagccaggatggtctcgatctcctgacctcgtgatccacccacctcggcctcccaaagtgctgggattacaggcatgagccaccgtgcccagtcagtgacatttatttataaaaattcactctgcgaagataaaagcatcgaaaaaattctaaaggagtacataaacaaaatttctaaaaattagttgagttctgagcagcattttaaaacaaaaattagaaacaactataattactatgaatgggctaacactcatttggctggatgttgtaaatatcactctcattaacttttattatcttgtgtactggaattccttatgtatctattagcgcatctaccatccctatcccacaacagtgttgctttgcaatttctttagtacttttcgtttgtccttctaggggatagaactagtctatcaaggagcttttcagagctgttcatcttaggagaactagcatgcggaggggcaggatgtattgaagccagctgctcaaaatggaaaggactatttatgtggatcttctccaaccatgggttgtgtcatgcctgttcttgctctactaaaattcat

SEQ ID NO: 1883112 - DNA, 4001 bp, Homo sapiens
taacagtttgagatcatcaagagcccaagaagtaatggatattttccatttttattaagttctcaaggaaaaggagagaggaggaatgataaatctcagtttattattattattattattatttgagacacaatttcactcttgttgcccaggctggagtgcaatggcatgatctcgggtcactgcaacctccacctcccaggttcaagaaattcttcggcctcagcctcccaagtagctgagattacaggtgcccaccacgatgcctggctaattttttgtatttttagtagagatggggtttcgccatgttagccaggctggtctcgaactcctaacctcaggtcatccacctgcctcgcctccaaaagtgctgggattacaggagtaagccatcgcgcgcagccaatgttttttttaacatctctaattacaactcactttcagcaaattcgtcctgaagaggcagcaccagagactacggtatctttgttgtacgagcagtatgctaatattgtccactagtattgtccatagtattgagctgcttctgaattaactccttatgtcagccattcacttattaggaagctgcgactggttcatttgacttgaaacgtgattagaactggtgcatcctgttacaaactgcttatagatccagcgggctgtgtgtgtgtgtgtgtgtctgtgtgtgtgtgtgtgtgtgtttctgtgtcagagggagggagagggaaagaagtttatcaggcaaataacagcagccacagcggtaggacggaagacagtcatcccagaggaaatggagcgagtgtgagtgcgagtatgagaagtgactcatttatcactcatcttgggacgggagcagccccctttttgtgttcatctgaaaaccccccgacctggagcttacgatcacgagcaccagtatctcacaggctttttcgattcttgtgttctggttaacttggagcacagcggtgccatcagtactttttgcaaaactaacccccacacacacccccgccgcccccgggttttagccagagaagtgagctggcagtgcacggaccagaaaaaagaatggactttgaaaaatgagggctgttttactatcatcttcgctttgaagattttttcttatttgttctcaaatagcctttttgcaaatgccactgccactgctatctggaggagcaatgtaaaagtcacaaaggagccagagctcataggacagcaccatgtccctggaggataagggacagggcctcagtgaccgaaatgggagcaacagtgtaaagtggcagacagacaaccgaaggagattcctggagattccacttcccaagctaagcctcgcaggcatgacgcatacttgtgttgttacagggtgacgggacatttgtgctccagcttcaagcaagcaaggcagggatgcaaactgaagaataggcgccaatgtcacaaaatgataaaacaagcaaaccaaaaccagaacacccagacccactccaaaagaaagagctttccgaatggctgtgtcccatgcacttggtccacgagtgagagctggggggctctgcagtgcggggcttgtcctaatactccccacccctggctccatttggtacatattcagaggttgtaaacttattattgttttgagatgaagtttcgctgttgttgtccaggctggagtgcaatggcgagatctcggctcaccacaacctctgccttctgggttcaagcgattgtcctccgcttccccagtagctgggattacaggcagacgccaccacacccggctaattttgtatttttggtagagacggggtttctccatcttggtcaggcttgtctcgaacccctgacctcaggtgatccgcttgcctcagcctcctaaagtgctgggattacaggcatgagccaccgcacccagcctaaacttattttcattactgttaagccaaacataatcacagcataatcccagctaaaattaattttgttactgctcacctatcttagaggcatataagtctaattttaaagataaatgctctccttaattgttaaaggacttgatgcgggcttcaaaaggttttgtttgttgtttgtttcattgtttgagacagagtctcgctctgttacccaagctgaagtgtaagtggcatgagctcagctcactgcagtcttgacctcctgggctcaagcgatcctcccacaaccttctaaggagctgggatcacaggggcacgccaccatacccagctaattttctacttttttgtagagagtccccctctgttgcccaggcttgtcctcacctcccaggctcaagcaatcctcctgccttggcctcccaaaatgctgggattacaggggtgagccaccgtgcccagccccactccacatacttttaagatgaagtggttaagcacccctgtggcctaaggaggtgaagacaaatggataaaggagaggaactgccagccttctctctcattcttgtgggacataatttgccccttagcctgtttggatcaaaccataaaatggcaagagctccttgccctggagggacacacttttaagtcagacagggctagacagaacattttcttccaggtagatggagtctcttgctccagaccctgaggtctggaggagagctctaaaaatgccctcagatggttgggagcggtgatccatgcctataatcccagcactttgggaggccaaggtgggagaattgcttgagcccaggagtttaacaccagcctcagcaacaaagcaagattccatctctacaaaataaaaaattagctgggcatggtggtgtgcacctgtggtcccagctactcaagacacaggcaggtggatcgcttgagccaggtaggtccatgatggcacacagcactccagcctgagcaacagagcaagaccctgtctcaataaatcaataaatacattgagcaacttttgttggaccacaaggaactctgtttatggataggtacaaccctctcccaggaaattaaagcccagcggtgacccccatctaatgtctcatgttagcagggctgggatgagtgtgcttttcgggacccactgctacctaaagagggagcattggccaatggccaaaaataaagtaagcagctgtgagtgggtcagtgcctacacggcctcaagattccccgggagagaacagcaacgctgaacctcccagtgaagaccactaagggacgagggaaagaggaatacagataaatttattagttaaatactgattttccagccatttcaccttaagacaatgttaacaggtttgtgggttagggagggtatacgagggggcctttggaagaaaacaatgtaaatgatgattaaaacagaatcttggttcaaaggtattctctgctacagccagtaggattttggagtgaggggtctgggcgtgtggggaggcgtagtaatgccacagtcagctacagctctgctgagaaagaggaaggagtctccttgagctccagcatcaggggcagaaacagcaatgtgcagaggagaacgcggcagatcccggagcagctcagagtcggaggctccctccaggcccccctgccgtgtcttagcagtcgtcttctttccaggaattctgttgtgttgtgtttgtttgcttcgaattcgtgttgcagaatctctggctttttgcctcctggacaaaagacttctgccggggcgaggctgcaggtcctgagggactctggctgccatctgaccaagggctaggaggagcagacagacagcaggtgggccagcccttgggacactcctgccccctgaccaggactctgtccacttacactctccccagaaggacctcgaggctgggctgagtgcttgccagactggcttgagcagcagaacgttttgttcttactcagaacccctctatgtgtgacacggtgaacgaagggtctgcagtgaactcgaggggg

SEQ ID NO: 1883113 - DNA, 4001 bp, Homo sapiens; identical to SEQ ID NO: 587286

SEQ ID NO: 1883114 - DNA, 4001 bp, Homo sapiens
ggctgaggcaggagaatcaccagagtctaggagtttgagaccagcctgggcaacatagtgagacccccatctctacaaaaaaaaaaattcaaaaattagccaagcgtggggtttgtgcctgtagacccaactactcaggaggctcaggtaggaggatcacctgagtccagggaggtcgaggctgcagtgagtcatgattattccactgccttccagcctagactacagggtgagaccctgtcttaaaaaaaaaattaaagaagaaaaaactctcttttcttttctttctttcttcttcttcttttctttttttttttttctttttttttttttagagatggcacgtcaccacattgcccaggctgttgtcgaactcctggcctcaaacgatgctcccacttgagcctcccaaagtgctgggactacaagcataagccaccacacacggccttttcctttctttttctatttctcaatggatttttccaatggacacgtatcactttggtagttatacatgatactagttgtaatctcagccatttttcaacccagcaaatgtctattctaggtcaaatatgtctcaaaaattactaaaagaaaatcagttatgtcctttaacctggctgaggtctggctttgttttctctcatgtaaaaatggagatggcacaaaacaactccaagctgttacttgaaagtaacacctcaggtgatgtcaccagcctgagggagagtgaggttaagttctgaacccacaggcattatatctgcctggggttcacatgccctacactggactggcataatttgagagtcagatccgaagatgtggtatatccgccatctttagcaactttcaaaaactaccctatgaggtcaagctggacctacttttggttttgccattgttgtttgtttgttgttgagggttttctttgaggggcggggagtgcatgcccctgtggagagcactcatttagcttcaattagagtaatgccaaaagtgccagattcctgggaaatcagcctacaaggctcctgcgggaaggaacctccactgccagaagtccttagggcatctaagtgatcagacaccgtcagggattctttgccccgtaaaaacctacttgaccagggacacgtgccaggtaaatttccttcacatttacttcaaccttattgcatactcattttagtattaaaacctttaataaaatgctcctattccttcacactttttttctatgagatctcaaataccccttcttgctattaaaaaaaatcacttattattcaccagcccaatattttaaaagtaaaaataataagccaaggccaggagcgatgactcgcacttgtattcccagcagtttcagaggcaaaggccgaaggatcgctttaaccgaggagtttgagaccagcctgggcaacatgaccagactgcctctctacaaaaagtttaaaaaattaaccgggtgtggtggtgcactgcactcccagctactgggctggggtatcaggctgaggtaggaggtttgctttgagcccggggggatcgaggctgcagtgagctttgattgtgccactgcactccagcctgggtgacagaaggagaccctgtctcaaaaataataagaataataattaataataataggccaaaccaaatacccatcaccttctgctgtgcctcccctttccccaataaatccagtgtcttgctttcaaattttgtggttaaaaaagatgatgagtttctaagacgtgggggctaaagcttgtttggccgttttagggtttgttggaatttttttttcgtctatgtacttgtgaattatttcacgtttgccattaccggttctccatagggtgatgttcattagcagtggtgataggttaattttcaccatctcttatgcggttgaatagtcacctctgaaccactttttcctccagtaactcctctttcttcggaccttctgcagccaacctgaaagaataacaaggaggtggctggaaacttgttttaaggaaccgcctgtccttcccccgctggaaaccttgcacctcggacgctcctgctcctgcccccacctgacccccgccctcgttgacatccaggcgcgatgatctctgctgccagtagagggcacacttactttactttcgcaaacctgaacgcgggtgctgcccagagagggggcggagggaaagacgctttgcagcaaaatccagcatagcgattggttgctccccgcgtttgcggcaaaggcctggaggcaggagtaatttgcaatccttaaagctgaattgtgcagtgcatcggatttggaagctactatattcacttaacacttgaacgctgagctgcaaactcaacgggtaataacccatcttgaacagcgtacatgctatacacgcacccctttcccccgaattgttttctcttttggaggtggtggagggagagaaaagtttacttaaaatgcctttgggtgagggaccaaggatgagaagaatgttttttgtttttcatgccgtggaataacacaaaataaaaaatcccgagggaatatacattatatattaaatatagatcatttcagggagcaaacaaatcatgtgtggggctgggcaactagctaagtcgaagcgtaaataaaatgtgaatacacgtttgcgggttacatacagtgcactttcactagtattcagaaaaaattgtgagtcagtgaactaggaaattaatgcctggaaggcagccaaattttaattagctcaagactcccccccccccaaaaaaaggcacggaagtaatactcctctcctcttctttgatcagaatcgatgcattttttgtgcatgaccgcatttccaataataaaaggggaaagaggacctggaaaggaattaaacgtccggtttgtccggggaggaaagagttaacggtttttttcacaagggtctctgctgactcccccggctcggtccacaagctctccacttgccccttttaggaagtccggtcccgcggttcgggtaccccctgcccctcccatattctcccgtctagcacctttgatttctcccaaacccggcagcccgagactgttgcaaaccggcgccacagggcgcaaaggggatttgtctcttctgaaacctggctgagaaattgggaactccgtgtgggaggcgtgggggtgggacggtggggtacagactggcagagagcaggcaacctccctctcgccctagcccagctctggaacaggcagacacatctcagggctaaacagacgcctcccgcacggggccccacggaagcctgagcaggcggggcaggaggggcggtatctgctgctttggcagcaaattgggggactcagtctgggtggaaggtatccaatccagatagctgtgcatacataatgcataatacatgactccccccaacaaatgcaatgggagtttattcataacgcgctctccaagtatacgtggcaatgcgttgctgggttattttaatcattctaggcatcgttttcctccttatgcctctatcattcctccctatctacactaacatcccacgctctgaacgcgcgcccattaatacccttctttcctccactctccctgggactcttgatcaaagcgcggccctttccccagccttagcgaggcgccctgcagcctggtacgcgcgtggcgtggcggtgggcgcgcagtgcgttctcggtgtggagggcagctgttccgcctgcgatgatttatactcacaggacaaggatgcggtttgtcaaacagtactgctacggaggagcagcagagaaagggagagggtttgagagggagcaaaagaaaatggtaggcgcgcgtagttaattcatgcggctctcttactctgtttacatcctagagctagagtgctcggctgcccggctgagtctcctccccaccttccccaccctccccaccctccccataagcgcccctccc

SEQ ID NO: 1883115 - DNA, 4001 bp, Homo sapiens
tatgtgccgtgagactgatgacaaattccttttgaacatagtgcctttgagggcttggtagtaaaaaagaaagcactatccatcaggcatttggatatttaggtctggaagactgaaaagagatcaaaacagaaaatacaaattatagaatcatcgagatgggtaaaatcagaagagttggatcaagaaaagtacctagaatcagtagagaagtgagttaagaaaatatctctgggaaacattaatatttaaaggtatataaaaggaagagaagactgtggagaagacagagactgaagaaggagacaaaatgtgtcatactgtagtagccagaggaatagagcttcaaagaatgagtggtcaaccacattaaacacagctagaaaaccaagaaggtaaagaaatgaaaattaaacattaacatacaatgaagttattgagtccatgttaaaatggtttcaatggaatagcatcaatggaaataattgcaattagtaaaagaattttagaaaaagaaaaaattaatacagctaactttctcaaattaaattttttgaaaataaaacagtgagatggaattcgagtgcaagatgtttgttgaaaatcaacacacatgaaaggaaagagagtgaacctaaaaaaattggctccagagtctattaatgtaaagactatgttatattgtctctctatctttagggaaacatatacccaattcatcttgtgtcaccagaatcagattcatcaaacccattctggaccactctgatcactagtttcaccctcacagtcatagtaaagaaactaaagcaaaagactacaagagcaaaggacagaaagggaaatgttattttctcccctcacctttgccctctttgattttctccattgttgctaaaaggaacacttagaaaactatgaaagaaacttctgcctgtaaatgcagctccatgattatgaattctgaatccttgtaacagaagaaccaataggactgatccatgacttctattagtagagactgggaaggtaggtgactttagctcaccaagcctgatcacagcaaaatagaaaatgatcacagtgtcccctttttatcctggggtaacaatgaacattcagtgggagccaactactgtattaaagtcctgggtgcagctcctggcacatgacatggcccacaaggtagtagttctgagtacccttgcctatcagtggtgctggggcgagaagggagggcagcctgctcactagggagagcaggaatgaggctaggaagtacagggacctggcaaagatgtctcctgtttgagagagacttcagttaatgttcagtcaacttcctgtggtgctaagaagtgaaagttgaacttgactatcaaggaacagaggcaggttgttagctgggcccctgggaggaagtcaacaagctccaccacatctgacaacacctactgcttgcagcccttcccccaggtcaggcagctgcacacctcatgcttccaactgagggggaatgaatgggtaccaagagtaggtgagtctacttctttcccaggggtgagtagcgggtgaagaaatcagcatgtagtggacatttacatgtgccggatacctcatatatgcagtgtggtatcattatcctcactgtgcagatgaagacactgaggctcagggacttgttcaagacacacatctggtcaatagggagccaggattcaaaatcacgtcagtctagtactcaagtcctctgttctttccacgactacattagatgtatccctagatagtctaggtgtaacagcatgagtctcccatgaaaggaagtgggggctcttggaacatacctctttaggaagccttccatcattgtgctgccttcctcctctgtgcagcctcagcactcactgttgagcccttctctaggagtttgcaatctacggggagtgatgggcacataaggaaataatttcaatgtagtatggcaaatgctgagctagataaatgcgcgaatgactatgaagaacagaggattggggtcacctaactcaacatgagactcatggaagtctcctgaggagaaacctctgagtcctagagagtgagaattggccagaaaaattaagaaggggcagggaattccagagagaagtaacaggtaaacaaaagcaaagaggcataagatagtctggagtctggtcaaattacaatcagttggaagtagtagagaataaaatacaaagtggagagaggggagaagtaaagctgaatagataaacagggtcagcttacagagggtcctatgcaggctaaattccagatgctgctataaaaatacaggaaagaaaactcatgaaatattttaagatttttgtggaatattttaagagcttttgtgaacatctcatgaagcactcctgtgtttggaggcagcactggcagcaaatcaaacataataaaaggtctgtacatcaaacattgacacatttattcaacaagcacatattgagcacctactatgtggcaggaactctcttcatcagcaagtattttggcactaaataaaacacagaacacaccgccctctttgaaatgacaataaagaaaataagtgaattatatattatctcagcagatattgcatggtatatggaaagcatatcagggaagggggtgtaaagtgtcatgagaggaattacaatattaataggatgttaagacagctcctactgaagccatgtttaaacagacacttggaggagaggagggagttggctaagttgatatttggggtaaggcattccaggaagggggatcagccagttcaaagccctggggggtgggggctgtgcttggcatatttgaggagtggtaaggaggccagtgtggctggaacagaatgatcaaagaaaaaggtggtagtaaatgaggtcagataaacagtaagagacaagggatttttaggtcatctagaatttagattttttcctgagagggcagaggagccacgagaaagctctgagatgaggatgagatgatctaattcaggttttaactggatagttcagagcaagagtgggggcagggaaccagtgaggagactgtggcaataatcacgaaaagtggtgcagcggcttggaccagggagttagcagtggaagcagagagaagtgacaacactctgcatatgggaaagggtgggcaggagagaacagtgcccaagatgatccagtattttggcctgagaagctggggaaaaagaaacaacaacaacaacatcagtggaaggggtttcagggagtccaggtgttctggttgcagctttgttttgccttaaaaatatttgagtacgtaactagtaatgggattgctgggttgaatggtaattccgtttttagtcctttgagaaattgccacagtgctttccttagcaaactaaggcaggaacagaaaaccaaatgccacatgttctcacttgtaagtgggagctaaatgataagaactcatgaacacatagaggggaacaagagatactgaggcctacctgagggtggaggttgggaggagggagaggatcaggaaaaataactaatgagcactaggcttaatacctgggtgatgaaagtatctgtataacaaagtcctgtgacgtgagtttccctaggtaacaaacttgcacatgtgcccctgaacttaaaataaaactatatacatatatatacatattagaaagaattatacttttgagttttaatagcacattttctgtaagattttgcaatttaaacttcactatattttatataaacaattaagagttgagttgaccttgatattacatattacagatattttattaacatctattaatttttaattatttgattttttcaaaatttcaaataatatacctatttttcagatttcaggcaggccattgaaaagctcctagttctaattactgttcctgtaatgctttatgaatataacagtccggcctt

SEQ ID NO: 1883116 - DNA, 4001 bp, Homo sapiens
ctgcattgaaaatattttcttatttcttccaggataccattctgatattccctacaggctgctccatctcagtcacttctactgtttgcttctcaacttcccaaacaatacactttggtatactctaggattcagttcttaaacatcacctttctttgtctatactcactcccatatagtcttacagccttgataccatctatacactgatgactcccaaattcattgccaaatctgtgaatgcaacagagctgcatatacaactactcatttgacgtctgcacttgaatgtctttaaaagtttgcccaaaacaaactcccagtttccttcctccccaacttgctccttctgctgtcttgacctcaaaaaatagcaactccatccttcaattggaacaaaagtgcctaactcctccttttgctcacatttcacatctaatacattcccaaatcctactggttctgtattcaaaatctgtctagggtccatccaccactcaccacctggaatgccaccctggtccatgttaccatcatctctgtgttttttttttgttttttttttttttttttttctttttgacagcctgatacctggtctctctgcttctgcctttggctcacttatggtttacttctaacacagcagctaagcgatgactttgttgtgtacatcctataaacaccacacccaactccttcagttcttttcctttcactcatgataaaagtctaaattcttaaaatggccagctcccactatgtctccaattttacctgcaggctctcctccctgttgtggtccatccatattggccttttttgctacaagtccacaagccttgcctcaggagctttgtgcttgattcctctacttggaacatgtttctctcaggtgcccttcacttccttcaggccattgttgaaatgcaactgtctcaagatgcctgccttcgccttattttaaacagcatcctccttcacagagggccttcattcctttttacctgctttacttattcccataacaattctcatcacttagtatatactatattttgatctacttattttatttaatgcctgtgttctcccatcagggcaagggacatttgtctgctttgctcccaattgtattattaatgttttggaaaatgcatggcacttactatttgctgagtcactgaatgaatgaatctacgtattactttttcgctgttgtggattgggatatgtatgagaagagacagaagatctcattcaaaataggagatgctttatcactctctctaccactcacttgtgcactggctctgtcttagacacttacctaaccctctgtttccaacagaacaatgagcgatcttagaaattaagggattccatgtcacagtctccacattcttttctgtctgtcacttacattgtcctttttgcttttggggtggggatgggtgtgtgtcacttttatctcagaatgttcagtcattttaagacttaatttggggtttagtgttccaaacactagtcattggtccattttgattttctcttttcccctcccctcctctcccctcccttttcctcccctcccctctcctttttttttttctattcctcctgttctgtgcaggaaacgtgcaaggggagaagaaaagacacatacacaatgcctttagggataaacaacctttatcccatgtaaatggcgatgcagatataataagcaaatgatataataaacaaatcaatataataagcaagttgatataataagcaaataatataataagcaaattgcaatgaaaagggaagatatatatatatatatatatatatatatttatactcaccagactatgaaggattcaccaccagactaggaagcaacaacctgggctccagagttggccactcatctgtgcacagacgaggagcagtctcctgaagctttggcgcagtctgggaccctagctctttttgtaacgagttattcggtgtgaggcccagtcatgagggccctttggctcaaggaacacaaaaaggtcaacttgttttttgtgattgtctattgcttttcaataactaacgtataggaatagattgaaatagggatttctctgaaacagtgctggatgaacgcctcaaggggcacacacaacctgttctgggacttggtgaccattgtttgtgtcgatgttcaattgagttcaaatttaatatttaacttttcctccacacctcaccatctcacccctccccttccttctcctctccctcgcttccctcctctcctctcccctcccttcccttccttcccctcctttctctttcttttttcttcccttccctttttctcttcttttctctctttaattttttctctttttgtgactggattagagctctaataacagaaagttaactgtcctctgttattagaatttaggtggtacagaaaataagagaaagggaagaaatcctattaagcctttagaaaatcttcactcaaatcacatcattctcaccactctggttcctgaattctttgtttattatttggcatgtcaaatttctttgtaagtttaacaggaattaagcatttaaaagtgtggtttttttttcatggtgaatcaaacttccagatctatcattgagagaatagtatcataaatccccatgtagacagaacctttagttcccgaagtccttgtcccttttctttctgcccctataaaattaatgaccattttttcctttgtttacgagaagaaccagtctgaacacagagactctgttgctttgagttctggaatactgttctaagaatacagtaagacaatggtatgaaggcaaatgcttttgatgtacagatggctggttttgttgacagagaaaaaaacaaaacaaacaaaaaatgtcttgtgacttccattgaggcagaacttgaaggcacttacagagcagattatagaaattgtgagaactgactgatgcagggaagttctcacagaaggaaaacgatggctcagagagtcaccagagtgcttgggaggagtctgagtgttaaagataaaagaatagaatgactattcaagatgtacaacatgaccatccaagttccagctcaccccttggtgtaaaatgtcaagctggagggtacagaaacctaatctcatttaggagaaagtaagtaaaacagaactggaatccttgaatcctcagaaaaagcctagggagtctgcaagcccctcaaagaagttccatagtcatcatggaattacaatccattgtagtgagcaagtcatagggaagccaagacatggctcaggctatctctcacatgtcactaccaactagagagagagccacagtgcattattgccactggccctcaggggacatggaaatcctgagcttggaggaagccgggagtcaacatgagggcacattcagaatgtggacttcaagactggaggccacagaaacatctgaggtcattatagaggaagacaataagagcatcgacatccttgacatccagacccaataaaatcgtcaacatgctgaggaagtccacagcagaagacagcatgggaaccagacaatgctcccctgacaccgcagggccacacagtcttctttctcaggtgtcctcttgagatgtcgaagaagggtataggagaaaccctgaaaaacaagcatgcttctaaaatagcctgaggttgcccgaaagagactgctttaaaccacggcctcacccagtagcctgaaaactctttaaggaccagtgctggggtttacccagttttgtgtcccaagcagctatcacaaacaaaggtactgaaaagtatctcagtagaagaccactgagtgatgaataaacagtctaaataaaagcatcaaggtttacagcaactgactagaaggaaaggactgaactcacagaggaaataataaaaggagaaagtcagatgatgcctctcctttggttcgaaaac

SEQ ID NO: 1883117 - DNA, 4001 bp, Homo sapiens
gtcatttatacaattcattatatgtcactcattaatacatttgcttagttgattttcattaaaatcctgcagggagcattattacactcatttttcaaaagagataactgagtcgtaaaaggattaaattatttgcccaggtcacacggaaagaaattaacgtggccacggcataaaaccagattttctgtttttaaacatatttttttcgctgacctccaccctgtaagagcttttattaccaagcgattgagaagcacaggctcagggacactgaatttgaccaaagaagccaatagaactattccaaaaacctatggttccccctaaagcattagaaagactcagaacgggttaagtgctccctggctcattcccaacagacactacattcacctgtgcttgctctgaaataaatcagtgtccctttctgctgctgctgttgtctggaaataatgcaaatgcaatgggcctttactgacattgtgcttccctggaaggatacacataataaattatcccttaatactgttaaagagacattttcctcttactcaggagcttttggggttggactgggctactcacccagcaaggaggaggacatgtgtcttgtcactggcccggttattcatgtggcctctcattgctccttggctcactgcattgcaagattcaaggatgcacttccaggcctccacatcaagtcataggacttgccggtaacctagattggttttctcatttgtaatttgaatttattttatgttatgcatttgtatgtttatttattcggatgctcagaagctgaagataactagtgctcctggtccatgccattcatcaattggaagaatgccaagctgtttccgctgaggacagaaggcattggtctcccctgcaggaagccactgctgctccttaattgtttgctagaggaagaatcaagggtaaaatttaaagtaaatggctggccgagttgcactaattcatcaaagcatgtttcaagtcagtagtcagagcatgcatcagcccccggcgccaccagcttctacgagagtggaaaagccagcagacctccgagcagatgaaatcattaggaggcattcagcagggcttgaaaagcaaagagagaggaggcggggatttctctgcatgctccctttgccacatgggaaacaccagctgtctgtgacctagttatccaagaaaggaaacacggaagagaacccacaaaactgtttgctacatgagaaccccattctccaaagacatgctggatgttgagaaaacaattagcatcttctagtttgactctatttttttttttttttgcttagagatttttggtagcaataaagacaagccctattacagtagcctaagaaaatggaatttttagggatagcccatggataggaagtaaaaatcttggttcatgaaagatgggaagtaggaactggaatgtttttggaaaatctatcagcatctcacctctttctcttgctctctctctctcattacatggccctttatttgtgcaacaattcattttcctacttctctatgaaggtctctcttcttgcttttaagcatgaagccactcattcattcagtaaatatgtatttaatgctaacaggtgctggcactgcccaagatgccagggctacagcaatcaacaaaacagacaaaatccctgccctcgtgaaatgtacactgtggtgaggcaggtgaggcaggcagaaactgaacaagataaataagtaaaagatacagtgtgcaagagggcagtgagtgcttggaagaaaagatcaagggaggagaagtgaaatactggcaaagtagttgaaatcttaaataaaatggtcatgggagaccccactgagaaagtcatttctgagtgaaacctgaaggaagtaagaagttagcattgcaattgtctggggcagagcatgctgaggagagggaatagcaggtgcaaagggcctggggtggttcaaggagctagcagagaggccattgaggaaggaggttaagcaagtgagggggattagttagaggtgaagtcatagacctgggggcacagatcacaaagcgttttctaggtcatagtgaggactttggcttttactctgagtgagatcagaagatcccaaaaggccaccacaagatgatattcacgtggtccacctaatccagtagtcagtccttattgctaacttgcacacagtcaagctcccttagtctccaaaagaggagatccaagcaacgatacttcatgagcagtcggcttcgagagtcatcctgagttttcaaggctgacacaaatatcagtctaactacgcagtccacctgtgtaaatatttggggaatagtggatggttaaggaagagacctagtatgagataaagtgtccaggccctgcacacatttgggtctcacagaattaactggcaaatgctagtaagagtatcaggaccttaggaaatagagattcctttagaaaactctaattcccagaaagattttcacataagaccttcacacaaagacaaaattagaatgtgtgttctctcaccatctccttatccagagagtccttagatgtggcagaaggacccacaagagttgtcagaggcagttgtgaggggttgccagtcatgttagtattaatagatatcatgagaagttagacacgtttttgaataaattagaatgaattaaatattaacccaaaatgtcattatgctcactccctaccctcccactatgctttcctgacagagaaagaaagggtggcactgtggctggaatacagagcccacaggacttcagcatgtcctacacataaacctcctcctttttgtgacccttggtggaaaaagtatgagagccacgtatcttagaaataactgcctttcctccctagatgcctgccacaaaaacagacatgttctagaactttcttctccctagttccaagaacactgaactcatggtaatggccaaacaatgatctttttctaaggacaatgtcagaatgctttactgtgccattttcataatcagacacaagaaagttaccatctgtagttcagccatagcacttcacatgaaagaggaaatgactaaatatatatttacatagctctcatgaatatgcattttgtaaatgcacaaatatgtacaattacttgatagactgttttggttcctatctttcgaatatttaatacaactgtaaatgtttaattcatatttactgagttgattgaacagtttctaaattatcccaagccttgctggaaacaagattgaatgtttccagcatatttgcacactaggatttggccaggagaatccacactaactggttaaatgatgattttcttagaaagcatattgaataagctgctggtgaaatcatcttgctgaccacaacatagagggacagcaccagatctaattccaaccatgacctgcagagcctctcatgactaggcccccctgatgcctctttgcacctctgtctgcactgcccctcattgctaagccacaatcaacccatgttccactttcagtcctctgcaccagctgctccatgtgtccagaatgctcttcacatagacatcaagcctttgctctaatgtcaccttttcaatgaggtctatcttaacctctgcatttgaaattgcaatcccatcatcccccagaactcctgatatcccctacactcccttatacttttttgtctatagcaaccacccctcaccactttataacatttatgctttgtagtctgtctgtgtccactcactagaattcaaatatcacaaaagcaggagtccactttttttttcattgaaaaactccaaatcctagaaggaagctggcatttaatatgtgctcaatagacattagaggaagaaaagaaggaaggaaggaaagaagggagggagggagggagggagggaggaaggaaggaaggaatgaaggaagg

SEQ ID NO: 1883118 - DNA, 4001 bp, Homo sapiens
caggggaacttcctgccctgaaggaaagggcataagtctggctggacttgccacttgctgattgtagagcccttagtcatttcttgagtgaacataggtggtagcctagcagtggtcactgggggccttgggtaagacccagtgctatgctggcttcaggtctgacccagaacagtaccagtggtggtggtcataaggatgcttgtgtcacccacactacaactccaggcacatcagcacagggcgagagagactctctttgtttggggtaaagtacgggtaatgcaaggaattttcctggatcttacctaagaccaccaaggtggtacctctagaagtctgccagagccagcattactggtcttggagtatcccctaaagccaatatggctgcagtgaccaaaaactcagatcacaacactcaagccctttcaaatacctgaaaagcctttgcaagaatgacaggtaaaaaataagcccagactatgaagactacaatacatacctaacttctcaatgccctgacattgatgaacatccacaaacaccaagaccatccaggaaaacatgacctcaccaagagaactagataaggcatcagtgagcaatctgaaagagacagagatatgtgtctcagagaactcagagaattcagaatagctgttttgagaaaactcaacaaaatccaagatatcaaagagaaggaattcaaaattctatcagataaagttaagaaaaagattgaaataatttaaaagaatcaagcaaaaattatagagctgcaaaatgcagttgacatactgaagagtgcatcatagtctcttaacagcataaatgatcaagcaggagaaagaattagtgagcttaaaggcaggctatttgaaaatgcacagtggagacaaaaaccaaaagcatgcctacaaaatctagaaaatagcctcaaaagggcaatcctaagagttactggccttcaagaggaggtagagacagagatctgaatagaaagtttattcaaagggataataacagaaaactttccaaacttagaaaaagatatcaatattcaagtacaagaaagttatagaagcagatttaaccaaaataggactacctcaaaacttttaatgatcaatatcccaaaggtcaaggataaagaaaggatccacaaagcagcaagagaaaaggaacaaataatatacaaaggagttccaatacatctggcagcagacttctcagtgaaaaccctacaagctgggagagagtggcaagacatatttgaagttcaaaagaaaaaaaaataactcttcttgtagaatagtatatccagggaaaatattcttgaaacatgaataagaaatacagactttcccagacaaactaaagctgaaacgtttcatcaacaccaggcctgtcctacgagaaacgctaaagttcttcagtctgaaagaaaaggacattaatgagcaataagaaatcatctgaaggtaaaaaaatcactactagtagtaagtacacagaaaaacacaaaatattaaaacactgttattgtggtttgtaaactactcacaccatttatagacagactaaaaaataaacctatgaaaaataataagtacaacaacttctcaagacataagcagtacaatgagatgtaaatagaaacaacaaaaagttaaaatgtgggatgatgaagttaaagtgtaaagtttttttagttttctttttgcttctttgttagtttatgcaatcagtgttaagtattcatcaatttgaaataatgagttatgagatattatttcaagcctcatggtaacctcaaataaaaaaaatacaacaggtagccacaaaataaaaaacggagtagttaaaacataccactttaaagagggagaggagccaagatggccgaataggaacagctccggtctacagctcccagcctgagcgacacagaagacggtgatttccgcatttccatctgaggtaccggcttcatctcactagggagtgccagacagtgggcgcaggtcagtgggtgcgcgcaccatgcgcgagccgaagcagggcgaggcattgcctcacttgggaagtgcaaggggtcagggagttccctttccgagtcaaagaaaggggtgacagacggcacctggaaaatcgggtcactcccacccgaatactgcgcttttccgacgggcttaaaaaacagcgcaccacgagactatatcccacacctggctcagagggtcctacgcccacggaatctcgctgattgctagcacagcagtctgagatcaaactgcaaggcggcagcgaggctgggggaggggcgcccgccattgcccaggcttgattaggtaaacaaagcagccaggaagctccaactgggtggagcccaccacagctcaaggaggcctgcctgcctctgtaggctccacttctgggggcagggcacagacaaacaaaaagacagcagtaacctttgccgacttaaatgtccctgtctgacagctttgaagagagcagtggttctcccagcccacagctggagatctgagaacgggcagactgcctcctcaagtgggtccctgacccctgacccctgagcagcctaactgggaggcaccccccagcaggggcacactgacacctcacacggcagggtattccaacagacctgcagctgagggtcctgtctgttagaaggaaaactaacaaacagaaaggacatccacaccaaaaacccatctgtacatcaccatcatcaaagaccaaaagtagataaaaccacaaagatggggaaaaaacagaacagaaaaactggaaactctaaaaagcagagtgcctctcctcctccaaaggaacgcagttcctcaccagcaaccgaacaaagctggatggagaaagactttgacgagctgagagaagaaggcttcagacgatcaaattactctgagctacgggaggacattcaaaccaaaggcaaagaagttgaaaactttgaaaaaaatttagaagaatgtataactagaataaccaatatagagaagtgcttaaaggagctgatggagctgaaaaccaaggctcgagaactacgtgaagaatgcagaagcctcaggagccgatgcgatcaactggaagaaagggtatcagcaatggaagatgaaatgaatgaaatgaagccagaagggaagtttagagaaaaaagaataaaaagaaatgagcaaagcctccaagaaatatgggactatgtgaaaagaccaaatctacgtctgattggtgtacctgaaagtgatggagagaatggaaccaagttggaaaacactctgcaggatattatccaggagaacttccccaatctagcaaggcaggccaacgttcagattcaggaaatacagagaacaccacaaagatactcctcaagaagagcaactccaagacacataattgtcagattcaccaaagttgaaatgaaggaaaaaatgttaagggcagccagagagaaaggtcgggttacccacaaagggaagcccatcagactaacagcggatctctcggcagaaaccctacaagccagaagagagtgggggccaatattcaacattcttaaagaaaagaattttcaacccagaatttcatatccagccaaactaagcttcataagcaaaggagaaataaaatcctttacagacaagcaaatgctgagagattttgtcaccaccaggcctgccctaaaagagctcctgaaggaagcgctaaacatggaaaggaactaccggtaccagccactgcaaaatcatgccaaaatgtaaagaccatagagactaggaagaaactgcatcaactaacgagcaaaatgaccagctggcatcataatgacaggatcaaattcacacataacaatattaactttaaatgtaaatggactaaatgctccaattaaaagacacagactggcaaattggataaagagtcaagacccatcagtatgctgtattcaggaa

SEQ ID NO: 1883119 - DNA, 4001 bp, Homo sapiens
cagatcacaacactcaagccctttcaaatacctgaaaagcctttgcaagaatgacaggtaaaaaataagcccagactatgaagactacaatacatacctaacttctcaatgccctgacattgatgaacatccacaaacaccaagaccatccaggaaaacatgacctcaccaagagaactagataaggcatcagtgagcaatctgaaagagacagagatatgtgtctcagagaactcagagaattcagaatagctgttttgagaaaactcaacaaaatccaagatatcaaagagaaggaattcaaaattctatcagataaagttaagaaaaagattgaaataatttaaaagaatcaagcaaaaattatagagctgcaaaatgcagttgacatactgaagagtgcatcatagtctcttaacagcataaatgatcaagcaggagaaagaattagtgagcttaaaggcaggctatttgaaaatgcacagtggagacaaaaaccaaaagcatgcctacaaaatctagaaaatagcctcaaaagggcaatcctaagagttactggccttcaagaggaggtagagacagagatctgaatagaaagtttattcaaagggataataacagaaaactttccaaacttagaaaaagatatcaatattcaagtacaagaaagttatagaagcagatttaaccaaaataggactacctcaaaacttttaatgatcaatatcccaaaggtcaaggataaagaaaggatccacaaagcagcaagagaaaaggaacaaataatatacaaaggagttccaatacatctggcagcagacttctcagtgaaaaccctacaagctgggagagagtggcaagacatatttgaagttcaaaagaaaaaaaaataactcttcttgtagaatagtatatccagggaaaatattcttgaaacatgaataagaaatacagactttcccagacaaactaaagctgaaacgtttcatcaacaccaggcctgtcctacgagaaacgctaaagttcttcagtctgaaagaaaaggacattaatgagcaataagaaatcatctgaaggtaaaaaaatcactactagtagtaagtacacagaaaaacacaaaatattaaaacactgttattgtggtttgtaaactactcacaccatttatagacagactaaaaaataaacctatgaaaaataataagtacaacaacttctcaagacataagcagtacaatgagatgtaaatagaaacaacaaaaagttaaaatgtgggatgatgaagttaaagtgtaaagtttttttagttttctttttgcttctttgttagtttatgcaatcagtgttaagtattcatcaatttgaaataatgagttatgagatattatttcaagcctcatggtaacctcaaataaaaaaaatacaacaggtagccacaaaataaaaaacggagtagttaaaacataccactttaaagagggagaggagccaagatggccgaataggaacagctccggtctacagctcccagcctgagcgacacagaagacggtgatttccgcatttccatctgaggtaccggcttcatctcactagggagtgccagacagtgggcgcaggtcagtgggtgcgcgcaccatgcgcgagccgaagcagggcgaggcattgcctcacttgggaagtgcaaggggtcagggagttccctttccgagtcaaagaaaggggtgacagacggcacctggaaaatcgggtcactcccacccgaatactgcgcttttccgacgggcttaaaaaacagcgcaccacgagactatatcccacacctggctcagagggtcctacgcccacggaatctcgctgattgctagcacagcagtctgagatcaaactgcaaggcggcagcgaggctgggggaggggcgcccgccattgcccaggcttgattaggtaaacaaagcagccaggaagctccaactgggtggagcccaccacagctcaaggaggcctgcctgcctctgtaggctccacttctgggggcagggcacagacaaacaaaaagacagcagtaacctttgccgacttaaatgtccctgtctgacagctttgaagagagcagtggttctcccagcccacagctggagatctgagaacgggcagactgcctcctcaagtgggtccctgacccctgacccctgagcagcctaactgggaggcaccccccagcaggggcacactgacacctcacacggcagggtattccaacagacctgcagctgagggtcctgtctgttagaaggaaaactaacaaacagaaaggacatccacaccaaaaacccatctgtacatcaccatcatcaaagaccaaaagtagataaaaccacaaagatggggaaaaaacagaacagaaaaactggaaactctaaaaagcagagtgcctctcctcctccaaaggaacgcagttcctcaccagcaaccgaacaaagctggatggagaaagactttgacgagctgagagaagaaggcttcagacgatcaaattactctgagctacgggaggacattcaaaccaaaggcaaagaagttgaaaactttgaaaaaaatttagaagaatgtataactagaataaccaatatagagaagtgcttaaaggagctgatggagctgaaaaccaaggctcgagaactacgtgaagaatgcagaagcctcaggagccgatgcgatcaactggaagaaagggtatcagcaatggaagatgaaatgaatgaaatgaagccagaagggaagtttagagaaaaaagaataaaaagaaatgagcaaagcctccaagaaatatgggactatgtgaaaagaccaaatctacgtctgattggtgtacctgaaagtgatggagagaatggaaccaagttggaaaacactctgcaggatattatccaggagaacttccccaatctagcaaggcaggccaacgttcagattcaggaaatacagagaacaccacaaagatactcctcaagaagagcaactccaagacacataattgtcagattcaccaaagttgaaatgaaggaaaaaatgttaagggcagccagagagaaaggtcgggttacccacaaagggaagcccatcagactaacagcggatctctcggcagaaaccctacaagccagaagagagtgggggccaatattcaacattcttaaagaaaagaattttcaacccagaatttcatatccagccaaactaagcttcataagcaaaggagaaataaaatcctttacagacaagcaaatgctgagagattttgtcaccaccaggcctgccctaaaagagctcctgaaggaagcgctaaacatggaaaggaactaccggtaccagccactgcaaaatcatgccaaaatgtaaagaccatagagactaggaagaaactgcatcaactaacgagcaaaatgaccagctggcatcataatgacaggatcaaattcacacataacaatattaactttaaatgtaaatggactaaatgctccaattaaaagacacagactggcaaattggataaagagtcaagacccatcagtatgctgtattcaggaaacccatctcacgtgcagagacacacataggctcaaaataaaaggatggaggaagatctaccaagcaaatggaaaacaaaaaaaggcaggggttgcaatcctagtctctgataaaacagactttaaaccaacaaagatcaaaagagacaaagaaggccattacataatggtaaagggatcaattcaacaagaagagctaactatcctaaatatatatgcacccaatacaggagcacccagattcataaagcaagtcctgagtgacctacaaagagacttagactcccacacattaataatgggagactttaacaccccactgtcaacattagacagatcaacgagacagaaagtcaacaaggatacccaggaattgaactcagctctgcaccaagtggacctaatagac

SEQ ID NO: 1883120 - DNA, 4001 bp, Homo sapiens
gtgaagacccgctgtttctccccaccctgtaagagaaggagacagctgaaaagtaaaagggaggaaactggacaaaatcacactctgccatgaaggtctcatctcaacccacgccccagctcagcgtactgcatcaagagttcgcacagagtgaagtacaggtgtggtgggcatactccatcattaggggttggggcatgtttgagctggttcttgacccacaagcttcttctgggatttccagttcattaattccaagacgtaagctaaagatttccctggagcgagaaatgaagatgccccagtctgaaggctatctgggcaaccccatactagcccactaccaggagagggatcaggaatgataaacactattatgtaagagaaaaagagcaccaggcctccatgcattcagtcccaagggctgaaacttactacaagggatgccgaacctacctgaaggtgcctggcattctgggacagttctgtggccacaggaggagtgagcaaaccaggaggagggcccagaagagatgttgaagctgtgcctatggggaaagagaagcaatctccaggaaccgcccctaccaccttaagcacgagtcaaccaaaggatgtggtaaatccaaaggctacagctccagccagctcctccacagagcttcactggcaatcactgtgggcatctcctgctttccagaggaacatcagcagcaaattgctctccaccagggaaaccccaaactaactccagagcacatacttcccaggatgaggccaggtagggagaacagtgatcacctgagaagttgcgtccccctggaagcgggttgatccgctggcgcttaaactgggacattgggaacgctgtcctctttcagagtcgtggggaaaaggcttcaatccaaaaagaaagaaattaacagcttataagggaaatttccatctatacccggaaaagtggagaatcttaagtaaggatatttcggaaaacagggaggtgggtaataagaatgaatgaaagcaatggatggagagaatatagagaagaaagaaatgaaacaagaaattacattgttccagtttgccctgacaataacctagtggtgcatgatactgtcatgctgttttacagacaaggaaactgatgctcagagagatcaagagacttgcccggggccacataaccaggtagtgacaaaactgctactcacacccaggcctcccaacaacttagcgctcctctcactatgccacgccacccccagagtagctggcggggtgaggggctcgagagagccccgatgacattccttcgttcaaaaacatccgccaaaaccctccacgcaaggcccggaaaaatggaggaggccggtgccggcgaggagactgtgtgggccctctccccggaagcccgacccgttgtttcctcgaccggctggtgggaaggcagctccctggccgaccaaacgcgaaaccggctgcgcgccaccctcctgctcccacgctcccgggccctccgctccggcctcagcagccgccagcgccgggtctcccagcagagccgcggcgaggccaccaagggaggactgaggcgcgcggtttctcctcctcccgcccgcccccaaggccgaggccgttgccagggagacgggacttgcagtccaaagaggggctcggccccttccgcgccccacgcatcttcgccgcccggccctcgcagcccctcggccagcggaggggcggaggggcgaaggggcagaggggcggcagggggccccccaacccacctgcgggccagggcagcgacaccggggggacaaagacacccggaaccaccacagccgctgctgccgccgccaccggaagcgcctctccggaagcgcgaccactggtcggaagctgccgctctcccggatatggtccctccctcgtctccgccgacctctcccttcccccacgccggcttgccatcccgcggcaactggggagcggaagtgcgccttcccggatcggatgcgcgtcaggaagtcgcgcctcggtagtgtcctcgctaaagaatcccatcaggaaagaaggcttcggatcattggttccgggctcaaaggaagcgggagctgggccccccaaacacaagggacccccgactgcctaccacgctcgcctccctctggcagtcgagactgcaacagataaggaaaccagcccctcctgactggaggagaaggatgcctatcagtgaccatttctaagagacattcctggtctgactcaagccagtgaccaccatgcctagccagtcaggaatcagtgccctaattctcaaatatgaaatctaagaggcctcaatgaaatgacctgctcaaaatcttgccaggagactggccattttagtccccattagcaatcccagcccccccttatcctccgacctccccatcatcactccagccttactttcccctttcctattcacctgaggtttacaaagcactttgaggcagtttaatctcactttatcctcataacaagtctgtgaggtagatagggcaggcatcattattcccagcgggaagctgtggctcagaaaggttgacttggggtctaaaaactagtacaggcatctggtttgaattaagacctgtaaacgctagtacggagcagagaagctgagcactggctttgaaagttattcagttcccaggttgtccctgatcttcctcattccttgtgcagtcttcaggagtccggggcaagattccatgcagaggcagccaaagccacaccgttctctgtcccagggctgccagcatggctctgaggaggaaagctcagtaactgcccactggggaataaaggtcagttccatccttctgcagtgacctcccccagaatatcaaccctttggatgcattatttcagaagagatggttggatccagccagcttgcaacactgacagtcacacagagatatgcataccattgcgcataaatacacatctgcaacatgctgggcccagacaggtcaccatgccaaaaacactccacggacacctgacaatgagtgagttcacattgtggaagcccagggatttctggtgaggaggaagagccctggagctgcggcatcttgggggcctctcaagaaaccaaggttcctgaccagactgcttagaggagaaagattcagccctcgactcaagagaggagggcaggcgtcagcagcttttcctggcaatgtggagaagcagcaagagggcagagggcgaggaagacttcacagcaagtcccctccacccagggtcaccaggtgcaccgagaggtctcagcctacagaaaggttttttgctcgttgcttcttaaccactaatgatggcataaaggtcttccggtgggggcggcactgaggcctttcagggaggtccctggactcgatcctgtggaatgaaaagaagacattaggctagaagggggaaataaaactaacaatggccctagagttgagagaacgtggtttatctgctggtgggtagctgggtgtgggcgcagcccggggctgttaaatgacttggtatttcttcctcctggagaacgattcaatacaagccccgaagcatgatggccttcacccactgtgaaatcctttgtgctccaccttgctctccccacgaacctggaaggtggcctaaatgtcagcattgagggtgaggggttgctgagctagggtaggcagatttcccacattctggtcctagctgtcactgactcaccgtgcggctttggaaaagcaactacccccaaccccacccagaaccctgcctccttatctgtaaatggggtgttttaactactgtttcttctagcagcccctcccagactgcctctcaagttttgcggggacaataatgacaactggcatgacaatctcagcatcctggcttatcagtctcctctccgtgccctaacctgggctgggcacggggctcacctggggtcagag

SEQ ID NO: 1883121 - DNA, 4001 bp, Homo sapiens
gaatagaagtctgagatgtttctaaacgtccaacaatgcacagaacagtgccctcgctataaagaattacccaagccaaaatgtgccaaggttgagaaatcctagtctaaacagtttgatacagatgtttaattcctaacatccctgtagctggggagaaaaaagtgaaattgatctatcggaccaacggttatgtaggcaattgtttataatgacattttaaaaagaatgttaatgacatgcagacatgcaaattttaaaacatataacattaaacataaaacattaaaaaaactctattttataaatatatcaaaatattgagtggttaattttgatcagtgaggttattcatgctttggtttttcttttttctctgttttccaagtagctataatataccagtcctgcttttaaattcagaagaagaaaaaaagaatctaagttgaatttttaaaacctgatatgtccctgaggactgaatggcacatggtaataagaataaccctaatagtaacttcaatttagctagcagcatacgaggagacaggcccactcattcactcccagtcagaatgtaaattgttataacccctttggaagacaatttggcaatatgactgcagaacctcaaaaatattcatatgctatgacccagtcattccaattttgggaagctagcctaaggaaataatcgaaaataggcacaaagatgttcatttaagcatgatttataataatgaaaaattggatttataatggctacaaattgaaaacagtcttaattactagaaataggtgaatgtttaactaaattataataaatccatatgatgtaacacatagccattgaaaacaatatttacagttactgatgatgggggaagaaatttaagatgcacaaataactgtaaagagtaagggtccaaaataaataaaaaggataacccccaaaatgtaagtatacaaagaaaccatgatgtttgaaagtatatgtgttaaagtgttaacagaaagtaaagatctttaggacatgagatatgagtgttttaaaaaaatttttttctttacaattagaaaaggtcataaaaatatacacaatgaaaaacataaattttataaccagacaaaaactttaataatatttgtcaaatgccaaatcggagtccaaagccattgtccattttaagaaaatcatctgacttaacatcactactgcttttcaagagagcatcatgcccatttcacagaagagaaaatttggcctcatactcctcagtctccatgttttagcttagatattgtttcctccaggcggccctccttgaccttccaattctggttaaattgctctttttctgagttctcattactttactgattttatatatgtgtgtgtgtatatatatatatacacacacacacacacacacatatatatacacacacatatatatatatgttgtgcctagcaagtgtatgacacaaaatacccataaattgaatgaatgaatgaattaataaagaaatgaataacttacccaacctggtaagtggcagggctggccaggtcagtgcaacttcaaagtcgatgttgtcagtgaatgctccagatggattgcagagaagaccaaagttcatgtctcggcacctttcccaatgtacagggcttattgttgggacagagtagtgcctggcctagaagttaaacattcatccagctagctattaaggcttgaatgccttcaaagaacagcatggatttttctgtgaatcgtgagcgttttcgcaatgcttaacacggcagctggtaatgatgattgctcctgtttccctttgaatttcgtgttcgtttacttaacagggcattgctaatctagaagaagggagtgggtgaagaatcccatttgtaaagaggatagcaggttaatgaaaagaagcagaggtatgcgtaggtgatagtgtttctacaaggctcggttcaattggtatgatttaaaggcaagccttggctggctggtcataataagggccacataatggaggggatttacgtggcaattaccatggtccttgctagtgggatacaatgttttagggctccctggatacttaagattaatgtctgaatcagtagtgttattgttgcaagatcttagtgtgatgggagccatgtgaggcacgaatttttatcccttatcagaatgtaaaatatctcatagtctgcaagaacaccagtgactatggcctgaagttgccctaagacagtttaaacatcctgttgattgttttgttttttttttccttttccttggcaaccagaatgcatgaatgagtctagcgttacttttgttcatccaggtaatatgattgaaatgggaattatacatgttcaatcatttagagaagaaggactaaaaatcatagacctatagcaaattaaatgattatagagaatctaccatgtaaatgactgcaattaaggacttcttcatgtaccccgggccagattcacagcatctgggacaaactctccatggtttttccctcggtgtatttattaagaatgatgatcctgaacttcaaggagacttggggaatttttggattcctgccaggtatgtacctggccaagattaatttggtgaatcagaagttcccaggaaccatatcatgagtactaagagaacaaattgatttatctagtagtatgtttctccaacttagatatctgtgcaaaaaaagtgcagcggacatggtgcacattccaagaagttctcctccaaggaagtggtcaaaatatgtaatgcttatttattatccattttgagacccaaattatccagtcagtgggatcaataccttactcctcttccccagaagcctcacaaataaagtcttaacaccatctcaacaaaaataagatagggacctagacatggagaatatggctgtctcatggattctaagcaatcaggtagagtattgagaaatgttattgaaacaggaagttcctgctaaaggtgttggtgggattgggatgccagtgcagagtgacacagtatttggacaagaacacataacacgaaagtgtctgaatcctgttcttgtctataatggcatcttgccattaaatccttgagaacaaagaaaaataatatatattagctgaattgtttgctaaaacccaaatgtagacctcagtagaacagacaggactacatggaagattcctttttcctggacagggtattgccaactagcctcaaattaaagcagggcagagccataaaactattataatccaggggaacctggatttggggccttttcattttgaaagcaatatccaaatctacccagaaagtctaattaaatccttacggatctacttctaattggctgctatccaattagcattctgaaacctgaatgctcagatcagccctccttcccatcttggtggaggggcagggggagtacattagaggaacaaaagaacaaaaaagaggctttaagcttctgctagaagccagtatcacaaatctagaatgacaagccaaagccaagatatagttggccaggggcagccagtatccttcattttcttattcattcattaattcactcatttatcaggtggacatttgcagggcaccagtgatgctgtcaggcaccatgtttggtgatgagttaccagatggtcctagcagatgaaaagactgggaacccactgggaaggatacaaaaattattacacagctatcagagcaagagggaggttagtaaaagctggtggaccttaaagtttctctacttttgcaagtgtaaaaactggggtaaagatagagtttgggataacggacacagccatagccaaagaatgagtctagtgtctatagagaagttgtgatatttggaattttccatgtgcaaacacacacgcacatgcacgcgcacacgcacacacaccacacactcctcacctttgccattttcat

SEQ ID NO: 1883122 - DNA, 4001 bp, Homo sapiens
attttgctacttggaccatttcctggaatattactgtcaaataagtaaaagcctgataacgttttcaggtgcgtgtgtgtatacagttttagagaaagtcttattaaagaatatcagattcaagactcatacaagaaatgccttccgtttggcgagacaatacttgcagccggggggtgctttcactgttggaggtgtctgcaggtagtgcacctgtccagtgggaatgctctgtcaagatgcactagtgtcttctgggctgatgttgcccacggctctcttcccagagtagaacaggggaagctgaacacctgcaggatatcttgggaatgacattcaaaaagctacagctgtcccagctgagccaggagcctggcaagcacttggagcacacattatttatgtaagcaatctctgtcagcgccacatctggggataaaggatcaaaccccaacaaatttaattaaggctcttcacgtagatgaaattgagatgctagactaggcaatttgtaatggttagaaaatgcccttctaagcttcatctaatgcattggctttttggcatctcccagagaaagctctcaccagatacaccccagagagatgacaccttttagaagttcagggaccacataaatgttggtgatggatgttttcctcagggatgattatggctctttagtctaatagctctcctattcataccatattaagggcttaatatgaactgaaatggtgctgctggtagctttaaaagctgacgtaaacttaagggctctttagaaaacataatatccatgggaaaatagatggcataaaaccataaacaaaacacagctcaccaatgcattgatataggccaaactggtattacagcctgctgggaaagtgggctcattccttgtacatttgtacattttgggggtaggtcaggaatcaggagacacagaatgccttcttgttgggacttgctggtagaacttacgtagggcatgccaaacccttcccttattaactatttgactcttcctacaggcccaaacatattacctgggcagttgagaaacgagaacagttgtgggacaaagaacacattgttaaattgcagagttgcacagttattgcctggagcaccaggttaaaggaaactgaactgtggggttggctggcactgtctgtatacacagcccagtctaaggccccaatcctgagaaacttgctgggttcctgccctttgattcagagaaagcagctttccagctggggccggctccctcccccacataaaataaaataaagtcaatagcacataaaaattctttgtacttttctcagtgcctttcatctgctgagctcaaaggacgatgagggtattaactctggctacacctcttagtggtaggaggagagtttattcgtccctctgttttatggatagggagctgagataggaagaggttaagcaatttgaccagggtcaggcaattggtcagaggtggagctggaagggaaatcaggttttctaattcccagtctagtgccctctgcaggctctatggagcgatgcagctgctaaaaaatgctggagggctgtggaagtggaatcatgcaataagagcaggaaaagaagcttgtaatcatttggacgacgccttcatttcccagatgcagagaacgaggctgggaaagttgatggtgatttttccaaattcaaataggtagttaattacagagtagagtctagaattttggctcttgacttccagtccaaggtggtttcctcttagctcttggggagtctctgttgatacctccctcttggtgtctataccagttttgcaaactttagcatacctagcaatttaattggtgttcaagaaatgtctgatgatcatttggtagtctcatactagctttcttcttctctgaatttgtattcatttttcagcaatcaggtcaagacccagaacatccaggaaagtccacctgatcacctcggaattgctagggcctccattatttgaatcccacatttggccctggaatcagggattatttcctactacaagtcttctctgtccctcctctttactattcaacctggcaggctatgtttctataaccctttgtacctaactctgttccagcataagaaacatttggctataatccttgatgtacttttatgtcctctccacaagaccctttatataaattgaatcatataacattaaaacaatgctgagttgcaaatttaaacactttcttttaacaaatgaaggaaaagagggttgaaataatttttccaaggtttcattgctagtgaatcacataggaggcaagccttttaaactgaaattttgtgctgtctcttttgagggcataaagcattttttccacagctctctcttcttcacaggaactagaatgatggtgatcacttatgacgttgtggttggtttgaaaggaagtggctcgaaacccatcctctgccactattggtgatgaaccgtaatttttgttgtatctgccttctatgtccacacatgtgggtgaatgtgtgtgttccatacctccacaaatcctttcatctagtcaaatatgtctttaaatttctgcgtttattgtaaagtacataagacagtgattatacttcggaagatttttccaactgccccttttcccatgagattctaacatgccctccaaattcttttctagttgaggatcactgggaagagttgtattacttcaagtaaccctaactgatataacaaataaattccatatacataaaggctcacacttatcagaaatttctttcttgttcaatttaacagttctgaagatggctgaatatgttgttgggtgattctgctccatgtgctcattgagggacctaggctgacagaactaagtcatctttaacatctgcttctaagattgctatggtgattttaatctcagctagccaaaagggcaaaggggcttgaagaagcacatgttggagattccagggccagacctggaagtcacatgtctcaaaagtcacatcactatattttaactctaaggagattgggaaataatataattcaggtatgtacccaggaagagaagaataaatttgttcagagctcagatcactgatatcatctcattataatgcctatgttggtagcaacattttcgttcattcactttttcagtcaattttttttgctaataaacttggctattaattgagaggttattgtgtgttaggcatgatagttatgaaacaggcggaagcagacaaagtacttgccttcagggagctcatggacatatacaaaaacagtcataattcaaatacttacataaatcaatgtacacttacatttctgcaggtgctggttttgaaagagaggcatatggtgtgatgagaccttataacaaaagcttgtgacttagcctgggtgagtcaggggtgattttcctgaagatgtgttttctgaacagaaatctgaagaagaaataggagttaaccaattggttgaagggtgagagccaggaaaaaaattcattgccagttccaaataaaattgtgtctaacacgcaagacaatttctgtactgagaaggggatttagggatgctacgaacacataatttaatttagtctggtgatcatttagtcttgaatgacaccaactgcctgtcttcactcaactagtggctttgacagtgaccagggatgaggtcgtccagatgtggacaatccacctgagttaggagtggatgagcaatcaatctacctgaccgactacctgagcatgatgtcaatagaccttctttggttcagaggagttcctgctttggctacagcaataatgctcagctgaggattgttaggaatctctggtatactgaaggttaatcaaatatgttactgcctggcctcaggctgttctgctacctgaatcaatagagaaagtcttcagtttgctcttcttgtgtg

SEQ ID NO: 1883123 - DNA, 4001 bp, Homo sapiens
gccgggcgtggtggtgggtgcctgtagtcccagctgcttgggaggctgaggcaggagaatggcatgaacctgggaggtggaggttgcaatgagccgagatcatgccactgcactccagcctgggtgacagagccagactccagctcaaaaaaaaaaaaaaaaaaaagactctttccatgatttttattaaactagagagcctcacctggctgctgtagggttcctcatatgcaaaacagaaataaggggactcccctgactggtccccatgttgttatgtgttctccccacccccagcttcttaatgaagaaggcctctatcctcctaatgaaaggatgtgaatcattccacagatgtctatcttctagcaccacccctggtatttcctctacataccaggtcttcagctgcattctaggaacaccatatactactgagctgcaaatcgatgctaagcatgtgagacaatgactgacagggaaaaaaatttttaattacaaactcaattcatttggtgcatttcaaaggtgcaatacttttcttcatttattagtgaaagaagttagaaattaacttccccccaaaatcagcaaatggcaaacaaatgtctttgaaagtcacagtcacatatagtgtgtcctagaaaagaggaggggcaagacaggctccacccactttcatgagtttcatcaaatactggatctactcaaaggtggagagaaaaggcaactttcaaaaaggagtctgttattaaatgaggcatttactatactccttcctgagagccccaggtggggaacatgttttctaaaccatatctaggaagtggaatgtggaatcaatccgtcctcctcccctaagggctatccactggttaatgaattaaaaaaaaaaaaggactaaaaaataaaccccacacacactcctcccaaagaaagaggagacacacacacacacacacacacacacacacactaagatctcccagattactctccagagtggaaccagggagcagcttcaacaattccaattagtctgttacagagtcatccacaagcatgccttgcttttaaacaaaaaaattttgaagcaacaaaacaaaaacttgtactaatcacttttctgacaatacgcaattactcaaaattaactagtactgggagggggaagagggggccatacctatggaccttgtctcacacgagtgcatgtgggtaggtgcaggacatttgtcattattgcaaaaacgaattttaatttttaatctttagtttgagttaaacattgcttttagtatgatgctgacaccagctgtgcagaaagggctctggagagatgttcctagcagcacacacctgtggctcttcttcagttctggaggctccagggaagccaatattgcttcatcaaatacattccttaggcctttctgtgtgagtgcagaacacaccacatacctgacagccttcaggtcacggatcagcttttcagcagtctctggagtggtgggcttctgtttgttcttggcaagtttctcaatagtagaggggtcatctctgagatgaattagggtcccaacaagcaagaaatgagtctttggacagtggtgagttatcttagacacccactttcctttcacattttcaaatgaagatggagagaccactgaaaaacagactggaaatacatctgtttgtagataactcagcggtcataatctgtcatcatcgtcttgccctgcagtatcaaaaagtccaagagtatatgtttctccaccaatcataacagtgactgcatagttgtcaaaaacagttggtacatattttgatggaaatttgtttgttgtgtaggatatcaggagacatgttttaccaacagcaccattgcccacaaaaacacacttaattgtctgcattgctgaaataagtttgtatccactttaaatatttcaaatctgatgttgacctcagcttcttcactggggcattagcagcactctacagcttttcacaactgggtaaagtaccctcctgtgagtaaactctgaagtacatttctgtctacctgatttctgtagaaatttgaaaactatttgcaagtatacttaatttacggcagtatagttatttgcataagttcaataagaatgtattttcttttgtaacaggacataattggagacactggttattttaccaaagctttgaccggaaggatgtacttttggatacaaacagactgctttaaggagtcaaagctgacttatgaagttggcctcatcccttgtctacacagtcactgtacagagttccttgcctgtagtatgtaaagaatgtcactttctgacaggctcaggagccccaaattatcctgggaccttgaggagaggacattgcccaatttatataggtattttcaggcaccaataaatcatggctgggctcaaggctttaaaaaaagtcaaatctgggattcgttatagaataaagttccagcaaagccaattttaagacaggcctatatggcaaataattattcgtgctgacattatgcaaacactcaggccaagtataagatgaaaaattattttaaataaatttgtcctactatgatttgtcttcagtaaaaacaggtactgggctgggcatggtggctcacagctgtaatcccagcacactgggaggccaaggcaggcagatcgcttgaggtcaggagtttgagaccagcctggccaacatggtggtgaaacaccatctctaccaaaaaatataaaaattagccaggtgtggtggcatgtgtctgtaatcctagctacccaggaggctgaggcatgagaattgcttgaacccaggaggtggagcttgcctgagtcctggtaaggcacagacagaaagggttgtcagccatttttttctgaggttataagatctgcaacttccccagttattcctgcagataacaccactattgtagattggctttttgagaaatcttttccagtgtttgtgcatgaccgtggctccacctggacccacctggacctgccaatcccactcgtgtgaccccacccagaagtgactcagtccttaggactcagcgttgaccccctgtgatttcatctctgctctaagcaatcagcagcaagcacctattacctggcctccccaactccttcccctaaaactgtctttgaacaacccctaacctgtgagttttgcatgaggttgtttgagtgctaactccatctctgtagcgtggccagccttttgtctattaaactctttccttattgcaatgccatggtctttctttatgcagcaggcaggaagagccccttcagtgtttacaaagtcttacctgcacagagaggtcccagagaggctggctgggcactggggatctggggctaccgttgttgatggtcaatgagacatggagtgggagcctcccaccctgacatacctaaagaagacaccacctcctatttggcaaaaggtcctttcttcccaccagcctcacactcctggtcctgacggccacctcctaccgtgctagggtcccacaccctgggcttcctccacaccagtcagtggttggtgttggtggggaatcttagagtcaccctctcagactcccactgagggggactggtctccctgtccctggggctagcctggagctgggcctgccagtggtcacctgtctgagcatgggttaggaggctgggagggctgcccaccactccagggcctgcctccagctgcctccagttgcctccagctgcctccagttgcctccaccctcaggcactcctggccccatggtgcttgaacagggcagggcaggctagctggctgagggcagggggttccacgtcagcgttctgaggactaaactctggcccttttttcttcttttgcccaaattcctacctaagaggcctggggagtgtgccctacagaccgtagagtctctcaaatgggttttatttaacccc

SEQ ID NO: 1883124 - DNA, 4001 bp, Homo sapiens; identical to SEQ ID NO: 587313

SEQ ID NO: 1883125 - DNA, 4001 bp, Homo sapiens
gattgcagcactctggcctgggtgatcaagcaagactccgtctcaaaaaaaaaaaaaaaaaaaaaaaaagaaatcactggggaaaagaaaaacatgaggtcagaaagaaagcaaagccagtatcaaaattggcggagaagcaggcattttccagaggcttattttagatgtctaacttacgaaaaagatgaatcgtaactgtttaatgaccaacctctagagtaaaagaaagaagcggccgggagctgtggctcaggcctgtaatcccagcactttgggaggccaaggacggcggaccaaggatggtcaggagatcgagaccatcctggctaacacggtgaaaccccgtctctactaaaaataaaataaaaaaaaaaaacaaaattagccgggcatggtggcggctgtagtcccagctactcgggaggctgaggcaggagaatggcgtaagcccgggaggcggagcttgcagtgagccgagatcgcgccactgcactccagcctgggcgacagagcgagactccgtctcaaaaaaaaagaaaaaaaaatagaaagtagcaaaaagccattcaaaaattctatttggctcaggaatacctttttagtcttctatttgcatacactgtttctaaggtggttcacctacaactatagtgaccacagcttacattttgccaaaacttttctattctaggaactgacatacaaccctcagacctaatgaaacaaccggaactgatcttctccctcctgcatcccagttcttatagcagggccaagtcttcatttttacagaggctgaactgagcctctttctcaaggttttgactttaatgcatctagttcagttaataagggatgagaaagacgggcgtgatggttcacgcctgtaatcccagcactttgggaggctgaggcagacggatcacctgaggtcaggagttcaagaccaacttgggcaacatggtgaaaccctgtctctaccaaaaaatacaaaaattagccgagtgtgatggcaggcacctgtaatcccagctactcaggaggctgaggcaggagaatcatctgaacccgcgaggcagaggttgcagtgagcaagacagtgccaccgcactccagcctgggaaactccatctcaaaaaataaaataacgggtcagaagtgcctgcataaatcctcattccttaataccaatagaatgaaattgtataggaaaatacaaatgtccccagatgaaatgctgaatatgcaattatttccctgggctctaggaaaacatggctctgacataaagcgggcaagaaacctgtaatttcccacttcccttagttctagtccaacactgcagggacatcatatacttaactacaagtagggactggaaaatagaatccaagacaagctaaagcatttaactgtgtagctgaaacatggcccagtgtcagaacaggaaaacatctggcctaacactatcgagacgcaatttttttaaaaaaagacaaaattatctattttgcacccaggaggatgctaagcaggctgtaaaacttaagttccccggacttccttaaattctggttggggaatgtgctgcctcttagacgaggggccccagctgtggcgggcgggagggctcgaaagcctcggaccgctggagctggcaccgcacgcgcgggaaaagagcctcgagtcgcgggtgaagcgcccggctgcccctcccacgggacactggaggagttagggccctcaaagcacgaagcagtccagtgacaagaaaaaggcaggccgggagtagggagtcgcgggtgaaagagcccccaaagaacccaaatgagaagagcgccactaggcgccgacgcccacgggtagggccggaaactgagcgccgcacgcgagggaggacgtgagcgcacaggtgggagggacgaaaggcgcgcagaggaacgcgggagcttacgggtttgccgaatggaagcgcgagagaaacggcgggaggacagtggggtgggcggggcgaaggtgcgcacggaaggaaggggcgggcggagcgaaggaaggcgacaaagggcgggagaggcgcgcggtaggcgaggcgaagaaactggagaacgtgagggagcggcgaggggtgggcggggcgaagacgcgcgagaaagtgtgggggcgcgcgggcaccgaagcgcgcgccggcgtgggacggggacagcggggcgcgcgcgagcccggcaagagcagccggcggcgcgcgggcctaaggggactgggcagtgcccagagcccggcggggcggggcgcgaggggtaagggcggcccacacccccgccctgccccctcaccgtggccttggccgtgagcaccaacgcctcctggttgatgctggacacctcgggggagctcttcatgatgacccggatgcgggatagaggcagcgagatgagccgctgctccccgcccttgtctttacccacgaccacgtccgccatcttcccgcccgtcgcgcgggtgcccgcagccggcgggcccgaccgcgaagtggctgccctgcccggccagctggtgggtacggggagccgcgcccgctgccccgtgggagttgtagtgtggggaggcgaggccgcgaggccgggagcggcccgtccgggaaactacgagctccgtgaggcctcgcgcccccgatctgcgcatgcgccgacgctcggacaccgcccccgagtgcgaggcccggcgcggaaccggcagccgagagcctggcgggggcggggcgcaccgcgccgctcccgggagtctccgggctgcggtcgcggaatacgactttgatccgcgggtgagggctctgtgaatgggcaagcaaagccctctgactccgggcctcgtggctgggtgctgtgtgttaagcgcctgcgctgtactaggaccgggcgtgccgccgtcggcaaaaagtgacgctttcttgaagcacaaagtccaggggggacgaccaagcggacagcggatgcgtcctgcgccggtagccaggcgaccggtggaagagcagagtccagcgcgggcgatgcggcggggccaggcttgctgcgccgcggggtgattgggagaagagccttcctgcggggtggaggacgaagagctgccctgaggaggtcccggagtctggtgggaacggcctcttcgggactgctccgagagacggtgtgcagagcctggcgtgctcgccgaggtctgacaggcagcccggggctaggtcctgttggatttttttttctaaggaaaatgggaagtggtggtagggtttgagcagtggagtcccgggcagttttaaaaggatccctgcagctgccggctgggagggcgtgggtgcgcgtaaggccggaatcacagagaccaggtagaagatgattacgagaacccaggaacgtggccctcaggaggccggcagtaccaaggggacagcagctgggaggagagaggcaggagatggtcaggggccagaccagggaaggccgcggagaccgcagaattcgctctgaatgagtggggaggcccttggaagagtaaggggtccaacttaacttttttttttttttttttttttgacacagagtctcgctctgtcgccaggctggagtgcagtgcgatctcggctcactgcaacctccaacaccccgattcaagcaattctcctgcctcagcctcctgagtagctgggattataggcacgcgccacccagctaattttttgtatttttagtagagacgggttttcaccatgttggccaggatggtctcgatctcctgacctcgtgatccgcccgcctcggcctaccagagtgctgcgattacaggcgtaagccaccgcgcctggccaccaacttaacttctgccaggatcatgggaagtggtagggtttggggtctgatttcaagagggagctgctgtggagtatcagcacagcttactgagatatcagaaaggccttggtaaagagccctttactgagacaggga

SEQ ID NO: 1883126 - DNA, 4001 bp, Homo sapiens
ataaaatattgttattttggacacaaatctttctagagttcagtttaaacagatatgtgtatttctttgttccaatgcagtgccaggcgacaggaataagaagatgagtaaatgagtaaggtatagcactggtgacaaatgcagcgaaacactgtgtcacctaagtgctacttcactggtgtttatcccatgccaagcactgcgccaaacacttcatgtgcagtttacataatgctccagccccccgccgtgcccacttcgcagagggagacatgggaagtgtgatatgataaagggtcaaagtgttcatcaggtaggaggagtatgttctggaggtctaacatacaggtggtgcttatagttaataacaccatatcataactggaaatttgctaagaaagtagattttaagtcttcccaccgtcccaccataaaaagtggtcatcatttcaatgtatgtgcatttcaaaacatcacgtcatataccttaaatatacacaatttttatttgttaattatatctcaataaaatggggggtggggggagtgtcatgagatcaagatagtggcccaaagtcacccagctgagaagaggtgaaacagactcacacccatgtctgatctgggtttttaacaatgatcctgcagaaaccgtcagctcacaggagggataagctctgggcactccaaaggggagagggataagagctccggtggtccagacacagcttcgtggaggaggcctgggagctgggctaaggggcctgggaggggaagagctgaatgaaatgcaacagccgaaagtgcttgggaaatgcctgcaaatgccggcagtctgatgcacgcagagcctgaaccaggggcctcggagctgaggctcagagtgggcccagacacaggcacccagacccagtgcacaagataaaaacggtctgtaacactggggcctgatagagaggcactgagcagaattagctaccctgccctctgacctcatcaccctgtggccagaggaacatcatgcttggtctactcaccctggagctcattgtctgagaccgtctggtcccccaggacctgcccactctcccaggtcagcagcagccccacaaacagcagcagagtcttcatcatgcctccaattctggagtctttgcacgcctctgcagagaacaggagaccatcatgggaacagctagacagcctgctggcgtcccgcccacctgctgcctgcagcagctccccagggcctcactgccctcagctgtccccacagcaggcactgctgcacttttattcctgaggaaatggggggaaatgaccagacttgccatggacacctcgaatgaaagcgaaggcaggaggtgcagggagggagggactgcaggacagcaatgttgagtggaagaaacaagaaccctggcatcggaggaaccaggctcttgtccaagccacatcctccccgacaatcagcgaggcacacaggctttctgcatcctggcctccttgtccagagtggtatcgatcatgtcagacactgaaaataccccccttaggtcatgcatccgtccctccccatgccacctccacagagggactgcatcccagagaccagccacgtcctctgcaatgtgcacctaaaccttcaccccagcagacgctccccattcaccacagcgctgcagcccccagggagtctcagcaccacctgaacttgactttcaagagccggaggcaacagcagccagcccttcacaccgaatccatctgcatccctagtgggagacttgggccgggctgcctgtgcattcaggggtggaagtagtggaagccaggaaggacaattcccttcggagagtagagagggttcgcagtggcccgaggagcaggcttcccagagaaagtccctttggaaggatgagtcctcttgctctgccaggccctccacactgcccatcccctctaagccgacagcaggctgccctgccagtgttcctgccaccactgggctggctgccctgagccacggggcacaggccatagccccggtcttacacaatggaccctttcccagaagctgaggctgttgcataaaacagaaacccctccccctgcactccacccccaccatgcccctcccaagaactgcttatctgagctcacccatttgccatcacagaaccaacaggacgatggggttccccttcctgaaatggttcacatccaaagcccgctcagcccagcaggcccatctggacactcagtagcacattaacaaggagtgcctctcatgagaagtaatcaggcgcaaagagccagggagcagcgtgggagaagagatggggtcagcgccttccccagagatggggtagggggcggagaccgggctcaccaggaaggctgtggtctcacgggctctgccccagctgcccactgagccctgaaatgcctccagcaggaacagagcctttgtcatgccagagagacaaagccagccagaaacacctctctgccaggggcccctgaaagcaacaacttctggaaaaacccattcagaactaggttctgaccagaagacagggtgctgggccatgaagaatggggcagccaaaggcaagatacaggaaaggaattccagactcagcagcgggcacagagtctgctccagggagcctggggtccctggtgaaccatccagctcagacctgggaaggaggtcgttctctcacccaacctctctaccctagcggtgaggctgaagcccagagagggcatgggactccctagagtccacagcatgctcatggtaaccctgggatgagagcccagccctcccgacccctagtccagtattctttccttgattccaagtcacttaaatatctgagcctcagtttcttcatctgtaaaatggatctaatccagacctcagagaggggaatgtgttctgtaaacacgagggtcttatgtaatcatagtaaattctgactacttccaaattagactgaggtctgaggctgggcattggcagtgtctaatcaacatgtctggagaggggcaggaaaaccgagacaagcacacagaggccacctgtggtcccccggactgtgtggctctgctttgctgaaatgattgaccactttttaaagtacttatgaatcactgcagggctggttataatgttggttctgagactgcttttccagccagtctgcaggtgatatggatgctgctgatccaaggaatgttctagaaccgtgactgcacagccgacctcctttcctttgctcggactcacctcccccctcatctcctctgcctcctgggagcctggctgccagctgccctgggtggaagagccatgccaaggccaaggccctcgagtccccagcactaccacacagcctcattctccctaagaaggcttaaaccacttggccttgctccttctaccagaaaaggccggttctgtggacaaaggggctgctcaggggaagaggaggaggagaagatggcggggggtggggggcagggggggcggggggagcaggcagactttgggagcaactcccctccaggcacaccctcctgggaactttgaactgagcagcttcccaaaacgtttccaagcagggcagggctggaggcttaagaaaatcaatgacctggcagggcgcattgattcacacctgtcaccccagcactttgggaggccaagacaggcggattacttgagatcaggagttcgagaccagcctggccaaggtggtgaaaccatgtctctactaaaaatacaaaaattagccggatgtagcagcatgcgcctgtagtcccagctactcagaggctgaggcatgagaactgcttgaacccggatggcggaggttgcagtgagccgagatggcgctactctactccagcctgggcaacagagtgagacttggtctcaggaaaaaaaaaaaaaaagagagaaaagaaagaaagaaaatcaatgactgtga

SEQ ID NO: 1883127 - DNA, 4001 bp, Homo sapiens
taggaggagtatgttctggaggtctaacatacaggtggtgcttatagttaataacaccatatcataactggaaatttgctaagaaagtagattttaagtcttcccaccgtcccaccataaaaagtggtcatcatttcaatgtatgtgcatttcaaaacatcacgtcatataccttaaatatacacaatttttatttgttaattatatctcaataaaatggggggtggggggagtgtcatgagatcaagatagtggcccaaagtcacccagctgagaagaggtgaaacagactcacacccatgtctgatctgggtttttaacaatgatcctgcagaaaccgtcagctcacaggagggataagctctgggcactccaaaggggagagggataagagctccggtggtccagacacagcttcgtggaggaggcctgggagctgggctaaggggcctgggaggggaagagctgaatgaaatgcaacagccgaaagtgcttgggaaatgcctgcaaatgccggcagtctgatgcacgcagagcctgaaccaggggcctcggagctgaggctcagagtgggcccagacacaggcacccagacccagtgcacaagataaaaacggtctgtaacactggggcctgatagagaggcactgagcagaattagctaccctgccctctgacctcatcaccctgtggccagaggaacatcatgcttggtctactcaccctggagctcattgtctgagaccgtctggtcccccaggacctgcccactctcccaggtcagcagcagccccacaaacagcagcagagtcttcatcatgcctccaattctggagtctttgcacgcctctgcagagaacaggagaccatcatgggaacagctagacagcctgctggcgtcccgcccacctgctgcctgcagcagctccccagggcctcactgccctcagctgtccccacagcaggcactgctgcacttttattcctgaggaaatggggggaaatgaccagacttgccatggacacctcgaatgaaagcgaaggcaggaggtgcagggagggagggactgcaggacagcaatgttgagtggaagaaacaagaaccctggcatcggaggaaccaggctcttgtccaagccacatcctccccgacaatcagcgaggcacacaggctttctgcatcctggcctccttgtccagagtggtatcgatcatgtcagacactgaaaataccccccttaggtcatgcatccgtccctccccatgccacctccacagagggactgcatcccagagaccagccacgtcctctgcaatgtgcacctaaaccttcaccccagcagacgctccccattcaccacagcgctgcagcccccagggagtctcagcaccacctgaacttgactttcaagagccggaggcaacagcagccagcccttcacaccgaatccatctgcatccctagtgggagacttgggccgggctgcctgtgcattcaggggtggaagtagtggaagccaggaaggacaattcccttcggagagtagagagggttcgcagtggcccgaggagcaggcttcccagagaaagtccctttggaaggatgagtcctcttgctctgccaggccctccacactgcccatcccctctaagccgacagcaggctgccctgccagtgttcctgccaccactgggctggctgccctgagccacggggcacaggccatagccccggtcttacacaatggaccctttcccagaagctgaggctgttgcataaaacagaaacccctccccctgcactccacccccaccatgcccctcccaagaactgcttatctgagctcacccatttgccatcacagaaccaacaggacgatggggttccccttcctgaaatggttcacatccaaagcccgctcagcccagcaggcccatctggacactcagtagcacattaacaaggagtgcctctcatgagaagtaatcaggcgcaaagagccagggagcagcgtgggagaagagatggggtcagcgccttccccagagatggggtagggggcggagaccgggctcaccaggaaggctgtggtctcacgggctctgccccagctgcccactgagccctgaaatgcctccagcaggaacagagcctttgtcatgccagagagacaaagccagccagaaacacctctctgccaggggcccctgaaagcaacaacttctggaaaaacccattcagaactaggttctgaccagaagacagggtgctgggccatgaagaatggggcagccaaaggcaagatacaggaaaggaattccagactcagcagcgggcacagagtctgctccagggagcctggggtccctggtgaaccatccagctcagacctgggaaggaggtcgttctctcacccaacctctctaccctagcggtgaggctgaagcccagagagggcatgggactccctagagtccacagcatgctcatggtaaccctgggatgagagcccagccctcccgacccctagtccagtattctttccttgattccaagtcacttaaatatctgagcctcagtttcttcatctgtaaaatggatctaatccagacctcagagaggggaatgtgttctgtaaacacgagggtcttatgtaatcatagtaaattctgactacttccaaattagactgaggtctgaggctgggcattggcagtgtctaatcaacatgtctggagaggggcaggaaaaccgagacaagcacacagaggccacctgtggtcccccggactgtgtggctctgctttgctgaaatgattgaccactttttaaagtacttatgaatcactgcagggctggttataatgttggttctgagactgcttttccagccagtctgcaggtgatatggatgctgctgatccaaggaatgttctagaaccgtgactgcacagccgacctcctttcctttgctcggactcacctcccccctcatctcctctgcctcctgggagcctggctgccagctgccctgggtggaagagccatgccaaggccaaggccctcgagtccccagcactaccacacagcctcattctccctaagaaggcttaaaccacttggccttgctccttctaccagaaaaggccggttctgtggacaaaggggctgctcaggggaagaggaggaggagaagatggcggggggtggggggcagggggggcggggggagcaggcagactttgggagcaactcccctccaggcacaccctcctgggaactttgaactgagcagcttcccaaaacgtttccaagcagggcagggctggaggcttaagaaaatcaatgacctggcagggcgcattgattcacacctgtcaccccagcactttgggaggccaagacaggcggattacttgagatcaggagttcgagaccagcctggccaaggtggtgaaaccatgtctctactaaaaatacaaaaattagccggatgtagcagcatgcgcctgtagtcccagctactcagaggctgaggcatgagaactgcttgaacccggatggcggaggttgcagtgagccgagatggcgctactctactccagcctgggcaacagagtgagacttggtctcaggaaaaaaaaaaaaaaagagagaaaagaaagaaagaaaatcaatgactgtgaacagggagccgtggggaggatgggaagacagtgaagagggcacacagatggtgagggtttcaatcccaaagccccggctcctatctgcttcttcaaatggagaaaactaaaccaaaaggaaaataagaaaaataatcaccggtaattcatatcacccagaggcaaaggttagcactgtggtatatttccttctgtcttccatgcagtttatacaagattcttcacattcaccatcttcaaatattctttaagggcatacttttatggctatgtaatactccacttactcacggacctaagtttattttaccatt

SEQ ID NO: 1883128 - DNA, 4001 bp, Homo sapiens
gtgaacatcaaaatgtactcacacaaacctacacggtattaggtttttatttatgtatatgttttcacatggaaaaacaaatatcccagaaccattactgaatatcaaccatttttcctacttgatctgcaatgccactatttagtgccatatgtcaggtttctacatatgccccattatcttatgggaccacagttgtatatgtggtcccttgttgatgaaaactgcgtgtgactgtacagactgtatacaagacgatgtgtgtaggttacacaccaatactactccatgttatacaagggacttgggcatccagatttcagtatccccaaaactcctggaaccaatcccctgaagatatgaagggacgaccttactactatcacaaggtcatagaagctcattgggatactaggaaagcatctcccacctccctgcagagcccccactgcccctgccaagccaccaacaccaagcaataggaagaaattcacagcaaggaaaggaacagagtaagaatggaaacagtagaaaggcaggaattggatatgtgtaagaggttgaggcaaagaatgagaactagaccagcagatccataaatgcagcgggagagagaggcaaagggggaaatggtgcatctgtccttcgcgcccccatccccatcgctggctcctccatcacagcagacttctgtcgccaccagcacaacattaaaaggaagaactggggacctagggacctgggaggagagaggtcagagcagatacaagacaagtctcctgggtctgcatcaggtaagtggtaaatctgcaggcgacatactgcccaaatctaaaaataacaaacagacatttctaaaaccataatttggtacgtccaagggttcctacgcttgaagtgcctgacctcggcacttgcagcacctcatctggcctggatgtgcttccaagttcccacttgctccctcaactcctcccatctctgtcccctgccctgggaatgccaggctgggccagagtctgggcccgtgccctgagcaccatgctcagaaggcactgctcacaccttctctagccacaccatgtcatagggcagagttcacagggcccccaagacatgttcacctggacaccaccccaccttctgggtcacactccaggtctccctgggcctgctgctttacctgccagtgtccattttctcaagggtgaagcacttcaccagtttgcataagagaggttgtctgcagaggtgtagacagacttgggacctgtggccagggatgtctccctgtaccacagaaagattttggacaagaaacttgaggagtctgagaattctacattggagcctggcttccaggttgttgtgaaggtcgtgtttatttaccaggatggcagtataggacctgatttttagagagcttgacttagaacttggaaacagctacttagacacatggaatgtgagcctctgtttgtactcctgcctcgggtccagcaagtgttaggagcgagcctgtctctcctctccctgctttgggccgctaggcaatgtgcccagaaggtctaatcagagtgtttgctaatgagttggcaagctcacttacctcccttcctagggctcttcttaattagaaacaaaacagctcccagcactccccaaacagaaagttgcagcaaatttcacacccaataaaggaaacttccctctgccactcacccacacacgagatcaaaaagatgacacctgttgtcacccctgcccggggacgtatggtctttcccggtctttgctgtcagtactctactcccagggtttccacctaaggagagcactcactgatgtacactgggacttcagagcccaaagattgtgtaaaatattcaggcaacaacagccaaaaccacaaggaagccattgacacaagtcttgggttactcacctccgtgcaattcggggccacaccaatgcacagcctgagcaaggctgcggatcccagaacaagcccgtctgcccaagtttgaggtctggttttaagcagcctttccggccagcacagataacactatcctgttctgcaatcagggccaggacactgcagtcagcagccctcacaggtccaactgcagaccgctgtcaagcaaccccatgaccatatatgaaatcccaattacctgtacttatccatcgctagttcacttcgctgcagtccttcgtaaaccaaagagcaggtagaacgagttcaccctgaacacagcatccctttaaatgaccctggagaccgtgatttgccattgccagacaggatggacgggaacagataggcaactgtgtgcgatcacaggacataatggaatgaaatgtcagatcaggtgttaggatttgatctgtgctatggttcaatctgtgctacagagttcacacttggtcaggcttttccacgatgtgtaaaattctacaaggtctgtgcggcatcacctttactctactttgctcaaccacgatcactgtgattaggaagcctgcctatagccacatgaccctcgccacctcccacagcctgggggccagttgtcatggcattttatcaggatcttggtcatgagaaaccactctaaaaatgggtttcagaaagtagaagcaaggcaaaaaaagctctgacaatttaaaaaccattagaattactaagagtttggtaaggtgtcaagttcttttaaaaatagcctttccacacaccaatggcagccagttagaaaagattgtggaagagggctatacagtccctttcgtaactgatattaaaaataactacctagaactgaacattaaaaatttgccaaaaacacacaaaaaataccaagcacatgaaaggaaaatggaatagacagaccatatacctggaaagtaatttattatatagatctcaagtctttcaaaatttatgtaaaatgaatattaatctaattaaatcccaaaaggattttttctacagcttggcaaaaatgattcttaagctttcatagtgtaataaatgtaagaaaagtcaagaaagtatttttttttttaaggaaaagctattgagggacagagggcaagaccacattctaccaaatataaaaatatgtagtaaggccaggagtggtggctcatgcctgtaatcccagcactttggaaggccaaggcaggtggatcatctgaggtcaggagttcaaaaccaacatccccaacatggtgaaaccccgtctatactaaaaatataaaaattagccgggtatggcggcacacacctgtaatcccagctacttgggaggctgaagcaggagaatcgtatgagcctgggaggcggagattgcagggagcagagatagtgccattgcactctagcccaggcaacagaacttgactccatctcaaaaaaaaaatacataataaagctcaatgattcagtaataatctagcaacagacaggcagatcaatgcaagagaacagaaaatcctgaaacagatctaagaataaataatttattatatggtaaaggtggcatttcaaatcaatgggaaaaggtacgttcattgacaaaggtattgaagcaacgggttaagatttggaaaataactatctctgctcccaaacattcaccatatgagactgtagacctaataaaaataaacataagattatgagaataaaatatcaataaatattttatactatcttgcagtgggataggaattgtctcactcctgctggggtgactccccataaccccagggctctcagttccaaagagaaaaagggaacagatgcctcctcccctcctcactcccctgggacccagggattgctccctgaaggtatcgagccaccctccctcccactcctcctgggaggccaaagaagcttaaacagcagggcccctccctgtgctgcccctgggagtgcatggagttctggaaagggaagaaaagccaggttccaatcaaaaagcctctccgtg

SEQ ID NO: 1883129 - DNA, 4001 bp, Homo sapiens
gcctcagtctggggccgagacctgctcagaatctgcatgaggtggacgtggggaatgcctactccttcctcctggggtctgggcatttgtggttggtgttggtggcttccccatccatgcagtgtctcagtggggtgcctggacctctgagctgcctcagcaccctgcaacaacaagaaggctacgattttcccggtgaaatgctttccctccctcatcacttatcccctatgaagctgtattttccaggcagattcagttctcagaagctttaaggcaacacaagagagtgcctgttgcaaagtgcagtggagcatttgtgtgtgtgcattttctgggtgtgaagaagagtttatggatgtgaaatccaggtcttagtagacatggctggagggtgctcttaatgaggacatgccagtgtaagctgctgtgctttctgttccatgcatcccacctttgctaacaacacatttccctcttacagaaagttttttccgtggatctcatgtaaccctatgtcttaaaaggaaaatgtacaatctgacattgttcaatgaaactccaattctttagcacagaggatggtggttttcccggagaagtaatgattttgtgactgcatgaactttaagctgacaccgattgtttgcccagtacacgggagggagctctttgagtggatccagagaaaatgagacagagtgaaaagacagagcagtggatggggagattggtggtgtcatatgggccttcttttcaattagagtctgaagccaaaactcctgcttgaaattcctagaatttggaattttgttttgtttaaaaacttaggattctggtaggtgcatgccaagtgtcttgagacacaaagacacatcaaatgtgaaagagatgtaaagacagaaatcttgcgataaggtatttatttaggatgagaaaatgaaattaaggacaaggtacaggaataacaagaatttcttttactctcaaagtaaataatgagcttatttttcttgattctgcaagctcagcagcagcagatccggtataatctaccaggaagggcacaggacccaaagcgacgttgaaagaaatggcaaattcctcgtctgcaaatgcacctcaagcctctccctgagcctggggacacagggacagcatcagaaatggatcaccaaggtcaacagtgggttgtaaagggaatcttggagaagtcacgtgccagctgatgagtgatgttgtctgcattagggccggtagcatgaacaacctcagtcaataggaataaatacacagagcagtgctggtcacacaggatttgagactcattctcatttgctctcatttttgtgcttctgccccatcacacacacacctgaacacactcttaggcttggctctacttttaaaaaaccattctatagatacagtaaaatattctccttataatgaaatctacttgtttagatccagaaagaagtagtcagactgtctcttcatatcttaaacctactgagtttcacaggcatatcttggaatcaagtctttcctttttatttattttttctaaagtgaaaggattattaagaaagtaaaagagtaaaataatggctgctctccatgcagagcagccttaagtctttaaagacagaaaacctgttagatttattgggctctctcttcaatttatagatgagaataccaaggaccagagatgctaaatgaagccacctaagtgacatggaccattgagactcgattccagactctctctcccgtccaaccctctagactgtgcagctctctgcatgccggcctgtctcacctgaaagtggaagtgcagcgctttcatcccatgtaaaggaaacagacacttcctgatcatctgctccaggctactcctgggctgcagcttcatcagctcttgcccgaagtggctccgcctgagcctgcagggccacaaagagaacggtggcagtgaggagggcaagggtcctcatggctacagagacttggaggagggagagcaggagcagatgtgtggggagagaggagttagcctgggtttataggtctgcagagagaaggctcagagaccagaaactttgaaacttctcagtgagaggaggtgtgcatttcatcggggattgtgtgggatccctttggtctcagtgtccctcttttcctcctttgatctctcagcttttattgtagtgtgaatctctattcacactagaaagtgtgagtagatggatcaggtgtttggagaagatggtgaagatgaggatcctggcatgtttttcctgtttctcacttcattccatatttactttttaataaccaaaagataacagcagtgcttttgttcagtaagttcagggagcaaatgtgtcattttctgcagatggccccactacttcctggaggtctacactctggcagcaggcataaattcctatcaagtgaagagtcatttgttgcaggcatcaagggcgtgaccaccctcatgaagtcatggggttagtagtctcttgtaggagccagtgtgaagaggaccatgaccctatcacgtgataggtgaaatgaacacagtgacatcgaggtaaaaagttcatctacatccaaaagaaatttttccagctctactgagatatgaataagaattaaaaatggtacagatctactgtatactgcgttaggatttgatgttcatatacatgtggttttttatcatatactaggtacacaaatcaactcaaaatgttttgaagacccaaacatagacctgaaaccataaaatgatgagaggaacatatgaagataatgctttgacgttgatgttggtaatgatatctttgctatggcagcaaagacacaggcaatgaaaagaaaaatagacaagtggggctgcattgaacattaaagcatctgaatggcaaaaatcaaaaagacaaacaactgagtgaaaaagtgacccagaacatgagagaaaatatttgcaaaccctaagtggtagaaggggtaaatatccaaatacataagtaagtcaaacaactcaatagcaaataacaaataacctgattgaaaaacaggccaaggagcaggataggctcctctcaaaataaaataatgtttcaaggcgctactattgtctctgttagacacgtcaagtaggacacgcgtatttcgaaggaaatttcctgagtttctctattaacttagctggtagccaatgccccaggcaaccaccagaggttcagagagaaatgcacagcaggggattcacccactaggtccctctggggtggtccaggagtcacaggtcagactgggggcacaggctcaatgttgaaacctcaatgtgagagtttaaggtctgtgttaattacagctcctgaagttaggcagagtgaccagagagggcagacagcagtcctctgtccctggtctcctgtagcaagagcagccgtgcacaaacaggaggggacttccctatttaagggtgatttgggatcaggtatcctaatatcctgggttactttctgttgggtacattaaataactctggtggcaagggcagttgagaaatttggagggacgctgtggtgtagacatgagtccacagagaaccccgcatctaactcggtcagccctggccaggcccaggcagcaaccaatgatagattccatgactcctaagacaatggaccccgagatgcctgtgctgatggctcaggctgaggtaattgcacccagggaatacttaaagcccccaggagagcctggcctgcatatcacaggatacactctgttagggagacaagttacgacagacacccatgcacaggagaggatgaggaatcttgcctgaaccagcctcccaagtacctgtgctctaaccgtaacaacacatcaaagccgattggctgggttgggatgttgcagaccacctggttgagactgaatcccacgtcggcttgtgttaccaggcagggcaggtt

SEQ ID NO: 1883130 - DNA, 4001 bp, Homo sapiens
cttatgccttaacccttgattatcctatttccctattctcctgtctcaagggtgcatctttcagaatacagttgaggaatctgcgttttgtttgtgtgaagacaactttatgaatatgaaatcaagattttccctggcatgggtggaaaatattgatgatgagtctgtcgcagcgaggtgctcctatgcttttcgttgtactcattacaggatttgttttgttttgtttttttgatggagtttcgctcttgtcacccaggctggagtgcaatggcatgatctcagctcaccgcaacctccatttctcaggttcaagtgattctcctgcctcagccttccaagtagctgggattacaggcatgtgccaccactctcggctaatttttgtatttttaatagaggcgaggtttcaccacgttggccaggctagtctcgaactcctgacctcagatgatccatctgcctcagcctcccaaagtgctgggattgcaggcgtgagccactgcccccggtctggaaccatttctttggtgctgggattacaggtatgagccaccacacctggcccattacagctttcttaactgttcattccaatctcaattaaatttttttcaatagagctgtgacaaccccaggtcttcaaaggcagatgtgtgacctgggtctgttcaatgaaactccaacacttcaggaaagaacatggtggttttttccctaagaagtagcgatgttatgattgtgtaaactgaaagctgataatgactgtttttcctaacacatgggagttacgtttgagtgaatccaatcaaagtgaagcagagtgaaaagacagagaagtagaaggagaaattggcagcataatttgtgcttgtaaatcagtttgtgtctgaagccaatgtttgtccttgatattcttagaatttggagttgtattttgcttaaaaagcttaatttaggattctggtgcttgcatcccaaagagtcttgactaagaggtgcattaaacaccaaacaggtacaaacacaaacttgctacaaagactttattaggaataagggaagaaattgaagacaaggtaaaggagtaataaaagttctcctctagatctcaaagcaaatgatgaacacattttcctctgtgctccatgatcccactattggtgcaggtcccatagcggtgtttggaaaaatgacagcctgatattctgccatagcagaccaagcccgtcgctgagcctgaagacacagagaaagcatcaggcattgggactggggtcagacgcggttggtaaggagaatccccgtgcagttacttactgggctgattgcattcatcatggtggccacaccacagcagcagcaagatcagctcaatcaataggaatcaacgtacacagcagtgctgctcacaggcaggattagagacttattctcatttgctcactttttgtgatgctgcttcttcacacacacatttgagtacacccttaggtcccttcccatttgtgaagctcctctaacaaacaaagtgaaatatgtttctttccaagtgggttctcatcctcgatgccagagagactccccagcgtgtttccacatagcataagattactaaatttcactgacttttcacagaatcaaatacctttggaggagcaatgtccattgaatatcatctgattctgtcttttcagtctacacttgaggaaattgaggcctggagaggtgatcacctaagagaaagaaccagctattgggtctgattctagcggtgcctggttttcctctctagactcctggctctgcagtgctggtggctctcacctgaatctctaaaacctgagcttatgtcccctgtgaaggagatggcaaagtcctggtggtctgccccaagctgctcctgggctgcagcctagtcagctcttgcctggagtggctcaagccagggcctggagtggcaccaggagaatggcagcgaggagggtgagggtcctcatggctggggtcacctggaggatggagagcaggagtggatgtgtggggagtgataagccagcttggatttatagctctgctgggagaaggctcagagacagatgctgcagtgagaggaggtggagcatgtgattggggaagggaagggctgcctttgccatcaagatccctttgatgctcttctgttctccgagcttttatcatagcatgagtctgcttatcgagtgtctgttctgggtccaagccaatagtgatgattaggatcatgctataatttcctgtgtctcatctgctggaacatttacttcttaatattcaaaaaagaaaagaaacactgctcttattccataagttcaggcaataaatgcctcttattttctgaagatgagccctgctattcttggtggtctagaccctgaggcaagacctggaccccagcatagagagtaattcattgcaggattctggggcatttctaccctcatgaaggacgcttttgaggttctggaaggcatagtcttctgccactgctagtgtggagaggacaatggcctcatcaggctatcagtcaaataagctcagtgggatactagttaaagagttggtctgaataaggttaaaaatttttttttatttccaaccgtattgagaggagtgacaattagaaattatatcggttgaaagtacacaacctgataattcaacgtatatctacatttgtacccttatctcacaccaaatgtaaaaatcaactctgaatgaattgaagacctaaatataagtcttgaaatcataaaacttactagaagaacccatagggataaagcttcctaacgttgaactgggagattatttcttggatattacattaaaggtagaggcaactaaagcaaaaataaaccagttggagttcatttaactgtaaaacatctgcatagcaaaggaagtcattaactgagcaaacaggcaacctagcaagagagagaaatatttgtaaacgatacatgtaatgaaagtaaatatctaaatatataaagaacttaatagaaaaaaacgagtattaatgataaatgtgactaaacaactaaaagaaaccattattacataattaaaggaaactgtgatgacaaaatcttttcaagggcagaatataataaagtgaagttacgaagaaacacatgaaattctggaattgagaagtacaataatcgaaatgtaaattttatgaacggctgctcaatagtatacttaaactggcagaaccaagatttaggaaatgtgtgtacagatagataaaagattatatagtccagagaacagagaaaaaagatgaagaaacaagaatacagttagagaaaagtgagatactattaggcatgaaaacactcactgggttgagaggtgaactctcaatctgttaaggcagcagtccccaacttttttggcatcagggacatctatgaaaaacttacaactaacatcatactcggtggttgaaaaaaaaaaaaaaggatgctttcctactgaaattagaaaccagccaaggatatctgaaatcagcacttctactcaacattgtgctagaggttctagggcagtcaggcaagaaggaaaaattaaatgacatccaggttagaaaagaagttgttaaataatctctgtttgcaaagacatgatcttttatatatagaaaatccaaaacaatttattaaaaaactattagaactaataagggagtttagcatggttgaaaaatagaagaccagtgcacaaaaatcaattgtattttttctttcataataaacttttcaaaaatgaagctaaaaactccttttacaagtagtatcaaaaggaacatagctagtcgttgaatttaaaaaatgtgcaaaacttatactccccaaaccacaaaaagttgaagtttttaagaatatctaaataactggaaagagatcttatgctcagggattgtgaggtttaatgtgagatgtcagtgctcccca

SEQ ID NO: 1883131 - DNA, 4001 bp, Homo sapiens
gtcagtctggccctcagggacaccggggttacgcagtgaccctgtcctctcggaggggaggaggaagacaggatcaggaaggcgcagacccctcgtgtgctgtgcctggtggggaggctgcagttggaggcaggacatcagggggcgctgtggccttcccgacaaatgctctgagcatctcagagggctctcctggttcattccctttccccaggcctggtttcttgctcactcactgatgtgcaggatgttttgagtatcagagcctcagtgccctgcaacaacaacagggccgccaagctcctgatgaaatttatttcctctcttctcttttcccctgcgaagctgtattttccaaacagaatcagggtctcagtggctttaaggcaactcaagagagtgcgtgttgcaaagtgcagtggagcatttgtgtgtgtgtgtgttttctgggtgtgaagacaactttgtgggtgtgaaatccaggtcttagtagacgtggctgtagggtgctcttaatgaggatatctcggtgtgggctgctgtgctttctgttccatgcatcccacctttgctaacaacccatttctctcttaatttaagttgtttcagtggatctcctgtaaccctacgtcttaaaaggcaaatgtgtgacctgaagatgttcaataaaactcccattctttagcacagaggatactgattttcctggagaagtaacgattttgtgactgcataaactttaagctgacactgagtgtttgcccagcacacaatggatccgaagaaaatgaggccgagtgaaaagccagaacagtgaacagtgagattggtggtgacactggaccttcatttcaacttaggtttgaagctcaaattcctgcttgaaattcctagaattatgaattatagtttgttcaaaaatttgatttaggtttcacgtacatgtatcccaaatgtgttgacacagacacataccacacgttaaagaggtgtaaacacaaaagtcttgttagaagacatttatttgggatgaggaaaggaaactgaggacagggtataggagtaacagcaattctctgtagctctgaagacaaattatgagctcgtttttctctcttccggaagctcagctgaagcagtatgggtagcgtactccaggagcactgcaagtccctctacggtgttctccaggactgtaggaatctcatctgcaggtgcaggtcaagcccctccttgagcctacagacacagagacagcatccaaaattgagcaccaaggtcagcagtgggtggtaaagggaatcttggagaagtcacatgctgagtgataggtgacgttggctgtattagggccggtagcacaaacagcctcagtcaataggaataaaaacacagtggagtgctggtgtcacaggatttgagactcactctcatttgctttcatttttgtgctccggccccatcacatacacacctgaacacactgttaggcccatcccgagtctttaaaagagattctctatcgacagagaaaaatattctcctaataattaagtctacttgtttagatccagaacgaactagttagtatgtctctctgtattttaaacatagtgaatttcacagacatatcttggaatgaagttttgggagaagaaaatctcttagatttctttggctctctactcaatttatagatgagaaaatcaaggcttagagatgctaagtggagccacctaagtgacatggaccattgagactcgattccagactctgtctcctgtctgtccctctagacactgcagctctgcatgccggcttgtcttacctgaaacctgaagaggagctctttcatcccatgcaaaggaatcaaccacttcctgatcatctgctccaggctgctcctgggctgtagcctcatcagcaattgcctggagtggctccgcccgagcctgcagggccaccaggagaatggcagcaaggagggcaaggctccttatggctggggtcacctggaggagagagagcaggagcggatgtgtggggagggaggagtctgcctagatttatagctgggagaaggctcagagacaaaccttcttgaaccttctcagtgagaggaggtggagattcgttggagagggtgtggatatccattggcttcaatgttcctcctttccttctctgctctcccagctttcattctagcatgcatctctatgttgagtgtcttggctgggttggagctgatggtgatgatgaggaccctgccatgatgatgtgctttcattcagtgaattcagggaataaaggcctcttactttctgaagatgggctctactgttctctggaagtctagacctggacccagtggagtagagaattaattcattgcaggctttgaaggcattaccaccctcatgaaggggtttttgaggttacgcggtgaggaatctgctgtaggggccagggtggagaggacaatgacctcatcaggctacaggtaaaacaagctcagtgacataaagagttgtctaaggctaaaaatgtctatgatttccatctctatttaggtgtgagtgacaaaaattatatatgtgtaatgtatactaccttatgagttgatatatgtatatatttggacctttatcttataccatgtagaaaaatcaagtccaaatgattagaagacctaaacatagacccgaaaccataaaatgatgagaggaacagatgaagataaagctttgacgttgatgtgggtaatgatttcttggctatgacaccaacgacacaggcaataaaggggaaaagacacaagtggagatgcactgaatgctaaaggatctgcacgtcagaaaacaaccaaacaatcaactgagtgaaaaggcaagccagaaaatgagagaaaatatttgcaaaccctacatgatagaaagggtaaatatctgaagacataaggaaatcaaacaactcaatagcaaaaaacaaataatctgattggaaaacagaccaatgacctgaatagacttctctcaaaagaatgttctaaagagctatgatcatgtctactggacatgtcaattaggacacgtgtgtttagaaggaaactgcttgagtttctctgttaacttagctggtagccaatgcccccagcagccaccagaggttcagacagatgttcacagcaggggattcacctgctgggcccctctggggtggcctgggagtcacagttcagattgggggcacagcctcaatgttgaaacctcaatgtgaaagtttaaattttgtgttacttacagatcctcaagctaggcagggtgagcagagagggcagacagcagtcctgtgttccaggtcttatgtagcaagagcatctgtgcacatcccagagaggacttcccctatttaaaggtctttggggatcaggtgtcctaatttccagggttattttctgttgggtacattaaataactctggtgacaaggacagttgaaaaacttggtgtgaagcttgggttcaaacaggcatcgacagagggacccctcacctaccttggtcagccctggccagacccagacagcaaccacctatggattctccatgactcctaagacaattgagcccacaatgcctatgctcgtggctgaggctgaactacctggaccgagggaatatttaaagccaccaggaaaggccagcgtgcatagcgtagtatacactctgtaaggagactaggaaaaaagcaccaacctacacactgaggagggtttaggattttgttctctatcagcctctgcaggccgtggggtctaaccgtaaaaacacatcaaagccattcagccaagcccgtagatgttggtgaacacctgggtgagactgaataccacttcggcttgtcttgctaagcagctcaggttttgctggactctcctgagttaagcaagtacacgtagcacgtggtgccctagaggagatagttatctccttgcttggca

SEQ ID NO: 1883132 - DNA, 4001 bp, Homo sapiens
aggtacaccagggttaggcagtgaccctgtcctcttgaagggaggaggaagacaggctcaggaaggtagaccccacgtgtgctgtgcctggtggggaggctgcagctggaggcaggacagcagggggcgctgtggccttcccgacaaatgctctgagcatctcagagggctctcctggttcattcccttttccccagacctggtttcttgctcactcactgaagtgcaggatgctttgggaattagaacctcagcgccctgcagcaccagcagggactcaggttacttggagaactctcgtccctctcttcatttttcctgatgccttagaagcagtattttccaggcagaaccagattttctgcagctttaaggtaacccaagagagtgcctgtcacccagtgcagtggagcaattgtgtgtgcgcattttctatgtgtgcagacaactttgtgtgtatgaaatctagattctggtggatatggctggaaaatactcttaatgaggacatcccagaggggtgcctctgtgctttctgttctactcatcacgtctttgtaacagccagttccactttaattgaattctttttttcccatggagctgattccatgtcaggtctaaaaagcagatgtacgatccagaactgctcagggaaactcaaacacttctggaaagaacgtgctggcttttcctgaggagtagcagtgttatggctgtataagcttgaagctgacaatgatggtttatggaacacgtaagcattatctttgcatgaatccaatcaaaatgaggcagagtgaaaaggcagagcagtagatggggagatgagcagcatcatttgagctttcctaacaatgtgtgtctgaagcctttgttcatctccaatattcctagaattggaactggcttttgtttaacatgtagaatttagtgttctggtacttgcatcccatggtcttgactaagacacatatcaaacattaaagaggtgcaaacacaaaacttgctacaaggactttacgagagatgaggaaaggaagctggagaccaagtacagtagtaatgaaagttatcttctatgtctgaaagctagttatgaacttactttcttctgttccacaagctcagaggaagcagaatttgtagtgaatctcaccggaggtgcaggttccatagttgcgttcttgaagatgataatctcttattctgcaagagcatctcaagagggttcttgggcctggggatacagagagcatcaggcattaggactggggtcagatgtgggtggtagacagaatccccgtgcagttacctgctgggctgattgcgttaatcacagtggccacatcagagcagcagcaagatcagctgaatcagtaggaatcaatgtacacagcagtgctgctcacaggcaggattagagacgcattctcatttgctcacctttttgtagtcctgctccatcaccaaggcatctgatcacactcataggcctcttgctagtttctaaaactcttctaatagacaaagtgaaacatgtttcttcaagagtgggctctcatcaatgatgcagggaagatggcccagtatgtttctgcagagcataaaataagtgtgcttctcagaattgtcatagactcaaaaatcttcggagaaaagtcatccctggagtatcatctggttctttccttttagtctacacatgaggaaattgaggcctagggaggtgatcacctaagagaaagagccagctgttgggtctgattctagaggtgcctggttttcctctctagactcctagctctgcaatgctggcggctctcacctgaagctctaaaacctgagcttgtgtccccagtgaaggagatggtaaagtcctggtcgtctgccccaagctgttcctgggctgcagcctagtcagctcttgcctggagtggctcagacagggcctggaggggcaccaggagaatggcagtgaggagggtgagggtcctcatggctggggtcatctggaggagggatagcaggaggggatgtgtggggagtgaggagcaagcctggatttatagctctactgggagaaggcctgagacagatgctgcagtgacaggaggtggagcttgtgattggttgtggcagggctacccttgccctccaggtcccttttgtgttctggtgttttcccagctttcatcatagcttgaggctttatgtttagtgtctggactggatccaagctgatagtgaggctgagtacccttatttatttttctgtttacaatctacttgaatattttctttttgatattgaaaaatgtaaagaaaccgtgatttcattcattaagttggggaacaaatgcctcttattttctgaagatgggccctgccactgtctggagccccagatctgaacccagtggcatagaaaattaaagcagtggagaattcagggacatttccaccctcatgaagaggttatagggtgtgtagcctcctcctggggctggtgtgaggacaaaaagacttaatcaggctacaggtgaaatgagctcattaggatactaggtcaagaataagtaaaactaaagccaaatggtgggttaattttaagaaacaaatgtcatttggacagatcaggtaaaatttctatcattaacatatctgtactttaagaaatatcgaaacaattgacatgcctatagccctcttctaggatctttgtgattgttttaattataaaatcttaaatcatgcagacggaacaacaggtagaaagggtaataggctcccgtctgttcccccagccctgcagctctgctcttggaaaccaccacttcccaattttacacattcttccacacttgctttttccctctaatgctgtgtcttgtacactttgtatatcaaacacatcgagcttcaacgttacaattattccctatacttttccagcgttcgcacatgccatcactttactatttttatactgggaaaatattgtcaagttgtcataatttgtatatttctaagctttgccatgacaattttaaacagcaatgaatataattttatagacatcagtttgcccataagtgacaatatcttttgaatatgtctttagaagtagaattctgggttaaagaacatgtcttaaatattttgagtttattgttacattgtcctcactaaagattgttcaatacactaaaaacaaaaatcactccaaccatcactgagcccagtggaatttcttttagaaggccctgttttgtgcaaacgtagttccagtttttgcattgttgaaatttgccgtttgatattggaatacattcttaaataaatgtggttatattatagaccattttaatgcacattgctcactttattttttttttgctaatgacttattagtttctgtctattttatatttattttacactatggaaatgatgttagacaaaaagcaaattccagcaattttcttagttgaattcaaaataagtcgtaaggcagtggagacaactctcaacatcaacaatgcctttggtccaggacattgcattttggcccactgcactagccaacttacagtgcagtggtggttctggaagttctgcaaaggagacgagacccttgaagatgaggagcatagtggcctgccattggaagttgacgacaaccaattgagaacaatcattgaagctgatctgcttacaactacataaaaagttgccaaagaattcgacatcaaccattctgcagttgtgcagcatttgaagcaaattggaaaggtgaaaaagctaaataagtgggtgcctcacgagctgacagaaaataaaaaaaacgtcgctttgaagtgtcgtcttctcttattctacgaaacaacaacgaaccatttcttgatcagattgtgatgtgcaacaaaaagtggatttcatatgataaccagcggagaccagctcaatggttggaccaagaagaagttccaaagtacttc

SEQ ID NO: 1883133 - DNA, 4001 bp, Homo sapiens
ttcttgaggtgcagagatagaggcttgctgaggatgaaagtggacagaaaagctaagagaggctccaatgctgaccatggcactctgcaagaagagaaaaaatgtgtatgtagaggtttatgagggaaaatcgtgagtttggttttggatatatattacttttgaaatcaagtgtccaagtagatataccagttatgcagttggataatttatttaagcctggagttcaaaaggaggtccaaaaggagaattgaaagggatgagacttgctgagcccctccaaagagtgtgtggtgagggagaagagaagaggaccaggaactgagctctgcagctctcctataggaggtgtgatgcaaaagatgaggaagaaacaaaggaagccgaagtggtagctccagtgagacaggctgagactcaagtgaatgtgccatcctggaagccaactgaagaaagtatactgtgaagaaggaagtgattatttgtgtcaaatgctgctaataggccgattaaagttgtagtgaaaaatgatcattggatctagtaatgtggagattattcgtaactttgacaaaagtggtgtcaatatcatgatcgaaaaagggagaaagagcctgattgggatatatttaagaaacaatgagaggagaggaattgaagacagagagtatggacaactattctaagatgttttgttgaaaagtagagcaaaaaatgggatgacagctggcatcagaagaaaagcaaggaaattctttttcttagatcagaaaaacaacagcatatttgtatgctgatggtaataatttactagcatcaaaattaatgacacggtcatgatatagtgaactgcaacaggaaaatccccaggtacacagcgaagagggaatataatacacaaatttaaaaattatttggatctctgaaacatctgttttgatattaacctttcattcctgcaatagttattttaagcatgttctcattttctcttgttcagtgttgccaggttattataaagtgtattagactttttgaaaaacatttttaaaaatactagttttttctcatttgtttcattaatttatattttgtatttataattttccctttatcttctttagggttattatgctgttttttttcccagaagcccccaaaatgcatgcttagcccattaaattttagccatttttgtatcgaaagttatgttacccatttctgtgtggttacctgtaatataccatgagcagcacttcttggtgtctttgctccttattaattcacttgtctgaagttcctttaactctcctttctacttttcactttcactttgcaaatcattttttattcataaccgcataaaacataatttattttgaaaagtctctcatataattttcacttattctaggattataatttttccgtttgtctcttcgaataaaaccttcagatttgtcaacactcattaaacagtagctcctattgataggattccatccatctcttttgacctagtaagtgaatataataatagatgccacagaaattcaatcctgtcagatctaactgcctacatataaatttccatgtcccgcaaaggcatctcattgaggtcacattctgttgtatctttactttgtatcttgaggtgcttggtggggcatggaaatttacatgtaggcagtttcatctgataggattgaatttcagcagcatcgattattatatccactcactaggtcaaaagacatggatggaatcttatcaacaggagctactgctaaatgagtcccttttctatttttccctattataatcctagtgaagctgtaaatattaggttcttgaacccacaggactgattctagtatcttgtctggccagagatatagccttctgatctgcagaaccttatagtaatcagctaccaacttacctggggataagagaatttaaaaaagaaggagaataaggagaagcaaatggagtctcatggctgaagggccagcatcaatgtgggttgagcctggagtctctgggcatcgtgggtctaggcctttttatgatgctctctgagtctgtgatttgttcttggtcagtagagcctaacgaaaagagaataactaaatctcccacaggaaacttccagggacacacaagtacataaatgtggtgatatctcaatggatgagaaagcaggtgaatgctatttatttcccaaagattcaggatgtctttattgtcacctgctttctttattatttttgaaatgcacatgcaataataattgatctcactttatacatctatcgtttgccaggcaatatagtaggaactgaagtaaaattgttatacacaaacagtacataattaatggatatagtttggcaagtttgcacatatatattatcttgttaccacaccaatatccaggtaataatatatccatcacctccaaatgtttcctacgtccctttgttgttgttgttgttgttgtcagaacccctaagatcgaccctcttaacaaattgttaaatacaaaatacctcattgttaactataggtactatgttttggagcctatctctgtaattgactcattttgtatagctttaacccttgaacaataactccccatattgctctttccccactcaataaaacaccaaactcttttaaagcacattctatataatccactttatgaagcttttcctaacactcttttatctgttcccccccagtaaagggaactactaatataacaattacctattttggattattgtgtcttttacaaacattccttcatgaacccatttaacacttatctcccattatcttattatgaagtaaaataaaacttgacgtgattttaaaaatgaaatcacaaaagggctttgtaaaattatgatgtaccattgcttatttgtaagaattcaagttacactaggggtttctaaaaatcttttgtctttatttgttgcatattgtaagcacagtgtcttttccagctatttgctttgggaagaaaagttagagttacaatgaacagcataggctatcttgtctagtcacttacattagagatgaggaaatgagctgagggaaaggaagaaacttgcgcaggatcacccagtgatctagcgaggaaggcgatagggacagcactaaggcttggtattctgagcctcattctattttctcctcttgccccttctctgtttcctcctctcttccccagccttccagaaaaactttacagttctgctgcaatgtctacctaaggacatccagaggagacctcacttttcattagactgcttttttaagcactgtcttgcattttcttcttcagtcttgttgtatcccatttttggctataagtaatgcttctgctgtgctgttccatccaattagtttcttctattttcattgagagaaaattaaaacaaaaaaccattagtttatctaaatttggaagttttaaaacttgattagaatttcctgggatatggatgtaagacatatattttaaaatatttttcattttcaaaattaaaaatcaaacccatatatttatccaggatgactacttgataactactaatcagatgggtcttcagcaatgccacaaggataaacatcttataaatcaattccctggcgttatgtgctactgagttaatacaatttgatatggtatcacctttaagcaggctttacggagtcacacaaaggaacagcacaacagaaccatagggtggaatgtatagggaaagctgggatgtaaaacccagccttgactctgacacttactccactgttgagaaaagtacttcagttcccagagccttaatattttcctctataaaacaggaaaaatagagccatatttaaggttttgtcaaatcttgttgctgagtgattttacagtgtctgcagctatcctctctgctaatcataacaaggctaacgaactgttcttttgttta

SEQ ID NO: 1883134 - DNA, 4001 bp, Homo sapiens
tgctgaggatgaaagtggacaggaaagctaagagaggctccaatgctgaccatggcactctgcaagaagagaaaaaatgtgtatgtagaggtttctgagggaaaatcgtgagtctggttttggatatatattacttttgaaatcaagtgtccaagtagatataccagttatgcagttggataatttattataagcctggagttcaaaaggaggtccaaaaggagaattgaaagggatgagacttgctgagcccctccaaagagtgtgtggtgagggagaagagaagaggaccaggaactgagctctggagctctcctgtaggaggtgtgaagcaaaagatgaggaagaaacaaaggaagccgaagtggtagctccagtgagacaggctgagaatcaagtgaatgagccgtcctggaagccaaatgaagaaagtatactgtgaagaaggaagtgattatttgtgtcaaatgctgctaataggtcgattaaagttgtagtgaaaaatgatcattggatctagcaatgtggagattattcataactttgacaaaagtggtgtcaatagcatgatcgaaaaagggggagagagcctgattgggatatatttaagaaacaatgagagcttgattgggatatatttaagaaacaatgagaggagaggaattgaagacagagaatatggacaactattctaagatgttttgctgaaaagtagagcaaaaaaggggaggacagctggcatcagaagaaaagcaaggaaattctttttcttagatcagaaaaacaacagcatatttgtatgctgatggtaataatttactagcatcaaaattgatgacacagtcatgatatagtgaactgcaacaggaaaatccccaagtacacagtgaagacggaatatacacaaatttaaaaattatttgaatctctgaaacatctgttttgatattaacctttcattcctgcaatagttattttaagcatgttctcattttctcttgttcagtgttgccaggttattataaagtgtattagactttttgaaaaacattttttaaaatactgttttttctcatttgtttcattaatttatattttgtatttataattttccctttatcttctttaggtttattatgctgttttttttttccaaaagcccccaaaatgcatgcttagcccagtaaattttagccatttttgtattgaaagttatgttacccatttctgtgtggttacctgtaatataccttgagcagcacttgttggtgtctttgctccttattaattcacttgtctgaagttcctttaactctcctttctactcttcagttgcactttgaaaatcattttttattcataaccacataaaacataatttattttgaaaagtctctcatataattttcatttattctaggattatagtttttctgtttcttcgaataaaaccttcagatttgtcaacacccatttagagtagctcctattgataggataccatccatctcttttgacctattaagtgaatataataatagatgccaccgaaattcaatcctgtcagatctaactgcctgcatataaatttccatgtcccgcaaaggcatctcattgaggtcatgttctgttgtatccttactttgtatcttgaggtgcttggtggggcatggaaatttacatgtaggcagtttcatctgacaggattgaatttcagcagcatccattattatatccactcactaggtcaaaagacatggatggaatcttatcaagaggacatactgctaaatgagtctcttttctatttttccctattataatcctagtgaagctgtaaatattaggttcttgaacccacaggactgattctaggttcttgtctggccagggatatagcattctcatctgcagaaccttatagtaatgagctaccaacttacctggggataagagaattgaaaaaagaaggagaataaggagaagcaaatggagtctcatggctgaagggccagcatcaatgtgggttgagcctggagtctctgggcatcgtgggtctaggcctttttatgatgctctctgagtctgtgatttgttcttggtcagtagagcctaacgaaaagagaataactaaatctcccacgggaaacttccagggacacataagtacataaaggtggtgatatctcaatggatgagaaagcaggtgaatgctatttatttcccaaagattcaggatgtctttattgtcacctgctttctttattatttttgacatgcatatgcaataatcattgatctcactttatacatctattgtttgccaggcaatatagtaggaactgaagtaaaattgttatacacaaaaagtacataattaatggatatagtttggcaagtttgcacataagtattatcttgttaccacaccaatatccaggtaataatatatccatcacctccaaatgtttcctacgtccctttgttgtggttgttgttgttgtcagaacccctaagatcgaccctcttaacaaattgttaaatacaaaataccttattgttaactataagtactatggtttggagcctatctctgtaattgattcattttttatagctttaacccttgaacaataactccccatattgctctttccccactcagtaaaacaccaaactcttttaaagcacattctatataatccactttatgaagcttttcctaacactcttctatctgttccccccccccacccaagtaaagggaactactaatataacaattacctattttggattattgcatcttttacaaacattccttcatgaacccatttaacacttatctccattatcttattatgaagtaaaataaaacttgacttgattttaaaaatgaaatcacaaaagagctttgtaaaattatgatgtaccattgcttatttgtaagaattcaagttacactaggggtttttaaaaatcttttgtttttatttgttgcatattgtaagcacagtgtcttttccagctatttgctttgggaaggaaaagttagagttacaatgaacatcataggctatcttgtctagtcacttacattacagatgaggaaataagctgagggaaaggaagaaacttgcccaggatcacccagtgatctagcgaggaaggcgatagggacagcactaaggcttggtattctgagcctcattctattttctcctcttgccccttctctgtttcctcctctcttccccagacttccagaaaaactttacagttctgctgcagtgtctacctaaggacatccagaggagacctcacttttcattagactgcttttttaagcactgtcttgcattttcttcttcagtcttgttttatcccatttatggctataagtaatgcttctgctgtgctgttctatccaattagtttcttctattttcattgagagaaaattaaaacaaaaaaccattagtttatctaaatttgaaagttttaaaacttgattagaatttcctgggatatggatgtaagacatatattttaaaatatttttcattttcaaaattaaaaatcaaacccatatatttagccaggatgactacttgataactactaatcagatgggtcttcagcaacgccacaagaataaaaatcttataaatcaattccctggtgttatgtgctactgagttaatacaatttgatatgatatcacttttaagcaggctttacggagtcacacaaaggaacagcacaacagaaccatagggtggaatatatagggaaagctgggatgtaaaacccagccttgactctgacacttactccactgttgggaaaagcacttcagttcccagagccttaatattttcctctataaaacaggaaaaatagacccatatttaaggttttgtcaaatcttgttgctgagtgattttacagtgtctgcagctatcctctctgctaatcataacaaggctaacaaactgttc

SEQ ID NO: 1883135 - DNA, 4001 bp, Homo sapiens; identical to SEQ ID NO: 1883134

SEQ ID NO: 1883136 - DNA, 4001 bp, Homo sapiens
gctgaggatgaaagtggacaggaaagctaagagaggctccaatgctgaccatggcactctgcaagaagagaaaaaatgtgtatgtagaggtttctgagggaaaatcgtgagtctggttttggatatatattacttttgaaatcaagtgtccaagtagatataccagttatgcagttggataatttattataagcctggagttcaaaaggaggtccaaaaggagaattgaaagggatgagacttgctgagcccctccaaagagtgtgtggtgagggagaagagaagaggaccaggaactgagctctggagctctcctgtaggaggtgtgaagcaaaagatgaggaagaaacaaaggaagccgaagtggtagctccagtgagacaggctgagaatcaagtgaatgagccgtcctggaagccaaatgaagaaagtatactgtgaagaaggaagtgattatttgtgtcaaatgctgctaataggtcgattaaagttgtagtgaaaaatgatcattggatctagcaatgtggagattattcataactttgacaaaagtggtgtcaatagcatgatcgaaaaagggggagagagcctgattgggatatatttaagaaacaatgagagcttgattgggatatatttaagaaacaatgagaggagaggaattgaagacagagaatatggacaactattctaagatgttttgctgaaaagtagagcaaaaaaggggaggacagctggcatcagaagaaaagcaaggaaattctttttcttagatcagaaaaacaacagcatatttgtatgctgatggtaataatttactagcatcaaaattgatgacacagtcatgatatagtgaactgcaacaggaaaatccccaagtacacagtgaagacggaatatacacaaatttaaaaattatttgaatctctgaaacatctgttttgatattaacctttcattcctgcaatagttattttaagcatgttctcattttctcttgttcagtgttgccaggttattataaagtgtattagactttttgaaaaacattttttaaaatactattttttctcatttgtttcattaatttatattttgtatttataattttccctttatcttctttaggtttattatgatgttttttttttccaaaagcccccaaaatgcatgcttagcccagtaaattttagccatttttgtattgaaagttatgttacccacttctgtgtggttacctgtaatataccttgagcagcacttgttggtgtctttgctccttattaattcacttgtctgaagttcctttaactctcctttctactcttcagttgcactttgaaaatcattttttattcataaccacataaaacataatttattttgaaaagtctctcatataattttcatttattctaggattatagtttttctgtttcttcgaataaaaccttcagatttgtcaacacccatttagagtagctcctattgataggataccatccatctcttttgacctattaagtgaatataataatagatgccaccgaaattcaatcctgtcagatctaactgcctgcaaataaatttccatgtcccgcaaaggcatctcattgaggtcatgttctgttgtatccttactttgtatcttgaggtgcttggtggggcatggaaatttacatgtaggcagtttcatctgacaggattgaatttcagcagcatccattattatatccactcactaggtcaaaagacatggatggaatcttatcaagaggacatactgctaaatgagtctcttttctatttttccctattataatcctagtgaagctgtaaatattaggttcttgaacccacaggactgattctaggttcttgtctggccagggatatagccttctcatctgcagaaccttatagtaatgagctaccaacttacctggggataagagaattgaaaaaagaaggagaataaggagaagcaaatggagtctcatggctgaagggccagcatcaatgtgggttgagcctggagtctctgggcatcgtgggtctaggcctttttatgatgctctctgagtctgtgatttgttcttggtcagtagagcctaacgaaaagagaataactaaatctcccacgggaaacttccagggacacataagtacataaaggtggtgatatctcaatggatgagaaagcaggtgaatgctatttatttcccaaagattcaggatgtctttattgtcacctgctttctttattatttttgacatgcatatgcaataatcattgatctcactttatacatctattgtttgtcaggcaatatagtaggaactgaagtaaaattgttatacacaaaaagtacataattaatggatatagtttggcaagtttgcacataagtattatcttgttaccacaccaatatccaggtaataatatatccatcacctccaaatgtttcctacgtccctttgttgtggttgttgttgttgtcagaacccctaagatcgaccctcttaacaaattgttgaatacaaaataccttattgttaactataagtactatggtttggagcctatctctgtaattgattcattttttatagctttaacccttgaacaataactccccatattgctctttccccactcagtaaaacaccaaactcttttaaagcacattctatataatccactttatgaagcttttcctaacactcttctatctgttccccccccccccccaagtaaagggaactactaatataacaattacctattttggattattgcatcttttacaaacattccttcatgaacccatttaacacttatctcccattatcttattatgaagtaaaataaaacttgacttgattttaaaaatgaaatcacaaaagagctttgtaaaattatgatgtaccattgcttatttgtaagaattcaagttacactaggggtttttaaaaatcttttgtttttatttgttgcatattgtaagcacagtgtcttttccagctatttgctttgggaaggaaaagttagagttacaatgaacatcataggctatcttgtctagtcacttacattacagatgaggaaataagctgagggaaaggaagaaacttgcccaggatcacccagtgatctagcgaggaaggcgatagggacagcactaaggcttggtattctgagcctcattctattttctcctcttgccccttctctgtttcctcctctcttccccagacttccagaaaaactttacagttctgctgcagtgtctacctaaggacatccagaggagacctcacttttcattagactgcttttttaagcactgtcttgcattttcttcttcagtcttgttttatcccatttatggctataagtaatgcttctgctgtgctgttctatccaattagtttcttctattttcattgagagaaaattaaaacaaaaaaccattagtttatctaaatttgaaagttttaaaacttgattagaatttcctgggatatggatgtaagacatatattttaaaatatttttcattttcaaaattaaaaatcaaacccatatatttagccaggatgactacttgataactactaatcagatgggtcttcagcaacgccacaagaataaaaatcttataaatcaattccctggtgttatgtgctactgagttaatacaatttgatatgatatcacttttaagcaggctttacggagtcacacaaaggaacagcacaacagaaccatagggtggaatatatagggaaagctgggatgtaaaacccagccttgactctgacacttactccactgttgggaaaagcacttcagttcccagagccttaatattttcctctataaaacaggaaaaatagacccatatttaaggttttgtcaaatcttgttgctgagtgattttacagtgtctgcagctatcctctctgctaatcataacaaggctaacaaactgttc

SEQ ID NO: 1883137 - DNA, 4001 bp, Homo sapiens
tccttgtaatgaagtctacttgtgtgaatccagaaagaacgagtcagactgtctcttcatatctaaaacctactgaatttcacagacatatcttgacgtcaagttttatttttcaattttatagattttctaaagtgaaaggattgttaaggaagtaaaggaataaaagaatggttactctccaggcagagcagcctcaagtctttaaagacagaaagatttatttggctctctattcaatttatagatgagaaaaccaaggcccagagatgctaaatgaagcccccgaagtgacatggaccattgagactcgattccacactctgtctcccatccatcccactagaccctgcagttctgcatgccggcctgtctcacctgaaagcggaagagcggcactttcatgccatgtaaaggcatgagccatttcctgatcatctgctccaggctgctcctgggctgcagcttcatcagctcttgcctgaagtggctctgcctgagcctacagggccaccaggagaagcatggcagtgaggagggcaaaggtcctcatggctggggtgacctggaggagggagagcaggagcagacgagtcgggagagaggagttagcctggatatataggtctgcagagagaaggctcggagacaagaaacctggaaccctctcagagaaaggaggtgtgcatttcgttggagactgtgtgggatcccgttggtctcaatgtccctgttttcttcctttgctctcccagctttcactctagtttgaatctctacgtgtagtgtttgtgctgggttggagaggatggtgacgacgaggatcctggcatgtttttcttgtttctcacttcattatatattgactttttactattctaccaaaggataacagcagtgcttttgttcgataagctcaggatacaaatgcctcttttcctgcagatggccccactactctgtacaggtctacactctggcagcaggcgtgaattcctatcaagtgaagagtcatttgttgcaggcatcaagggcgtgaccactctcatgaaggcatggggtgagtagcctcctgtaggggccagtgtgaagaggacaatgaccctatcaggcgataggtgacatgaacacagtgatattaaggcaaaaagttcgtctacagccaaaaatgtgtttctggctctattgagatatgaataagaatttaaaacggtatatatctcctgtataccaccttaggatttgatgttcatgtacatgtggttttttatcatatactatatacacaaatcaactcaaaatgatcgaagacccaaacatagacctgaaaccataaaatgacgagaggaacatatgaagataacgctttgtcattggtgtcgataacgatatctttgctatgacaccaaagacacaggcaataaacgggaaaatagacaaatggggctgcactgacctctaaagcatctgcacgtcaaaaaacaaaccaacaaacaaataatcaactgagtgaaaaagcaacccagaaaatgaaagacaataattgcaaaccctaggtggtagaaggggcaaatatctaaatacataaggaagtcaaacaactcaaaagcaaataacaagtaacctgtttgaaaaacaggccaaggagcaggataggcttctctccaaataaaaggatgttctaaggagctattgttgtctgtattggacgtgtcaagtaggacacgtagatttagaaggaaattccttgaggttctctattaattgagccggtagctaaagctcccagcagccaccagaggttcagagagaaatgcgcagcaagagattcacccacaaggtccctctggggtggcccaggagtcagaggtcagactgggggcacaggttcaatgttgaaacctcaatgtgaaagttttaagtcttgggttacttacagatcctcaaggtaggcagagtgaagagggagggcagacagcagtcctctgtcccgggtctcctgtagcaagagcagccgtgcacaaacaggagaggacttccctatttaagagtcatttgggatcaggtgtcctaataacctgggttactttccattgggtttattaaataactctggtgggaaggacagttgagaaatttgatgggaagctggggttcggacaggagtccatggagggtcccctcatctgcctttgtcaaccttgcccaggcccaggcagcaaccaacgatggattctccatgactcctaacacaatggaccccgagatgcctgtgctggtggctgatgctgagctagttgcagcaagggaatatttaaagcccccaggagagcctggcctgcatatcacaggacacactctgttagagagacaagttcaagtttgacacccatgcacaggagaggatgaggaatcttcccctgaaccagcctgcccagtacctgagctctaaccataacaagacaccaaagccgattggtgggctgggatgttgcagaccacctggttgagactgaatcccacgtgggcttgtgttagcaggcagggcaggttttgctgggttcgttaaggatgtgcacatagtatgtggttccctggagtggacaattgcctcattgcttgggcaatggacagtttaaggccaaacgagtgtctaggaccactggggccaagaactcctgagtttcctgctggagacctaatgtctcttgaaagtctctcagggaggcggccaaggtggcagtgagtttggtgttagcttgcatcacctggtgctctgtgctccaatgccttgctcttaagcccattctgggcaggcttaagagtctccatgcacatagcatgagtgggatgatcagtggtcgcttgaaatatgcaggatcaaactcctgtggttcctcctgtgttatttgaggagaattcctaagaagactagagcacattttaaaatgtaccactatccaccgtcctcctccttctcctagtcaggtagatggggtaaggtttctggagatgagaaaagaatgcagtcgctcgagaggcaataaatacctgtggtgaggttgctgaacccagtgtgcacgccgggcagcccctgccaccatgggaatgtcgtgcacagcgctggtcccacaggctgggtgctcagggccccccctgcagctctgtgtgaaggcagcaggcatcggccggtggaggcctgggggcagtggagtgataactaaagcatctccctcaaccttaaggtagaagaggcatctcaagctttgctagaggcggtcgctgtggcagagcagtggggtctcctgtccctctgaggaagcagtgaattcctgatgtgtggcaggcccaggaacttcagctttggaggaagtgagcaccagtctcaccccagcataagaagaaatttgggctcttcggggaaactgaggctctggtgacagttttagcttccagggcattagtaggtgcctgtagggtcgcaatgatgaggttatagggactaaatatgaaggggtgtatatgagcgagaggaagatctccgggttctggaaatgtcccatgtcctgcggaagtgaaacctggacctgcttcctgcacacagagcacactccagtccacaggcatttccacagcactgcatgagcgttatcactggagagctggtgagattcgggcgtggtattcttacacatagttctcccaagtctatagttttccgtagcttgtagggcagctttacaatctcactgaggctctatgggttccttgcaccataaagtaatgggcttattctgaaagcaaatggtgatctcagcaaaattccactctaatgaggtcatttttggtgtaatcagcaaagcatgaggtcagggaagcagcaagtcaagggtttgggtactggccatgagccagcaccatgtactggagatggcgaggtccgtatttgtagcagtaaggaaaggctggttggtggtgatctcgtggtcaaagtgattttc

SEQ ID NO: 1883138 - DNA, 4001 bp, Homo sapiens
tccttgtaatgaagtctacttgtgtgaatccagaaagaacgagtcagactgtctcttcatatctaaaacctactgaatttcacagacatatcttgacgtcaagttttatttttcaattttatagattttctaaagtgaaaggattgttaaggaagtaaaggaataaaagaatggttactctccaggcagagcagcctcaagtctttaaagacagaaagatttatttggctctctattcaatttatagatgagaaaaccaaggcccagagatgctaaatgaagcccccgaagtgacatggaccattgagactcgattccacactctgtctcccatccatcccactagaccctgcagttctgcatgccggcctgtctcacctgaaagcggaagagcggcactttcatgccatgtaaaggcatgagccatttcctgatcatctgctccaggctgctcctgggctgcagcttcatcagctcttgcctgaagtggctctgcctgagcctacagggccaccaggagaagcatggcagtgaggagggcaaaggtcctcatggctggggtgacctggaggagggagagcaggagcagacgagtcgggagagaggagttagcctggatatataggtctgcagagagaaggctcggagacaagaaacctggaaccctctcagagaaaggaggtgtgcatttcgttggagactgtgtgggatcccgttggtctcaatgtccctgttttcttcctttgctctcccagctttcactctagtttgaatctctacgtgtagtgtttgtgctgggttggagaggatggtgacgacgaggatcctggcatgtttttcttgtttctcacttcattatatattgactttttactattctaccaaaggataacagcagtgcttttgttcgataagctcaggatacaaatgcctcttttcctgcagatggccccactactctgtacaggtctacactctggcagcaggcgtgaattcctatcaagtgaagagtcatttgttgcaggcatcaagggcgtgaccactctcatgaaggcatggggtgagtagcctcctgtaggggccagtgtgaagaggacaatgaccctatcaggcgataggtgacatgaacacagtgatattaaggcaaaaagttcgtctacagccaaaaatgtgtttctggctctattgagatatgaataagaatttaaaacggtatatatctcctgtataccaccttaggatttgatgttcatgtacatgtggttttttatcatatactatatacacaaatcaactcaaaatgatcgaagacccaaacatagacctgaaaccataaaatgacgagaggaacatatgaagataacgctttgtcattggtgtcgataacgatatctttgctatgacaccaaagacacaggcaataaacgggaaaatagacaaatggggctgcactgacctctaaagcatctgcacgtcaaaaaacaaaccaacaaacaaataatcaactgagtgaaaaagcaacccagaaaatgaaagacaataattgcaaaccctaggtggtagaaggggcaaatatctaaatacataaggaagtcaaacaactcaaaagcaaataacaagtaacctgtttgaaaaacaggccaaggagcaggataggcttctctccaaataaaaggatgttctaaggagctattgttgtctgtattggacgtgtcaagtaggacacgtagatttagaaggaaattccttgaggttctctattaattgagccggtagctaaagctcccagcagccaccagaggttcagagagaaatgcgcagcaagagattcacccacaaggtccctctggggtggcccaggagtcagaggtcagactgggggcacaggttcaatgttgaaacctcaatgtgaaagttttaagtcttgggttacttacagatcctcaaggtaggcagagtgaagagggagggcagacagcagtcctctgtcccgggtctcctgtagcaagagcagccgtgcacaaacaggagaggacttccctatttaagagtcatttgggatcaggtgtcctaataacctgggttactttccattgggtttattaaataactctggtgggaaggacagttgagaaatttgatgggaagttggggttcggacaggagtccatggagggtcccctcatctgcctttgtcaaccttgcccaggcccaggcagcaaccaacgatggattctccatgactcctaacacaatggaccccgagatgcctgtgctggtggctgatgctgagctagttgcagcaagggaatatttaaagcccccaggagagcctggcctgcatatcacaggacacactctgttagagagacaagttcaagtttgacacccatgcacaggagaggatgaggaatcttcccctgaaccagcctgcccagtacctgagctctaaccataacaagacaccaaagccgattggtgggctgggatgttgcagaccacctggttgagactgaatcccacgtgggcttgtgttagcaggcagggcaggttttgctgggttcgttaaggatgtgcacacagtatgtggttccctggagtggacaattgcctcattgcttgggcaatggacagtttaaggccaaacgagtgtctaggaccactggggccaagaactcctgagtttcctgctggagacctaatgtctcttgaaagtctctcagggaggcggccaaggtggcagtgagtttggtgttagcttgcatcacctggtgctctgtgctccaatgccttgctcttaagcccattctgggcaggcttaagagtctccatgcacatagcatgagtgggatgatcagtggtcgcttgaaatatgcaggatcaaactcctgtggttcctcctgtgttatttgaggagaattcctaagaagactagagcacattttaaaatgtaccactatccaccgtcctcctccttctcctagtcaggtagatggggtaaggtttctggagatgagaaaagaatgcagtcgctcgagaggcaataaatacctgtggtgaggttgctgaacccagtgtgcacgccgggcagcccctgccaccatgggaatgtcgtgcacagcgctggtcccacaggctgggtgctcagggccccccctgcagctctgtgtgaaggcagcaggcatcggccggtggaggcctgggggcagtggagtgataactaaagcatctccctcaaccttaaggtagaggaggcatctcaagctttgctagaggcggtcgctgtggcagagcagtggggtctcctgtccctctgaggaagcagtgaattcctgatgtgtggcaggcccaggaacttcagctttggaggaagtgagcaccagtctcaccccagcataagaagaaatttgggctcttcggggaaactgaggctctggtgacagttttagcttccagggcattagtaggtgcctgtagggtcgcaatgatgaggttatagggactaaatatgaaggggtgtatatgagcgagaggaagatctccgggttctggaaatgtcccatgtcctgcggaagtgaaacctggacctgcttcctgcacacagagcacactccagtccacaggcatttccacagcactgcatgagcgttatcactggagagctggtgagattcgggcgtggtattcttacacatagttctcccaagtctatagttttccgtagcttgtagggcagctttacaatctcactgaggctctatgggttccttgcaccataaagtaatgggcttattctgaaagcaaatggtgatctcagcaaaattccactctaatgaggtcatttttggtgtaatcagcaaagcatgaggtcagggaagcagcaagtcaagggtttgggtactggccatgagccagcaccatgtactggagatggcgaggtccgtatttgtagcagtaaggaaaggctggttggtggtgatctcgtggtcaaagtgattttc

SEQ ID NO: 1883139 - DNA, 4001 bp, Homo sapiens; identical to SEQ ID NO: 1883137

SEQ ID NO: 1883140 - DNA, 4001 bp, Homo sapiens; identical to SEQ ID NO: 1883138

SEQ ID NO: 1883141 - DNA, 4001 bp, Homo sapiens
tgtattatacttgtattgcatgtaacattcttaccttatattcacagaactccataagttatgtcctgtgactactgtcctcattgtacgttgcatagattaagagatttgtccaaatgacaccgttggcgagaggttgagccaggatctcaatgtgggctttcaggcatcaacacatgtgctccactgtgcatacaaactgccttctgcgcaccatgttacttccgacctgtaaagcacatttcacggccaagcacactgttggcctcagcatagcgtttcctgtagacaggaaaaatgatcccaggcccgcctctttgagtgtctttcccatggtgtcttattttcaccttctaaaaataaatgttcacgttgcttcatccccccatccaagaaaactcacagcctttctcaaatcgcctgtcctctctgctgttcctgacaagttgttcaaaagttccactcatacttccattttcttaccttaacgtctgcgatctcatttctgcacccatatccactgaaactgtcctttttaaaaatgaccccagcttgctgcatctgacggtctttccccatctcattccacttgatttctcagcatctgctccggggccgggctcctcctgtccctcgggtgcccaggagcgtcccccgccccacgcccctctcactttcctcctggattcccttcgtggccccgcctcacctgagaggcctcctccacctttctgctgcgtgacactcacagcccgacgtcttccacacttttacatctgaagcactcagaggttcacagccctgcccgtcacacttgctctgttctttcacagacttcttggaagtgccctagaatcagcaggtccaaatcaaactcaggtccaacctccaaaacctgtttttcttcctatcatagatcttgcctttgttgggagaagtctaggcgccttggaatcatctcacctctaacacattcctcattcctgtgggctctgtccctaaaatccaagccctttggtgtctcatgagaaaccagctcaagtctgcaggagcctctcggggtctgtgtccaggacaccacttcctgcattcaggcacctcgtcctccaggccccacgcacagggaccgtcctgagctcccagctcacaagtccctgattaagaacttgcagtacttttcttttgcctgtggcataaacatcaagctgtctggggtgtccctcacagtttcccactctgcttccccaaacttctctcccagaatgcctttccccctttaccctctgctctccagacaaacaatgctcactccccgcctcccagctggcacacactctacatttccttttagcattttgcattaagaaatctatgttccagtctttgtccccaacacactgtcaactacacgagtgctacgcttgccatcttgcagaaggcctttcttgcacttccaagcacccagacttacgtgggaggtgccttattaagatgccttctcctcgtgttctgtttgggaagcctttggtggcacatccttcaaacctgcccagtcctggttatagcaaaggacgggtagagccaagtggacgagagccggaggtggttggtccggctgggtcagggtcagctgcactgggaccagggcagaggagagccagaggaggttgtccacactgggttggggtcagctacacgaggaccagggcaaaggaggttgtcatggctgggtcactgttagctgcactgggaccagggcagaggagagccagaagaggttgtccacaccgggttggggtcagccccgttgggacccaagccagcgtcatgcatctgagcatgctggctctcactctcagctggccgtgggtcagccattgcagccccacctgccacgggctccaggaagagcagtcatcagtatggagaaggccggactctgctcagaagccactgagcaggtgctccatagactcaccagctggagcggggtcacatctcggaggcaccgtcagcaccaggagggcagccaagcaagggtatggcatttccgagcctctgcggtcaagggtatcgcatttccgagcctctgcggtcaagggtatggcgtttccgagcctctgcggtcaagggtatggcgtttccgagcctctgcagtcaagagcccagagatgggttgtcggggcagctgtgggggcatcccagatgtgggtgccaacagtgagatgcaaatgtggatttccctcaaaaatgtgctgttagggaacaagcatgccttcatctcctgcaagggcacagaaagctcaagaacactttttaccctgaatgtggaaatgatctggaaagaagccattttctgaaatccagtcattaattgtgatattatttgaaatgtatactgaaaggtgttctaagaatttccattttgcaggtggaataatacacacatgtgcacgcacagcacacgcacgcgtgtgcacacgaatgtctgtttcactagcactgtttagcgtgctccattttccattgaatgcagtggaagaaacacttcttatatttgggagcttctcctgtcagatcccatttatagaaatgagaagatgatctctgtatttcaaatgaacacatttagtatggaaaaaaattttcttaaatatctccttagcacaacctgcatagaatccttactgctttccaaggtaacaagggagatggtttacgttgtgtattttcaagcatgtttagatggatctaaacagctggggtcagaggccctttcaggggtaccctttgttatgtatattcgttctcataatgacctaagtcacagaggaggttctgagcccaggattcagcaagcagctctggaaccattcgcaaagggcgagaacaaggttgaacaccaggaatcctgcagttctgtcttggggttatggattcacttgcacagctttccgtctcgcctgtttgtggatgacaatctaaggggagcaacatctgaaaggcaaaactagaacaaaaacatttctgtgttattctagaaaacttttcactatttaaaaaaaaattctgagctactaagtccatatagcaaaatatgtttccatttctgacacctgggatgccgcaggaattaccacttagagagataaccaaaggggctgaaagtcaacttcaaaatgccccgggatgtaggagggggattttcagggggaagagtcaggtggattttgtggagtgagccgtgctggggacttcaccctgtgtcacctggcggggccaccggagggtgcatccccccatcttgattggctccccctagtcctagttcttgagttttgatctgtgactgtgaggaacctggccttctgggactctatatgataaaatgctaagccattataatattttttaaaaagcctcttaagccaaatgaggctgaggttttatttgttattttttaactatttaaaaagtctgtggtatcagaggatgggatctttggctctgtggtcctatgactcagcatcttgagtgcttaaaatcccagtgaccttgggattttaaagcatgaattccagagccaggccacctggactcagaagggagtgctgcccccatcccgcccaagcctgagtgcatgacctggcaccagtgtgtgatgacctggcaccagtgtgtgaagacctgtgcgtgatgacctggaaccagtgcgtgatgacctgacaccagtgtgtgatgacctggcaccagtgcttgatgacctgacaccagtgcatcatgacctgacaccagcgcgcaatgacctgacaccagtgcacgatgacctggcaccagtgcgtgatgacctgacaccagtgcgtcatgacctgacaccagtgcgtgataacctggcaccagtgcgtgatgacctgacaccagtgtgtgatgacctggcaccagtgtgcgatgacgtggccccagtgtgccatgacctggcaccagtgtgtgatgacctgaca

SEQ ID NO: 1883142 - DNA, 4001 bp, Homo sapiens; identical to SEQ ID NO: 587433

SEQ ID NO: 1883143 - DNA, 4001 bp, Homo sapiens
aaaaaaaaccctaggttgcatcaaactcttcccagctgggggtggtataaatggaatatacagttctgtgtctcttttacaaaatgtcattttccaactctctaatatatctcctgtcttgagtacataatcaccagtcctcactgtctccactggtggccttggatgttactgacaaaacaatactggcaacaagagatgagaaagaaaaatgtcagttccaatgaccacccaaactgaaaaacaaaataacactgaaaacaagttgtaaacaatgtaattagtcagaactgaaagctagcaactaaagcaagaaggttctaggtagggaatttttttaaacaacaaatatttctcctccaccccaagatttgttgtgtgtccccatcaaggaaaattcttttattaaaatgcttttatttaaaacattgttgtaaactcaaatcttagcatcatagactatggaggctactagagatcttattgaaatgtatgagatgacctggaacgttttaatatattgctcagtacaattcagtatgtacatattctctaacagggaaaataaccctgttggagaatactcatatatttatatcctgtaaaggatgcccaaaggttttaaaataaggaaatacaacccagagtaccccagatctggtaaaatttaactaatcacctcctaggatcccagatccagaaccttcccttgtttaatacaaattggaatgaaatgcaagaaaaaacacacagcataaggattatatatcttgcactttaacagttaaacccttaggaagaaaaatagagcaatgaagagctactatgttttagtacaatgttagcgtgggaagggaaagtccccaaatacctattaatagagggctgaaagtctttcccatttgttatatttctaggaagtcccttatgccaccccaaatgtgagcaatctcctttacttttgaagtccatcaggcactatgctaagtgctcctcaagcgtcatcagccttcactctgcagactaactttgtggaggggtgttaatgttctcacctgacagatgaggaaactgagacttgccacaaaaggtgtatagtgtcagatagctgttaaatgacacagtgcaatttgaactccactaaaattcattatgactccaaagaccatgccctaaaacactaaaccataccatcttttaagagagaggtgctgtacactttgggaggccaaggcaggcagatcacctgaggccaggacttcgagaccggcctggccaacatggtgaaagcccatgtctactaaaaatacaaaatttagccgggcctggtggcaggtgcctgtaatcccagctactcaggaggctgaggcaggagaatcacttgaacccgggaggtggaggttgcagtgagccaagattgcaccattgcattccatcttgggcgatgagagtgaaactccacctcaaaaaaaaaaaaaaaaaaaaaaaagaagaagaagaagtgctgtagttgtcccaaaccaaatggatctactcatcttggaagcctacacactgacaagccaaggttttaacctatccatgacctttacaatgcctcagcacatatcattgggacccttctacttagatgtctggctccagcatgtgagcaaatgctcttgacacctctgggcaacttaaattgaatcagctgtgacacatgctccaacttctctgacctgtgtgtagctctccactaagccgaatgcatggagcatgacttcgcaaagggttatatctagcccactcaagaggagaaagctaatccctttggcttttttttttttttttttttttttttttctaatttctcatagatcttctaggacattctggaaagaccttcaggaccagagctagggagatttgcctaccattcttaacagaactgccaaagagtcagccaattttcatcctccgaactccactagaagggagaagccccaaattccaatgctactgtttcaatctaatagttccggaatacaggagataccctttagaactcagtctgcatgtctctgagcccccaccccctgcacagctctacagtcatataatgtttatgatgctcttgatctcctcaaagaattgatcataaatttttctacttcataaagtgggatttagaaaaactacttcctataatgcttcttcctctctttaacagtcatctgaattacagcagggccttccggtttggaccttgacttccctcagtggattcggggaaatgatttgacttacacgccacttctttgacaagaatcccatatctctgcttctttatcatatttagatgtattttttaaccatataaactccatgggctcgttttggggatgtggctggcagggataggagattatcacctgatatgtcacattcacagaagaagctattaatgtcacaaggaaactgtctgtgttgctttaaagagagacagatttttgtagaaaggtctttcctgcaaataacagaaatatataagaagtcccagcttttgatcaaaatgaacccagggatctctcaggtcatctcatacttttcaatcatggcctgatttctatccccatcttaaagaaagcggggatgaggttaagaatggagtcttggcttctaagggcaaggattcttttcctcaatatgatcagaaacattatccatctatcctattagcaaagaaaaaacaaagctttaccatggtctccgacaaagatgacgttgacacaccgatgcagttttagttgtttcagtccatccattaattgccccacaattttgtcgatttccctcagaggatttgtcatctaggaaaaagaagcaagttagtccccacagggttttctttctttccctttcagtctctcatagatcttctacccctagaacattttggaaagaaaacttccggcccagaggcagagctttgtctggggagatttgcctgccattcttaatgaaatctggtctaagcacgttatatttgtattcttttgacagaattaaaacctctcctcatccaatccctttaaagattctttgatataaaaatgtcaaaaatattgttaatgaaaattctttaagagagaaaatcgactttctaatatgtgacagcatcctttaaatccaagagttttgagagtaaacagaaagtccctaagtgaaatcacattagattttgaactatggcaagaagatagacgctaagtgaattcaaagctgttctgaggttaaaatcacaacgttgcactggataataaattagaatatcattaatacaatgagatccatcttgttctaagtaatttaactgttggcatctgaaagcaatagattcttaacagaagaacctattctaagaaacaagttattgcttctcactttagttcttttaaagctgattttgagtgaaacaagaatctataagagtcctaacttaaaaagaagtgaaccatgagtttgttctagaaggtttcttctttaacaaaatatgaaaactcaattcttttctgaagaccatttccaaagcctaaaaaacattacccatatctcattttcttacttcaaatggaagtttctaacagcatgaatgtcctcacatactagaggctctccatccccctttcatctttagctgtgcaatggaaagatttttaagaaacatctgatcagacaaagaatagaaagatacagggagtatatttagatgaattttatagcttagctaacaatcacataaatatacccaagatgattaagataagaacagaaaggatgtgaatatcatttttactcggacacataatattatcttccactagcatcttctcagatgaatcaagacctttcctcctgttatttcattgggaaatcaggtgtaaacttttgtttttttcttcatgacgggagtcagtatttcaagtcctatcccaaggaggaagccacagttgaaagtt

SEQ ID NO: 1883144 - DNA, 4001 bp, Homo sapiens; identical to SEQ ID NO: 587446

SEQ ID NO: 1883145 - DNA, 4001 bp, Homo sapiens
cattttttcatcatttcgccatttttggccttggttatctattacctttctcagagaaaaggaagtaaaatgaaaatggtgtaaggtgcgttcacctcaggccaaaatgcgccttccaaggtgcgctggggccggggtttagcgcagcttcgcgacccgggggaaggctccttggagagcctcctggactccctcgggctacgccgaggtaccgggttatttcccaactgcaaggacaattaattcacgggctgttgatgagattcctcctgacagggcggattgtcgggctccgccaggctctgggaccgggtctctgtccgccgcgccccaggcccgacctctccggggggtaccccccttcgcgtcgccggagctgcctccagcctcgagtccgggaagacgggagaagcggcggcgctttggagaatatttacagttcccaaaccccccacagcccgggctggccgagttcatccacacgaaggataaattcactgctgatcgctttatctttaatcgatagaagaccggggccgccgacaagtcacgaatttccaattccaggccgtggccgggatcgccattcaccggcggcggcggcggcggcgtcgcgcaggggctggaaggacccgggctccaagcgcgcagggccgggaccgggggccgcgagtttccgacgcgcatcgcagacccgccgcgcaccctcgcccccgcgtccgctctccacctgcgaacctacgctgtccgggggctccgccttctcgccggcgcccacctcgcccagctatctctcctccaggcccctccccgggttcccaggtccagcctgctccgaagcctcgggcaccgcacacgccgcgcgctgagggagggccgggcggggagaggcgtccagtccagcccagcccagcccagcccagcccagccccacctgggcgcgcaggcagaggagcccgcgtccgccgccccccagccctccgcgcagggctgtaataattacatcctcattatttctcctgcaatcgttagcgaaggagccggagacagcaacagccgctgccgggggaggcttagttacaaaaccctgcgctgggtagcgcctcgcttagcaaccacccctaaaaaagaccccgagctcctcgctcgcacttggagagccgggcggcggccaccccctcgctgcgcgcaccctccactccgcctggtctcggcagccgctgctgcccggcacaagggccccatcctggtcgcccccgcccccgcgagcccccgtgcgcgcagcccagcccggcacccttcattcattcccagtccccgtcggcgtttccacccgggcttggggggagggggatgcagtctgctgcccgccgcccccactcgctcgcagctgccccaccggagctaggcgcgtagcccctggcgcgccggcaccccccaggctttgccccctccaccccgggcaggcagagcggagaatttcacacctccgcggccccgtgcgctcccgcacccccggagcccagggtcccggcacccccgagcgcggccagggatgcgcggagcccggcgaggagcgcaacgcgcgacccccgagcacaggctgtccctggggtccccagcgctccggccccggcgggcggcacgacccccgctcgcccccgcccccaaccctgacgccctcggggcgtccccgcgggtccgacacaccgcgccctccccgcctcgacggctctcggagccccgcgcccggctcccggcagcccccggcggctcgcaccttcctcagcgcggacatcctcggacgctccgggctcagcaggtgcggggcgacatggcgaagcggcccctcctcagaccgacggctcccggggctcgcgggttggggtcagtacgtccgtccgcggtccgtccgtccgttcgccgccgcaggcgccgcgcgctcagaccgcgctcgagcccggcgcacggtcggtcttcacggccggcgcctgcgcactcggcgcccagggaggcaccggcgcactggggggcggccggcgcgcggctgcatctggggaagggcccggcttggggagcgcgcgggcagcccggctccaactgttgcgcggggcgcgcgggtcacccggggactgtgccgggctcccggcgggaaagcagcggcctccaccgcggcgcgcgcaggcgacgctcaccgcgcccgaaagttagcgggggacccggtcacacccgtcgcccccgggcagggtcagcctttctggaccgctgttagagacgcgccggcgcgtttgtgcgcgggactcgcgctcgggttcgagtcggctcggcgcccaggggggctcgcggggcagaggggacgcggggcgagggaggcgcgggcgcttgcgagggtctcactgcgaggtgcggccgccgcttgggtgctggaggcagaacctcccccggtttccactggcgggctacgctgaggaaggtgtgcggcggcggcttcgcggggacccaccggggggcgccccgagaacctgggtccggacgcaaggagcgccctcggagggggcccgccgcctgggtttgctgtgagtggcgtatggacgacagagccgaggaaaagggaaaatcgatccggagaagtggtgttgacaaccacagcagccgggaagatcagccaccctggccacgtgtggacggaccctcgccaggatcatgggttttcccttccgggatcggaacgcgggagctagacgcgctggtatggggatccctgggcggtcaccgaccctgggcaagtctctcagccccagtttaacataaacgcagaaatggatttctgctttccacctgcatggctacggcatttaaatgaggtaaaagatgcgaaaacaaaccgcatagaaagacggatgggagttagaatgaaatcaggtcatccaaaatatttggaatggacaaaccaatcttttccagaaattccaagatctttaaacaaaaaacaggctctgtaagaattccccgtataattgatcaccaaaatattcatcagttgcagtttattttcaaggcagagtgctaaacgacgagggggtagaaaggtgaatgggagaaagaagtccggccgctgtccatttcttctaaatgtttcccgaatctatcagtggtctccactgtcaaaaaaaaaaaaaaaaaaggtgcattcagcgcccaaacctcaactagggagagattccaggccaatttattttcatttcacaatttactttccctttgctttcctcccctgcatttcgtccccatcccttcacgttttttaaaaatatatatatatattatttcatgcaaccgcaacaagaaaatcacacaaatgtactgacggcctctcctgtgttctcagcgtgtgagcagcacagaaaaccacggttgccgccccatgaagccttcagtctagagagggatccgcccagaagttacccaaggaacagacaattacaagttataattctctgaaggaaacatatggagtgttattggtgaatgtgaaaagggcaacaaatacagtttgtgacatcagaaaagaactttttgaggacgtcgttattaaatctccccctgggttctcccacaagcaggttttgaggtgtggatttgggtgcaggtagttcatttgggagatcgatcccaggaaactagagagaggaagtagggagagagaggcagggcaggagaggacgtcccagaggctgcggtgacgctgggctgctcctgtggccaccggggccccgtcctgctggggtgctctaacaggagcagcttggagtgcacgtcagcttaggaaggctggacagcttttcagcttctaggtcccagtgactgagggctgctcctcacccacacaccccactccccaagttgagcacctcccaaagcttcaaagaaagtccagaggccaaccagcaggggagtgcacggggacctgagagcacattgagggtggcatcagaggtggc

SEQ ID NO: 1883146 - DNA, 4001 bp, Homo sapiens; identical to SEQ ID NO: 587459

SEQ ID NO: 1883147 - DNA, 4001 bp, Homo sapiens
gcagcaggtgaatatccctgttcttcctaaggcttcataatctttttgttgttgttgttccctagatggagacttgctctattgcccaggctggagtgcagtggtgcgatctcggctccctgcaacctctgcctcccgggttcaagtgattctcctgcctcagcctcctgagtagctgggattataggcacgcgccaccacgcccagctaatttttgtatttttggtagagacagggtttcaccatgttggccaggctggtcttgaactgctgacctcgtgatccacctgcctgggcctcccaaaatgctgggattataggtatgagtcacggcgcctggccagcttcatcatctttaaaagcaagtaagtcaaagttaagggcagcaatgtgttaagttactccaacgtaaaagactgagtcgaacaggtagcaggtaactgcacgtcctctctcgccagtgtggagatgaaccaaggcctggtagttcttccctgtcttctgtggtgtctcctcccacactgccaagcccctgcctgctgtggccgcgtacctttggaggagagccaagtagaggaactgttaaaaaaaaaaaaaaaattatgatacccaggcaacactcactccattttcatttcctgcaatacttctgatttttaaactttgcctcctcctgtcttgacttcaacaaattggtaacagtaagggttgcatatgtacacatatgatggcggtaagacttggaaagcatttgtttataataatcaagaggaaaggagaagaaaagtgaataggagacgggagagcaagagaaagaggataggaaaaggaggatccgagtcgggactagtttgggggtggagagatgaagagtgtgctctaggaaacaggttgctatgggtttttaaaggtttgttttgcaaacgttatccttagcccaagctgtcccccgtgggcatcagtcttcagcattttctcagcctccttgctggagcactgggcctgggctccagcagaaagggcgagtggataaggtcggcagctgcgagcctgtctctggggtgcagttcttcttaaggcagccgaccacccaagcgcagggccaggagccagctctacccggcttctccaggtcctgtgtgtttggggttccctggcgaggaaaccctggagtagaagccctgtgttctgggtattaaaaacattaaaaaaaatacgttaagacaaatttgatcgtagctcatactgcagttacaggttttaaaagctggtttctaagttaagcaggtgaccaggtagggtgcttgctcccacccccatcccctgttccattatccaaggggtcttatcctgacttctcaagtgtggaaacacacagtcacgtgttccttgggactgtggaaaacgtgcactttggggctcacaggggctggcttttcagcattgacacggtgttcttctttcctgtcttgttttggtgatcatcccacacgactagattaacctgttgtttttgcaaagccccaggattttcctaagcgtccaagccgcccggccttgtctttgttatgaaatagtcaaagggcttcaaaactgcaggcagttgccgcgcacggcgcccgtccttggaggccttttctctgagaatggagttttagattcagggatttatgacttgactttcccggggccggcgcccctgcggaagcggcggtggctcgggagtcagacccggttcccacgccgccgggagcatcctccccgccatctgcggtcgggtcttctcgacagggcccggcggcctttgcaggacgcgagttggggggctccgaaggcggccggcgcgcccccccgcgcctcccacaatccccggcgcccggccccgcgcccctgacccgggtgtcaccgcggagctgcgggaggcctcggcggtcttcggacgcggtcgggaaagtggcgagcgcgcgcccgcgtccgcgcccccgctcgcgaacgccggcttcggccatttccggcgcggcgcccttcggcaagttccgcagtcgcctgtcggaaatggctgccggccggcagggggagcggcggatcaggcgcggcctggaaggcgggcggccggcagccagaacggcttctgggacgccgactttcgcgcaggcggcggcggcggcggcggcgggtccctgagctggaagccggtaggactgctggccgcgcgtgagcccgaggagcgggggccgcgcccggaagggctcatgggagggtgccggggctggccccgagcgctggggacgcggcgggagggaccgggtccgccgtgccccggggaggctgctgctgcccggcggcgggaggcatgcagcctccgagcggagtaggcctgcccggtggctcgggggcccggggagaggccgccaggccctcggccggcagccgggagggctaacgggtccctgggctggggcaccccctccccgcccccacacgccctctctcgtcccagtttgggctgctcgggacccgcctccacctttttttggacgctcggctgcagctgttgggcttcctctgctccctgaagccctccaccctctgtgacccgcggcgtttctctggctgctggcccggagcatcttctgtcggcggaggcgcagctccggactacccccaccccttcccgagcacaccttcccacatctgccccccgcttctacacgcagtcgcctgctgccctccccgctggctctttttgccgggctcgcctcctttcaggagccacagtcagaggagccgcttcctgtccgagggtccaggtgctgcaggaccctggctcccaggcccagctcccctagagccggcctcgcgctgcacgggctggaccggacaggggtgcgcggggcgtgtgtgcgcggcggagctccgagcccagcgacggggacagcacctattccgagcccctcggaggcgagccagggctgcccggctgctgatgggtgctgctttctcttccccacattgagcgagagcttcggctccttttattaataaaatctgtttggctctcagaagacttaaattttgtggattttgcccctcccccgccacccgcaccaccccacccccgcccttccccgcaacctggatttttcttccctttttaaaaactctaaaagcttcatcaagtcctcttggttcgactcctttggtggaggaggaagcgcagaacaccacaacatgtccattatttcccccatatgtgatttacttaagagtcgtctttagcatttcttgtcactttgtcctattctttgtccaatttaggtagcttcatttttactggcagagctccccgtgctttcttttgtttttaaaggctttgtgtgttgcagccatgcagactctgcagttttctgtattttgttcggcagtgagtcctgcattctgatacagtgactatcgctgtgacctgtgtgctgggatagtaactgcggggcacagagtctggagcgaagcgaagccttctcagcgacttgctatttagcagagggactttgaaatattttgtgatgaaagaaaaaccgttttcttaaactgttatttgatgtgttaaaaataccttatcctgtgggaatttcccattcgtttgcttgtggggagccggaggaatcataagaactcacgagcaagagagaatcgagcctaagtgctttctggaagagtcagaattgtggctcttcagacttccggaaacgtgcttaatgtccagagatgtgaggggcatacctacctaaaaaatgattgacaggcgtatgtctgtatccctccacttctcgcttttctagtgggggaaaaccctgttaatacttggtgtgtagttgggatctttcagtgattaggcctcaagagttttgacctcggagtaaaaagattttaagggaacagtttggagagaagtaagtcgggccaggccgagcatgggaaatgtatttctaggagagagggca

SEQ ID NO: 1883148 - DNA, 4001 bp, Homo sapiens
tctttcaggatatactaaatgctgtcggtaacctgaaaagaatacaagttattgttctgtggaaacattattagcctcaaacaaccttaagcaatgctaatattgtggctggtaggataagttgtaaaggaggcacattaacagtcacggtctctaggattataaagctacagttacaagtatttggtgtcactggaaagaagcctgttaaaaatcgaaagcaatgctctgtggattctgaaaagcagctgccctagtgctacctacacacaggcatacttgtggcttgggataaatgtccaccaacagcatcatacatagaccccgaaactgctgcatcccaaacaacttagaaagaaaaaagatcatctgctcttaacctattaggggatgccaaagggggcaccaagatcaaatacgaagtcggagtgacatgcctgaaatgcgaatgtgaagagggaaagcccacatgctggttaatagattaacaaatctgaaacacctgcaactaatagtacaggtgtctattttatcctctcatctacaatcctaaactttatatatgtaagttggctaaaaaaaagttttctgggatcttcacattggaaggtaaggggtggcctgtttagctaccttatagacaaacatactaaagctataaaaacagtgccatgaaataattttttttaaagtgactaccctaaaaaaaaatcattaaaaaacaagattcctttctcaccggtgatttttggaagcaattcactgatttagaggcagttatcatccggttatgtgagatctaggatttattcactcacggctcttgtattagaatgttaagattctccagcaaaaaatgaagtttatattcttcaaaccttttagaaaaataaaactttcaactgatcctgttgcctcagcctcccaaaagtgctgggattacaagtatgagtcattgcacccagccacaaaaataaaacttttcaacaaatgtaaaccatactgaggtccatgaatatgtgccaagaggaaggtgttgatggtcgagaatttcatcacaaattaatccaactcgttccgaagataaatttgaccacataaaatgaagaggcaagtaggtgtttacgccctgtgacccagtaattgtacttctaggtttcagcaattaaatagaatgacatcattatgatactccattcaacgagttatgcagctatctttaaatggcaaatgttaaaactacatgtaagttctttgtaacgcatagaggactggagaatattttaaaacagctaccatgtgacatggcaaaaattgaaagtgagtcttttccaaaacttttgacaatattgtcttagcactacttttatagtaaaagaaaagaaaaaggtttcaccttccactcctagattgtataagcacaggagaaaataaaaggtatacactagtttttttgtgtgttgttgtttgagatggtctcgctctgtggctcaggctggagtatggtggcgcaagcatagctcattgcagcctcaaactcctggctacaagtgatccctcagcttcagccacgtgagtagcagctacaggtgtgcatcaccacatctggcttaaattatttttgtagagatgagagtcttgctatgttgtccaggctggtcttgaactcctggctttaagcaatcctcctgcctcagcctcctaaagtactgattacaggtgtgagccactgcactgggtcccacactacactgctaacatgttattgattgggtttggaggggaagacaactttattatatatcttttaaattgtctgaactcttaataaacatttttttaaaatgacagaatttaaagcattttctgaacacccttaccataaaatacaatcacaaattggtgatttggcctatgtgaattaaaaaatactaaatatctcccacctaccatagtaagtgtccaaagcactgcagtagctttcactaatccagtctgttctggactccaggccatctatcttgctggcagacttcgggatcgctgtttgtgtagcaacacaaggcacatcccagcaacgccacacacaaacatgtgagcagaaaactaataaccaccggtagcctgtgtaaaacatcagaacaaagccaatctttgtattctttcttttttatttataaataaactatttttgtggttaaacccacttttccttcaaatagctttttgggttatttccaaattaatcataaaaaaccctttctcccaacagaacggaaagcattttacaggaaaacattgatgggctccgggatcccaagatgtgcaccagatactgagtgttcagacagaagggacaactctaattctagtcttggagtacaaagatgtcagtgaataagaatcatccaaagaagctgaagcattcattattttttcactcttatttgagatctcctggaggtgtgtttacagattgggaaagattcaaggaacctgtttggaacaaacccctccaaatgatccgaattaaaggtcattctaggagcctggtagaaatgctggaaggttagggtctaggagacaaaggtcactcgagttgctgcttcttatcttatgaaagggaagaattgcttgttcctttaagataactgagaataaattaatcaaacttaagaactgttttttaaactataaacagtaagcaatcattttaaaactcaattatctacccaaatgttcacagcagcattattcataatagcttaaaaagtgcaaaaaacctaaatgtccctcaatggatgaatggatagagaaaataagaggattactcatacaatggaatattacttagcaataaaaaatgaagtagtgatacatgctaaaacatggatgaaccttgaaaatggactgcttaattaaagaagccactaaaagacaaccacattccacttacataaaatgctcagaacagacaaacccagggacagaagaagtacattagtggttgccgagggtgggaagggcttatataatatgatttctttgtggggtgatgaaatggcctaaaattagattatagtgatggttgcaaaactttttaatacattgaaaaccacagaactataaatgagtgaattttatggtatgtaaactatatctcaaactttcaaaaaaagaattcattactaactttctgattttaaaaaataaaatcttcctgcctctcaagagcagcccaaaagaaaaataacaaaaaaataaaatctacaaacataaaccttattaagtggaggaaaaagctacagtaatgtaactgttaaacaattcaattacctaaaagttctccagttaatagtcaaatagattttaaatccagttatgccttcaaaaaaatccacgctttgacctaacagttcaaaactccaaatgcataacattttgttattaagcatgcaacataaataaacgccttttaatccttgatagctgttatcaaatatatccatgattaatctgtggaactggaagtttcacttcctagtgattttacatgcagtacattccgaggtcgctggaaaaaagttaacctgtacgtgtctatacagtattgcaccagaaatatttttttaaatgaccggattgaaagcattttctgaacacactcattcccttaccataaaatacaatcagaaattgatttggcctaacttcaacttaaaaagttaacctgtatgtatctatacggtaattgcatcagagggtttagagtagcccttctgaaagctcaacccaggaatatcttaaaaaaaaaagatgcaacaagaaagtgctctttagaaaactgcattggtctaaactggtctgactagtgggcctcagctggattcaaataaccagtggcacctggcacttaatgagtgaatctaaagggatgtagcccagaaacctgtgtattagacaatctccctagatgctgatgttgccaggtcagggaatta

SEQ ID NO: 1883149 - DNA, 4001 bp, Homo sapiens
ggttaccctggtagtgcagaatggtaggttgggatggggagtgaagagggagcaggagaagactggagatttgcagaatcttcctacccactcccactctatagcttccatattatttaaaaattttaaagcaaatttataaaatattttagtaaaaacataaatttttttttaagaaaaaggattacttactgctatggtttgaatgtttgtgtcctctgaacctcatgttgagatatgattgatgtggggcctttaggatgtgaataggtcatgggggctctgccctcatgaatggattaatgccattattgctggagcgggttagttattgagaggctgggtttgctatacaagcaagttcagcctaatttcttatctctgtctcacatgctcacttctgccttctgccctccagcatgggctgacccttgcctgatgccagtgccatgttcttggatttcccagcctccagatctgtgagaaataaattcattttctttataaatttttcagtctgtggtattttgttatagcagccgaaaacaaactgagacacgtaccaagaaaaaaagaatgcttacctagatattagatattcccgtttatatggtgttgagagacaggagtgacatattaaggtaaggttggtggctttgggaatacccctagaccaacctcagtggtgtatgttcaccctcttctatttttctaaaggtaatatttctgtgggccatgcaaactcagggtattaaatcctctgggatgctactcgtggtcattatcttttcctaaactccacattttagccttgtacagagtgatgtcattgtagacccagaagttacctacttcctttcttacctgtggttcggcctgtggttgtggcattctgggttgaccaggagatgtgaggctgagagatgctcattgagtgtggcttccctattatcccagcattgcaaagcctaggaaggtctgagcaggacagcactggctgggccagccacacttgtccttcctgccatagtaagcctgctacaagatgttgtgaaatgttaaagatgcaatgtttccacatgcacacttcacacccatgtgagccaggtctttactctctcccttttcgacttagatcttttgttgtgtaagtggtgtgagcttcagctagaatggtctccctgtcttccatagtctcctctctccaaggagaggtgccatatctgaagaggtgctcttgcaaatgatcagtgtatttactctcctcctcactggtaaaacctgggctttactgtgctatttactcaagtctctatgaagcagccctgcttcagagctgcacgttttagactggagttgggtgaatgaatgagaaggctccattccaagggctctgaatcccatccagtttcctgatttttcagtctgtatctctgggtatttcttccttgatccctgggaagcatggtgaatgagattcagaagcctggcatctgtaggtttctccaggttatcatgcagagacatgggcttcctggtgatcatgtgacctgtgggttgtccagggaaggtagctgggaggtggttgggcatgggggtctgaagatccatttgaggtccagtcacatttggagggagctgatgtgaaaggcccagatgaaactgcccaaggagcatctgcagtggcaagagttgagggtggggctgcatcatcaggggagcactatgggcccagaggctactacccctgaactttccaaaggtctaagacaatatcagaagcccttgtggagggattcaagtgatatcatgtatagggtttctatgttcatagctccttgaggtccctgcaaggtctggttctgggatggacctcatctgggattgcctcctccctttggtgtcccactatggacttggcactgcttgtctggtctggcctctatcagtgcctctctccatcctcagccttctgtcatctccaggcaatggtgtcctctgctgtctccaggcaacagtgtccctgtactgccctgccccagcttctcagaacccagcctggttactagaatcgcccctgcatactgccaggaaagggctcactgtcaaggggcaggctcaggaagtattggacacatgattagacctgattttggccaattattttcctcctgattatacgctttccacttttctcctccaccttctctgctacttgtcctgcagtttgctatgtggttacagacaagtttcaatggagaagccagttccaaatgtagaggctaatgaagtctggctgctcatgcaggagagggaaggagcagactgttgaggctgactgttggtttgccattgtcttgcattccctatgcccaccatgttaggcttccaggagtccacactcctggcccaagaactgtcacagtagtagggaaaccatgtgtctaggatgaggtttgtgagcccccaacaggactagttagtggtgactggaatgggggtggagactagaatacagaggactagaaactaggcctaggaggaaaggtagggtgaaaaagaaggcagtagtggaaattgggaccctgatgaatatagtggtggcaaatgcacaggttaaaaccaacagaagacagctgggcagggcaatccttaaggtagggtagtgggcagggatgatgttgacaggtagggacgaaacaaaaagttggatggaacaggagagtagggtgcagcctgagaattgggaaaaaatgagagaaagggctggatgatgagagcaggaaggaatggaaaaaagtgaaggctggggttgagatggagaaattcaagatagctgtcttgacatcttttcacatgagagctctagttactcacttgtccacaggagtcaaaatgtgccccaggcctattcagcatttatctcacacacccactccttgcatcaccccataactgaatgcccattgtgaaactcattatgcccctcccttttgatctagtgaataggctccaccaaccaggaaaacggtcccagtttctaggtttaagagtaatcatgggggctgggtgtagtggctcacgcctgtaatcctagcactttgggaggctgggatgggcagatcacctgaggtcaggagtttgagaccagcctggccaacatggcgaaaccccatctccacaaaaaatataaaaattagccaggtgtggtggcaggtgcctgtaatcccagctactcaggtgactgaggcaggagaattgtttgaacccaggaggcagaggttgcaatcagctgagattgcaccactgcactccagcctaggcgacagaatgagactccttaaaaaaaaaaaaaatcatgggaaataaagagaagaaatgggctacagtattagtctctgttcttgggatgtcatgtagttttgcccctcagtaggcaaatgtttatcaaagggctagaaaagagttatgaggttgggccctaggagagcagttctgaagtgggacttgggaaagtgggagaaagtcagtgccccagcctctttaacttaccacattgttcaaagccctttcccatcatttacatcactgcatgaatatatgggattacagaagggatatatatattacgttcattttaccaatgaggacactgaagaccagagagggaactaccataggcaggtagtagatgacaaagcaggtgggactagaatttggggcaaaaggaggggcaggtaggagggagcacaaaatggctcaaagcacctagcagcagcattacctccgcctatgtctctgggctgggtcctgtagggaggaagtgcttaagagcagaactgtactttttgaagcttatcccttggtcctggtggtccattggtttgatgcattactcttaaccggaaccagaaacgtagagccaaagctggtagaataactgcccactcctgagtgcctgaagactagatttgggcttccttgatcactacctgagctgc

SEQ ID NO: 1883150 - DNA, 4001 bp, Homo sapiens; identical to SEQ ID NO: 587472

SEQ ID NO: 1883151 - DNA, 4001 bp, Homo sapiens
ccaaagtgaagggcagaaacatatattggcctttatctgaaaaccatttccaagtctccctgtgctggaacccacttcagcctcctgcatcacacactctgcccttctccgtgctgtgagcccagcaaggatctagagtgcaaattccaatgtgcctcctcaggaagaaaactcaggccagctgaccacttctgcatgccgaccaaggtagaaaagtcacctcttccgggcttcccccacattacaggaaccccaggcctgggaaaccatcccagacgtcagccctggctcagtcttggctgttggcctcagccagtcacctggcggtggcaatcaaaatgacgccttctttttatttttcccccagtgcaatcttccaagaatgggagagtctcaaagtcagagtttaagccctttttcacaagggagtcagtattttcacaagatggtcttcctcagagaggggaggagtccatccaacccagatagcaaaattgctccctggagatcctggatggatgttacagggcaaggaagccaaaatgtggaagcacaccgactcacctctcaaaattcaccacccactcgttcatctcacaattatctatggggtgcttcccacgtgcttcaacgcaccctttctaggtgctggggatgcagaaattcaaggtgactggcaatgacactttctatcactgcgccccctgcaggccaggaaatctacgctcgttttctcaaggccccactcgcagcagcccatttcacagacgggaccctaagactcagagagggtaagcgacttgcccaaggtcacacagctagtaagcggcagggccaggaattaaacatagctgcaaagtgcatgtgacactcccccgcagccccagctctatccctccgcacccctccacctcttgcagcagggtgggtagcaaaggcacactccaagtagctccagcatggtaagacctcgattcctccttcgttccactcctgacacaggacacacgtttcaaaggacacacaggtttttcccaaccccagtgtgtgtgtacacagccccaggaaagccctgcaggctgcaagggcacccacccgctaacactgaacttccatttaaaaagaaagataatgaaaagataaaaggcgaagaggaagtgctctttaaacacaggcgggtggctaccccaggaggaagtcttgaggccagtggagattttgttcaccccctctagttcctcaaatccaatgcgactggtcttccaagcccctgatgggaggtggccgggggccagcgctgctcccggggtcagtccccgcaccgacacccggctcgcaggaagggtctgccagggaccagccaccccgacccgagcgccccctgcctcgaggcgcacaaggcgccggctccgcagctgggtggacccgggcggcggccccgctgcgcgctcccctcgcgtccgcccgccgccccccgcgcactcgaggcgcctcccccgggacccccgcgcccgccggcccggacgcccccaccacggcggcgccccctgtccacccgccgcagcgcccggcccggcggcccggatggtacctccgcctctccccgcacccatcacgcgcgcgccccgcaccccgcgccctctccgggggcaaatcggatccaggggcgcgcgcgcgggccggccgggcggcggcgccttcagagccccggcacgtacctggcggcccgggcgggcgaggggagcgcggcgcgggagcgcaggagcctcggagcctccggtgccgccgccgccgccgtttccgggttggcggggctcacgtcaccgccacaggtttgcgagctgcccccgccgcggcggcagcagcagcagcagcagcagcccgggcgagtgccaggcgagaaataactataaaaggaagaggcgcggcgaggaggaagaggaagcgctgtttaccttcgagaagccgagccgccggcgctcgcacaaaaggaggacgctcgcctcgcgacgcgcctccccccgcgcccagtccccgccgcatcgcggggccccggcgtcagcgcgcgccgcgccccgggaccgccccgcgccggcccccaccccagaaccccgcgcccgcctggcccgtgtcctcccgagccggggcgccacgggcccgggacggtggtgaccttgggcaagtcaccgcggggcgcgctgcgattgggggtcatcgccctcattgtgcgaggaggaaacccggctccgagaggcgcaagagtgacccccaaggtcactgcctgtcaggcagggcttgggctcgaaccccggtctccagaccttcaggccggccaggttcccatccctgggtcgcttccccctcacctggacttcaggaatggtgacagcccctgcctggctcacctcgcagcggggtcagtgagaggaatgctgtccacgcacccattcagccctcccgcagatacttactgggcctactaagtgcccgggctgttctaggccctggagctgcagctgcgaaccaaaacaaaatccctgcccgggaggggcagcggggacaggccgtaaatatctgatgggtcctatggtgctaagtgctgtgccagaggaaaaataaagcggggtgaggggacggtgcgggctgtcggtgctaccctaagcggttctccaaggactttaaatttagtacagaaattcccacataaaaagctcctcgccataattccagtttcaggtattatgggagacctcatctttcccctgatctagaatggaaaatactgtgtttttctccctgtaacaggacatgcctaggaaactgatactctccttccctctgccttgctcccctggcccagaagcccatcctatcattatcttgacattcaaccagaaatttctcgggaagatagacaacattctctcaagtatctttctgctgtcctctagcagggtatcaaaagggttacatcaaaggcttccattgtctttccacctccacctccagctataggggggttggagtgtgctcacatcatactcagtgctgagttacctgattaggagccagttgttccatttcttttcttttttctttcttttttttttttttgtctaagacaggattttgctctgtttcccaggctaggtagcgcagtgatgcgatagctcactgcagcctcaaattcctgggctcaagcgatcctcccacctcagcctcccgagttgctgggaccacgggtatgcaccaccatgctcagctaatttttatagatttttgtagaggtgggtctccctgtgttgccctggctggcctgtttctcctgggctcaagggatcctccctgcctccgcctcccaaagtgtggggattacaggcataaaccaccacacccagcccgccaattctttaacaaaggtgccttgcgccttctcttggccaggcccagttctcggagctggggaccctgagatggtgccatttcagcagtactccctggactgctctctaagcttacccgagcgccagtgccttcattcctaaaggaagggaactaatgtccaccttgctgtgggggctgagaagtaggtggggaaacactgggtcctgaactatgaccttgaggagaagcaggaaaagggtttggaagcaggcagagctgagccgcttataaaatgagcattaacaattctgaacatttataaagtactaagcaggtgccaagtgtgtgcaggcccatgaagcaggtttatcatggcccagtgtcatgcattaagatactgcagctggaagagagatgagatttgcccaagatcacacagattagacagcggtggagctgggtatgtacctagattgtctgactccagagcccaagcacttagccactctcagcctcagtttgttcatctgtgaaatggaatggataataatgacttcgttaggttatggtgagggttaaatgaaatagcgaatatatagaacctaatatggatagga

SEQ ID NO: 1883152 - DNA, 4001 bp, Homo sapiens
ttttcttctcgttctagatgttcatccttgctttttgggacttgaagtaaccctacacagccaaatatttatgcctattatccacttatggaaaacttatatgtcccaagtccatagggttagtattattatcagtattaaaaccattagtactagtatcatgatgatcattattcctgttaatatccatcaatatttttattactgccattgttaatatggatttttcatcattgtacagcaatgaatatagtttatccattcacaaatggtgttcagttactaaagatgactgcaaggcatgtgctacagacatatacacacacagctatcctggagacccaggtttgccaccaattgctctttcgtaagttgagatcccccagtacccaccagtttttcaggactcaacctgagctggctcagctagacccggaaaagtttcctatgcccaaatgtacttggaaaaattttaaagtctcttcagggcccagtaatagcttttggcagcttctaagatcagggagggtttcttggccattcagagccattcaaatattctaagtaaactcaaggatccagaaaccccacttgcagtcatgaaataccagtgaatagcctctgtgagtctcttcaaggttttcaaagatgactgcctgggaaggctggccaggaagtcacccaagcccaaccttcggcaggatgttctatatcagccagggacccagggaattgccattgaacagaagggaggaacagagacagcacgcctgagcttctggaaacattctaagtgcccttgttggcccagaaaagactggtgctaccatatgaggcacagacttggcaacctacctactccaggaaccacagaaggtttaaaggttcccaggaagtcccaggaagggcagccatggccctttagagccatcagattttattctaagtctacgtgggagacagtgctcttagcttcataaaaacaccagtggaggtgctaacacttgccccagtatccagtcttttctacctcatctcagagccagcagtaactatttcccaaagctgctgtgcaatgaaaggggaatattctaggtgctctcctgtgcccacgaaattctgtggctgtgctgaaaggcaggagatgtcctccggaatgctcttcagaaatctgacaacactggtcaagattaaagacgctcaattcaacgtcatacaaaaccaatccccccaccccccacaaaaaaaaaatgcatagtgagacaaaatgatgaacacacctgctaataatcataaatgacaataataacaacaatgatgatcttagtgataatgccaccaacactgttaatggcaataacaataaacctgaggtaatgagtgttagggtcccgattcaccgatgtgaaggatggcgacaatttctggcctcacagaaataaaggaaaagtaaacacctggaggaggaggaggtgaacctggagctcccgccggcctctgggcgctccttggtggaaggagagggacttggtcctgagcctgccccggatccacctacaccagaatcccagagtcccagtccctggatgggctcagtcccacccaggccagacgccccggagccccgcagcccgggtcctccagccctcgctgccgccgcttctcgcggagccggggccgcccccgcgccacctcagcctctgcgtggctctgggagggcagcgccggaggatgctccgggcccagcggggtcatccgggcccagcgggggtatccagcctcaggctgatactgacgccctgagggcgcggaatagggcggcctgcgcagggcccgccgtctcgggccttgcaaaaagagcggcctctccaacgcccctaccggaacctccccggaggccccagccccaaagccagggcgatggcgcctccctgacaatgggtgaagaaaactcaggtcctccctggagacccggcccgccgcgggaggcagaccgcgcatgcgccctgcatggccggaaaggtgggtttcattgccctctgccggccatgaggtggcagcacaggacgtttggtcttagcggtggacctgagtctgaatcactgaaattcaggtgtggattattcagtactttcttttggaagatcaaatggaaattgagtacgatatcttgtgctttaattaaagaagatggaaataaagaagcaaattcaaaaatcagtatacaaaagtcgattgattccctctatgtggagggaagacgagcttgaataagagaagcattctgtgttacgctttaataatggctggagatctgccaccatgcatttgtcaaatcccatagaatttcacagcacaaatagtacatcttaatgtggctcaggagtacatataatgtcagccacagtttgtgggtaaattacatatttaattaaatagattaaacaataaataatgatatgagctctgcctggacacagtccttgcctctccaaccagtttgccaagggcttgaatttcttgctcattatcctcacacttgacataaaccctggctgcagagtaaaatcaatcactcgtggagattttttaatatgatgatgtgtcaatttcaaccatggataaggccatttagccttagtaaggccgatcgtattaagattctgcctgtttgacaaaatttcaagtcatcccacttgatattcaggaaacattttctcttgagttttaggttcagtggtgaggctccttcacggacaatacattttccaattctgaggacaaggcagaggagggcccctctgtgagaactttcattttgcttcgggaaaagtacattgaatcaaatatagaaaaggcttgcaaggtggctgacaggttcggctgttttatcatgctggtgttttatcttctggactgcagtaaaaggagcacagctgtgtctgtctctgtgtaataactcaggactcacctgaataaaatgtggggtgtcatgagatgaactgctacttccagttagagaggctccagggacaaaatttcaagagccttctgagggatagaagagaagagctgccttattctctgatcccaggtaactgctcagagacagaggcaagagctggggacacccaaatgcatatactaggggtctttgatacagcctccatttccctgctaaatctatgcaatgacaaactgagaaatctagcaagtggggctgaagatccctggtgtgtcaactcgagggttggatggaaacaagtggttttggtggacgttgaagtaaagggaggtgagctgtgaggaaagagctgttgaagactggggagactcagaagttggggtagaatctccaccaagaatctcacccaaggagttcagatgcaaatcagtttgttagggctgcataaatgaaacaagggcttcaccaacatactaagttttttcaacaacagattgtattctttcaatatttgtaagtattgctcttttggaaaagtttaatgagatttcttatataattctgcattcaatttattccttggtcactttgctattatgcatttacatgccacatttttatgaatagatattttctcaaatttctgaattattttgctaaagtatgtgttaagagttttttctagaggtccaccttcttgactcacttttctgatgagaaatctatcaggtttctccacagtgattttcaagtttgatagctcctcaacgtgagaaacttaatgtcaactaagaaatgaattaccactaaagaattttcttctttcaagatgctaaccctgttttgtccagtgtgaaatctcacatgtgccacatgtgttgctctatgaagaaaggatttctcatgatttttcattgcataacttctccagtaagaagtatttggtattccaagagaattcattgcccttggaaagactttcccttgttatttagcttatgaaggctttcctctcttattttccattttagcagca

SEQ ID NO: 1883153 - DNA, 4001 bp, Homo sapiens
gattgtttttcttctcgttctagatgttcatccttgctttttgggacttgaaataaccctacacagccaaatatttatgcctattatccacttatggaaaacttatatgtcccaagtccatagggttagtattattatcactattaaaaccattagtactagtatcatgatgatcattattcctgttaatatccatcaatatttttactactgccattgttaatatggatttttcattattgtacagcaatgaatatagtttatccattcacaaatggtgttcagttaccaaagatgactacaaggcatgttctacagacatatacacacacagctgtcctggagacccagctttgccaccaattgctctttcataagatgagatcccccagtacccaccagtttttcaggactcgacctgagctggctcagctagacctggaaaagtttcctatgcccaaatgtacttggaaaaattttaaagtctcttcagaggcccagtaatagcttttggcagcttctaagaccagggagggtttcttggccattcagagccattcaaatattccaagtaaactcaaggatccagaaaccccacttgcagtcatgaaataccagtgaatggcctctgtgagtctcttcaaggttttcaaagatgactgcctgagaaggctggccaggaagtcacccaagcccaaccttctgcaggacgttctatgacagccagggacccagggaattgccattgaacagaagggaggaacagagacggcatgcctgagcttctggaaacattctaagtgcccttgttggcccagaaaagactggtgctaccatatgaggcacagacttggcaacctacctactccaggaaccacagaaggtttaaaggttcccaggaagtcccaggaagggcagccatagccctttagagccatcagattttattctaagtctacttgggagacagtgctcttagcttcataaaaacaccagtggaggtgctaacacttgccccagtatccagtcttttctacctcatctcagagccaggaagccactatttcccaaagctgctgtgcaatgaaaggggaatattctaggtgctctcctgtgcccacgaaattctgtggctgcgctgaaaggcaggagatgtcctccggaatgctcttcagaaatctgacaacactggtcaagattaaagaagctcaattcaacgtcatacaaaaccaatcccaaatatatatatatgcatagtgagacaaaatgatgaacacatctgctaataatcatgaatgacaataataacaacaatgatgatcttagtgataatgccaccaacactgttaatggcaataacaataaacctgaggtaatgagtgttagggtcccgattcaccgatgtgaaggatggcggcaatttctggcctcacagaaataaaggaaaagtaaacacctggaggaggaggaggtgaacctggagctcccgccggcctctgggcgctccttggtggaaggagagggacttggtcctgagcctgccccggatccacctacaccagaatcccagagtcccagtccctggatgggctcagtcccaaccaggccagacgccccggagccccgtagcccgggtcctccagccctcgctgccgccgcttctcgcggagccggggccgcccccgcgccacctcagcctctgcggggctctgggagggcagcgccgaggatgctccggggccagcgggggcatccgggcccagagggggtatccggcctcaggcggatactgacgccctgagggcgcggaatagggcggcctgcgcagggcccgccgtctcggccttgcaaaaacagcggcctcttcaaagcccctaccggaacctccccggaggccccagcctcaaagccagggcgatggcgcttccctgaccatgggtgaagaaaactcaggtcctccctggagacccggcccgccgcgggaggcagaccgcgcatgcgccctgcatggccggaaagatgggtttcattgccctctgtcggccatgaggtggcagcacaggacgtttggccttagcggtggacctgagtctgaatcactgaaattcaggtgtagattattcagtacttttcttttggaagatcaaatggaaattgagtatgataccttgtgctttaattaaagaagatggaaataaagaagcaaattcaaaaatcagtatacaaaagccgattgattccctctatgtggagggaagacgagcttgaataagagaagcattctgtgttacgctttaataatggctggagatctgccaccatgcatttgtcaaatcccatagaatttcacagcacaaatagtacatcttaatgtggttcaggagtacatataatgtcagtcacagtttgtgggtaaattacatatttaattaaatagattaaacaataaataatgatatgagctctgcctggacacagtccttgcctctccaaccagtttgccaagggcttgaatttcttgctcattatcctcacacttgacataaaccctggctgcagagtaaaatcaatcacttgtagagattttaaaatataatgatgtgtcaacttcaaccatggataaggccatttagccttagtaaggccgatcgtattaagattgtgcctgtttggcaaaatttcaagtcatcccacttaatattcaggaaacattttctcttcagttttaggttcagtggtgaggctccttcacggacaatacatttttcaattctgaggacaaggcagaggagggcccctctgtgagaactttcattttgcttcaggaaaagtacattgaatcaaatataggaaaggcttgcaaggtggctgacaggttcggctgttttatcatgctggtgttttatcttctggactgcagtaaaaggagcacagctgtgtctgtctctgtgtaataactcaggacttaccagaataaaatgtggggtgttatgagatgaactgctacttccagttagagaggctccagggacaaaatttcaagagtcttctgagggatagaagagaagagctgccttattctctgatcccagttaactgcctagagacagaggaaagggctgcggacacccaaatgcatatacaaggtgtctttgatacagcctccatttccctgctaaatctatgcaatgacacactgagaaatctagcaagtggggctgaagatccctggtgtgtcaactcgagggttggatggaaacaagtggttttagtggacgttgaagtaaagggaggtgagctgtgaggaaagagctgttgaagactggggagactcagaagttggggtagaatctcgaccaagaatctcacccaaggagtgcaggtgcaaatccatttgttagggccgcataaatgaaacaagggctttgccaacatactaagttttttcaacaacagattgtattctttcaatatttgtaagtattgatcttttggaaaagtttaatgagatttcttatataattctgcacgcaatttattccctggtcactttgctattatgcatttacatgccacatttttatgaatagatattttctcaaatttctgaattattttgctaaagtatgtgttaagagttttttctaggggtccaacttcttgactcacttttctgatgagaaatctatcaggtttctccacagtgattttcaagtttgatagctcctcaatgtgagaaactcaatgtcaactaagaaatgaattaccactaaagaattttctcctttcaagatgctaaccatgttttgtccagtgagaaatctcacatgtgccacatgtgttgctctatgaagaaaggatttctcatgatttttcattgcataacttctccagtaagaagtatttggtattccaagagaattcattgcccttggaaagattttcccttcttatttagctcatgaaggctttcctctcttattttccattttagcagcatt

SEQ ID NO: 1883154 - DNA, 4001 bp, Homo sapiens
agattgtttttcttctcgttctagatgttcatccttgctttttgggacttgaaataaccctacacagccaaatatttatgcctattatccacttatggaaaacttatatgtcccaagtccatagggttagtattattatcactattaaaaccattagtactagtatcatgatgatcattattcctgttaatatccatcaatatttttattactgccattgttaatatggatttttcattattgtacagcaatgaatatagtttatccattcacaaatggtgttcagttaccaaagatgactacaaggcatgttctacagacatatacacacacagctgtcctggagacccagctttgccaccaattgctctttcataagatgagatcccccagtacccaccagtttttcaggactcgacctgagctggctcagctagacctggaaaagtttcctatgcccaaatgtacttggaaaaattttaaagtctcttcagaggcccagtaatagcttttggcagcttctaagaccagggagggtttcttggccattcagagccattcaaatattccaagtaaactcaaggatccagaaaccccactcgcagtcatgaaataccagtgaatggcctctgtgagtctcttcaaggttttcaaagatgactgcctgagaaggctggccaggaagtcacccaagcccaaccttctgcaggacgttctatgacagccagggacccagggaattgccattgaacagaagggaggaacagagacggcacgcctgagcttctggaaacattctaagtgcccttgttggcccagaaaagactggtgctaccatatgaggcacagacttggcaacctacctactccaggaaccacagaaggtttaaaggttcccaggaagtcccaggaagggcagccatagccctttagagccatcagattttattctaagtctacttgggagacagtgctcttagcttcataaaaacaccagtggtggtgctaacacttgccccagtatccagtcttttctacctcatctcagagccaggcagccactatttcccaaagctgctgtgcaatgaaaggggaatattctaggtgctctcctgtgcccacgaaattctgtggctgcgctgaaaggcaggagatgtcctccggaatgctcttcagaaatctgacaacactggtcaagattaaagaagctcaattcaacgtcatacaaaaccaatcccaaatatatatatgtgcatagtgagacaaaatgatgaacacatctgctaataatcatgaatgacaataataacaacaatgatgatcttagtgataatgccaccaacactgttaatggcaataacaataaacctgaggtaatgagtgttagggtccctattcaccgatgtgaaggatggcgacaatttctggcctcacagaaataaaggaaaagtaaacacctggaggaggaggaggtgaacctggagctcccgccggcctctgggcgctccttggtggaaggagagggacttggtcctgagcctgccccggatccacctacaccagaaccccggagtcccagtccctggatgggctcagtcccacccaggccagacgccccggagccccgcagcccgggtcctccagccctcgctgccgccgcttctcgcggagccagggccgcccccgcgccacctcagcctctgcgtggctctgggagggcagcgccggaggatgctccgggcccagcgggggcatctgggcccagcgggggtatccagcctcaggctgatactgacgccctgagggcgcggaatagggcggcctgcgcaaggcccgccgtctcgggccttgcaaaaagagcggcctctccaacgcccctaccggaacctccccggaggccccagccccaaagccagggcgatggcgcctccctgacaatgggtgaagaaaactcaggtcctccctggagacccggcccgccgcgggaggcagaccgcgcatgcgccctgcatggccggaaaggtgggtttcattgccctctgctggccatgaggtggcagcacaggacgtttggtcttagcggtggacctgagtctgaatcactgaaattcaggtgtggattattcagtactttcttttggaagatcaaatggaaattgagtacgatatcttgtgctttaattaaagaagatggaaataaagaagcaaattcaaaaatcagtatacaaaagtcgattgattccctctatgtggagggaagacgagcttgaataagagaagcattctgtgttacgctttaataatcgctggagatctgccaccatgcatttgtcaaatcccatagaatttcacagcacaaatagtacatcttaatgtggctcaggagtacatataatgtcagccacagtttgtgggtaaattacatatttaattaaatagattaaacaataaataatgatatgagctctgcctggacacagtccttgcctctccaaccagtttgccaagggcttgaatttcttgctcattatcctcacacttgacataaaccctggctgcagagtaaaatcaatcactcgtggagattttttaatatgatgatgtgtcaatttcaaccatggataaggccatttagccttagtaaggccgatcgtattaagattctgcctgtttgacaaaatttcaagtcatcccacttgatattcaggaaacattttctcttgagttttaggttcagtggtgaggctccttcacggacaatacattttccaattctgaggacaaggcagaggagggcccctctgtgagaactttcattttgcttcgggaaaagtacattgaatcaaatatagaaaaggcttgcaaggtggctgacaggttcggctgttttatcatgctggtgttttatcttctggactgcagtaaaaggagcacagctgtgtctgtctctgtgtaataactcaggactcacctgaataaaatgtggggtgtcatgagatgaactgctacttccagttagagaggctccagggacaaaatttcaagagccttctgagggatagaagagaagagctgccttattctctgatcccaggtaactgctcagagacagaggcaagagctggggacacccaaatgcatatactaggggtctttgatacagcctccatttccctgctaaatctatgcaatgacaaactgagaaatctagcaagtggggctgaagatccctggtgtgtcaactcgagggttggatggaaacaagtggttttggtggacgttgaagtaaagggaggtgagctgtgaggaaagagctgttgaagactggggagactcagaagttggggtagaatctccaccaagaatctcacccaaggagttcagatgcaaatcagtttgttagggctgcataaatgaaacaagggcttcaccaacatactaagttttttcaacaacagattgtattctttcaatatttgtaagtattggtcttttggaaaagtttaatgagatttcttatataattctgcattcaatttattccttggtcactttgctattatgcatttacatgccacatttttatgaatagatattttctcaaatttctgaattattttgctaaagtatgtgttaagagttttttctagaggtccaccttcttgactcacttttctgatgagaaatctatcaggtttctccacagtgattttcaagtttgatagctcctcaacgtgagaaacttaatgtcaactaagaaatgaattaccactaaagaattttcttctttcaagatgctaaccctgttttgtccagtgtgaaatctcacatgtgccacatgtgttgctctatgaagaaaggatttctcatgatttttcattgcataacttctccagtaagaagtatttggtattccaagagaattcattgcccttggaaagactttcccttgttatttagcttatgaaggctttcctctcttattttccattttagcagca

SEQ ID NO: 1883155 - DNA, 4001 bp, Homo sapiens
gattgtttttcttctcgttctagatgttcatccttgctttttgggacttgaagtaaccctacacagccaaatatttatgcctattatccacttatggaaaacttatatgtcccaagtccatagggttagtattattatcagtattaaaaccattagtactagtatcatgatgatcattattcctgttaatatccatcaatatttttattactgccattgttaatatggatttttcatcattgtacagcaatgaatatagtttatccattcacaaatggtgttcagttactaaagatgactgcaaggcatgtgctacagacatatacacacacagctatcctggagacccagctttgccaccaattgctctttcgtaagttgagatcccccagtacccaccagtttttcaggactcaacctgagctggctcagctagacccggaaaagtttcctatgcccaaatgtacttggaaaaattttaaagtctcttcagggcccagtaatagcttttggcagcttctaagatcagggagggtttcttggccattcagagccattcaaatattctaagtaaactcaaggatccagaaaccccacttgcagtcatgaaataccagtgaatagcctctgtgagtctcttcaaggttttcaaagatgactgcctgggaaggctggccaggaagtcacccaagcccaaccttcggcaggatgttctatatcagccagggacccagggaattgccattgaacagaagggaggaacagagacagcacgcctgagcttctggaaacattctaagtgcccttgttggcccagaaaagactggtgctaccatatgaggcacagacttggcaacctacctactccaggaaccacagaaggtttaaaggttcccaggaagtcccaggaagggcagccatggccctttagagccatcagattttattctaagtctacgtgggagacagtgctcttagcttcataaaaacaccagtggaggtgctaacacttgccccagtatccagtcttttctacctcatctcagagccaggaagccactatttcccaaagctgctgtgcaatgaaaggggaatattctaggtgctctcctgtgcccacgaaattctgtggctgcgctgaaaggcaggagatgtcctccggaatgctcttcagaaatctgacaacactggtcaagattaaagaagctcaattcaacgtcatacaaaaccaatcccaaatatatatatgtgcatagtgaggcaaaatgatgaacacacctgctaataatcataaatgacaataataacaacaatgatgatcttagtgataatgccaccaacactgttaatggcaataacaataaacctgaggtaatgagtgttagggtcccgattcaccaatgtgaaggatggcgacaatttctggcctcacagaaataaaggaaaagtaaacacctggaggaggaggaggtgaacctggagctcccgccggcctctgggcgctccttggtggaaggagagggacttggtcctgagcctgccccggatccacctacaccagaatcccagagtcccagtccctggatgggctcagtcccgcccaggccagacgccccggagccccgcagcccgggtcctccagccctcgctgccgccgcttctcgcggagccggggccgcccccgcgccacctcagcctctgcggggctctgggagggcagcgccggaggatgctccgggcccagcgggggcatccgggcccagcgggggtatccagcctcaggctgatactgacgccctgagggcgcggaatagggcggcctgcgcagggcccgccgtctcgggccttgcaaaaagagcggcctctccaacgcccctaccggaacctccccggaggccccagccccaaagccagggcgatggcgcctccctgacaatgggtgaagaaaactcaggtcctccctggagacccggcccgccgcgggaggcagaccgcgcatgcgccctgcatggccggaaaggtgggtttcattgccctctgccggccatgaggtggcagcacaggacgtttggtcttagcggtggacctgagtctgaatcactgaaattcaggtgtggattattcagtactttcttttggaagatcaaatggaaattgagtacgatatcttgtgctttaattaaagaagatggaaataaagaagcaaattcaaaaatcagtatacaaaagtcgattgattccctctatgtggagggaagacgagcttgaataagagaagcattctgtgttacgctttaataatggctggagatctgccaccatgcatttgtcaaatcccatagaatttcacagcacaaatagtacatcttaatgtggctcaggagtacatataatgtcagccacagtttgtgggtaaattacatatttaattaaatagattaaacaataaataatgatatgagctctgcctggacacagtccttgcctctccaaccagtttgccaagggcttgaatttcttgctcattatcctcacacttgacataaaccctggctgcagagtaaaatcaatcactcgtggagattttttaatatgatgatgtgtcaatttcaaccatggataaggccatttagccttagtaaggccgatcgtattaagattctgcctgtttgacaaaatttcaagtcatcccacttgatatttaggaaacattttctcttgagttttaggttcagtggtgaggctccttcacggacaatacattttccaattctgaggacaaggcagaggagggcccctctgtgagaactttcattttgcttcgggaaaagtacattgaatcaaatatagaaaaggcttgcaaggtggctgacaggttcggctgttttatcatgctggtgttttatcttctggactgcagtaaaaggagcacagctgtgtctgtctctgtgtaataactcaggactcacctgaataaaatgtggggtgtcatgagatgaactgctacttccagttagagaggctccagggacaaaatttcaagagccttctgagggatagaagagaagagctgccttattctctgatcccaggtaactgctcagagacagaggcaagagctggggacacccaaatgcatatactaggggtctttgatacagcctccatttccctgctaaatctatgcaatgacaaactgagaaatctagcaagtggggctgaagatccctggtgtgtcaactcgagggttggatggaaacaagtggttttggtggacgttgaagtaaagggaggtgagctgtgaggaaagagctgttgaagactggggagactcagaagttggggtagaatctccaccaagaatctcacccaaggagttcagatgcgaatcagtttgttagggctgcataaatgaaacaagggcttcaccaacatactaagttttttcaacaacagattgtattctttcaatatttgtaagtattgctcttttggaaaagtttaatgagatttcttatataattctgcattcaatttattccttggtcactttgctattatgcatttacatgccacatttttatgaatagatattttctcaaatttctgaattattttgctaaagtatgtgttaagagttttttctagaggtccaccttcttgactcacttttctgatgagaaatctatcaggtttctccacagtgattttcaagtttgatagctcctcaatgtgagaaactgaatgtcaactaagaaatgaattaccactaaagaattttcttctttcaagatgctaaccctgttttgtccagtgtgaaatctcacatgtgccacatgtgttgctctatgaagaaaggatttctcatgatttttcattgcataacttctccagtaagaagtatttggtattccaagagaattcattgcccttggaaagactttcccttgttatttagcttatgaaggctttcctctcttattttccattttagcagcatt

SEQ ID NO: 1883156 - DNA, 4001 bp, Homo sapiens
aggagttcgaggccagcctggccaacatggcaaaaccctgtctctactaaaaatacaaaaaattagccagatgtggtggtgggtgcctgtaattccagctacttgggaggctgaggcagtagaattgcttgaacctgggaggcagaggttgcagtgagccgagatccactctagcctaggtgacagagcaagactctgtctcaaacaaataaacaaaaaaaaaaaatatatatatatatatacacatatatacaaaaaaaaaattagctggtgtggtggcacgtgcctgtcatcttggctactagggagggtgaggcaggagaattacttgaacctgggaggtggaagttgtagtgagccaagatgcactccagcctgggcgacagagtgagactgtctcaaaaaaaaacagaaacaaaaacaaaaacagactttaataaggatttaatctttatgacaacactttgaagaaggcatcatcctcctaattgacagaagtggggtgggggatttaggcacagagaggggaggcaactgatccagggtcaccagcttccttgactagggtcaccagctctccaatccctgtgaagctgagggctgggcttgttagcctgatgtgcagcccaggaggaaggctgccacagccggaatacatgcagggccgtctgtgtttactgtcattcctgagagctgtggaggagccagctcctggagggagaacaggacaccaacagtgattttgcccttgacattcaaaggtgacctgcttactagcctttcaggggatcatcttcactgggaccagtctccccttagagttgtttccagtaaaaacaaaaacaaacaaagaaaaaaaaccagaagaggccatttatccctttcttttagccccgctacctgggggcttcagatattttggccccttcttctggttgtatatggttctcccaaactgaagagccctgcttcctccgctgaggctagagggctgaggttgtgcatttcaacactgaagggctggttgagggtctgaccccagcataggtgccatgccagggccatcaagaaaaattgctgagtggccagagtggattggtgtgtgtgctctgagatcagcaggagctaaggaagtgctctggggtcagctgagagggagccaccacttctgcctagcaggtccaggaggtcggtgccattggctggagttgggccttgaaggatgagaattattcagccctggtggggaagaggcaggcaaaattgggcattgggaacaggatggggaacaacagcaagacatcatcctggcttctaattggcctcctgccccgcccccactgccatccatgggttttctctcccaggaacagaaacacaaaccagatcaaaccactttaaaatccttcagtactcgccactgctcctaggaacaacaacaacaacaaaaatctacatccttaccagggcctctatctcagtaggatccccccactcctccactgtgttggagccacactggccgcttcctcagtctttcatgctctttcgagtcgcagggcctttgcacttgctgttcatgccctccgtcggagagctcattcctgctgtctctatcttgcttactctttatcttgtaggtggcagcttccagatcattgcctcagagacctctgatcaccaccccgagccctcttatcctctatggcttcactcccatcatgatttggaattatttatttgtgaacttgattagccgagattgtaaatgacatgaggtcagggactggactgggtatgttttcttctctgttgctttcctggcatgaagtacagtaaatacagcacctgatacattatacatggccacaaatatttgttgaatgaatgaataaaagcacattgggttctgaccattcagtgtcctgaaagaatgcagtttttcaaactgtgcctcaccatccattagcggggtgtgaaatcaatttagtagatgatgtctagcattttttttaaatgacacggaatagaataaaaataatcagaccacgctgaggtaaaggatgttctggaaattattgtgtggttatgtacttgtgggtcatgatgttaaatgtgcttttccaagaatagccaagataaatccgaaaaagaaaaacaagcagggacgacttgccctaccagagttcagaacttgtcatgaaactgcagtaatcaagacaatgtgtcattggaggagggacaaattgacacacagaacagaaagctcaggcacatattcacacaccacagggcatgacagagcagtggggaaaggaggaactggaaaaaataactccccgtatgtaaaatgggattactacccaccatgcacgcatttgtttacaaatcgacttgcaatagttgaaaagaatttgaatgttgaaaataaactaaaactctcagtagatttctttaaaaggaaaacatacacacattaaaaaaaaaaaagcagtgaccataaaagtttgcttaatctgactatattacaattaagaatgttggttcattgaaagacatcttggctgggtgcggtggttcacatctgtaatcccagcaccttgggaggcagaggaaggtggatcacctgaggtcaagagttcaagaccagcctggccaacatggtaaaatcctgtctctactaaaaatacaaaaattagccgagtgtggtggcacgtgcctgtagtcccaactactcgggaggctgaggtgggaggatcacttgaatccaggaggcagaggttgcagtgagctgagatcaagccactgcactccagcctgggggacagaatgagatctgtctcaaaaaaaaaaaaaaaaaaaaaagtaagaaaagaaaagaaaaaaagaaagacatcttaaaggaagtgaaaagtcagttacaaactggaagcagctattcaagatgcacacccctgacagagattagtgctgagactcacaagagcacaagagcacagcagaaaagtgggtgggagacataagcaggcgtttcaccaaagaggcaacatatggttaaaaaaacaaaacaaaaaattagccagcattgttgtaaccccagttacttaggaggctgaggcagaagaagcgcttgaacccaggaggcagaggttgcagtgagccgagatcacgccactgcactccagcctgggcaacaagagtgaaactccaactcaaaaaaaaaaaaaaaaaggacaaaaaaaaattctataattatggaaaaaggaaagcaagggcgttatgatcacaggattcatgatgtgctgagttctagttcaggggtcctgggaaagggatgcaagaagggaccctatggctagatgtggactatcctcaagatgctaccttggccaggtgtggtggctcatgcctgtaatctcagcacttcgggaggccaagcagggaggatcacttgaagccaggagttcaagaccagtctgggcaacatagcaagatcccatctctgcccccaaaaaaatttttttaagagaaaaaatttttaaaaaagatgtgaccttttcttttaggtagtgggttcataagtgcttactatattacttaaaatcaccaattaaatagttaaataagtgaaaatgggtgatgaatagaccaatgagtagagtttggtcatgagccaaagatgattaagtgaatgctacgtacttatgggccaaacaacaatagaaataaaatgtattggccgggcgcagtggctcacgcctgtaatcccaccactttgggaggccgaggcgggtggatcacgaggtcaggagatcaagaccatcctggctaacatggtgaaaccccgtctctactaaaatacaaaaaaattagccgggcatggtggcgggcgcctgtagtcccagctacttgggaggctgaggcaggagaatggcttgaacccaggaggcgagcttgcagtgagccgagatcgcgccactgcactccagcctggacgacag

SEQ ID NO: 1883157 - DNA, 4001 bp, Homo sapiens
agattcaggctcaaggtctgagatgaatgaatgggctctgaaccctcagtcaatcacacctaatcccaactcagaggtcccctaaaagccactcttggaagaagggctctcctcagagggggtgtctctcggtggctacatagaaggtctcacaggtcagtgtctgggtgacagtgctctggaggtcagagggtgcacttaccagcagcagctcttgtcttgggcccagggtggagcgtctgccacttcccagctgcagctttgggtctccccttcttactgtccattctcctggggggtgggtagggaaggaccagggagagggtgctcagagtggcagagggcaggggcagtggcagtggggaacagggcacaccatgggcgcctgagtggatgacagcaggaacatgggctcccctgaggcttcccagctggtgtcctgtctgcctgcccgccccgggtgtgtgcccagaagcttgagccgggatgcctggcaagagcacttggccacctcccgtccccctggccgtggcttgcctgcccctccgccccaggctcagcccatcctgccgggcgcaggatctggagtctagcactcttctccctgccccaagctgctgggttgccagtgggccggtctttgttctcaccgtaatcatgagcatggccctctctgctgaagcctccatgcctctccactgccctgggaagccagcccacccctgagcctgctccccagcccacccaaggcactcacccctccacaccctcagaccttatgtggtcccggctctggcagatggtggtgtcaggccctggagcaacacccctctccctagtccacacagctgacccccaagttcatttccctgggaggctcctcctgcctgccccagcctgtccgggtcctccccggtgccccatgcccctcacccgctgcagcacagttgcctgggcactggtctgaccccccacccatgtttccagcatgctggtaccagtggggtggcactgagtgtttggggaaagaacaaatgaaactgggactgaccctgaaaacagaaaataggatcacatggcaagaggaacaaagagaaaggcgactgatgaccatcagaaagggttgaggcagggccagtccttggggtgggagtggcaggggcgaggggtggtggtttggacagatgatccagtgtagggcagggcctaagagggggaggggccctaagtgagggcctgagggggacctgggggactggagcacccaggggcagctcggggtggtgtgtgggggttgctgtgtacatgggggggcgtctggtatgaggcttggtgtgcacactgggtcccttgtccgttggggcttggtttttgcagagtccctgtgtgtacacagggttccgtatgtgagggaggtcccctgtgctctcagagtcagtgtgaatatggcatcccctgtttgtgtgtggggttggtgtctgagaaatctcatatgcaggtggggttccctaggtgtgcggatgtcagcgtgttcgtgggtgactggcatgggcaggactcggtgtgcttgtggcttctgtcttcctgaggagtctcctgtgcttgggggttggtgtacatgaggcacaggtcattcggggtccgcatgtgcatgggggggtcactgcggcagagtcccctacaagtgtgggcatcggtgtgagggggtgagggagaaagatgggggaccccaggtacttgtgggcatcagtgtgtgtggtgggggttggggtctgggggtcctctgtgtgggcggggtcctcgtctacgtgtggggcgctggtgcggtgggagaccggtgtgtggtgaggggatcccctgtgctctcggggctcccagacccggccccgcccggggctcgacgccgccccaccgtcctcacctgtcgcacctgcctcccccaactcggcgaggaggccagagctccgcccctggcgtcgggctcgctcgtttcctagcgactgagccggaacttccgagtcaccccgacttccggggcgagggtcaggggtcaggctgggaactttgagccttgggtcaacagttgggctcccgggggtcggggtctttgaagtgcgggcctcacggtctccggcggcgctgggccggggtctccgggcgcgcggccgcagggcacgggcgggtcggggcgcgggccgggggcgcgggctggggctggcggcgggcgcggggcgcaggaatgcgggcgcgccgcgggtggggctgccccgcccccaggtgctgcccgggcaggcaggaggcaggagcgacgggcggggcgggggcgggcgcgtgaatcaggccgggcgggccgcggcagggagtggctgccggaccgaccggaccgcgaggccgctgggcggcggtcggctcctgctgcccctgtgccgagaccccgcgcacctggccaggtagggcccccctcccccggcccgagcggggcggggcgaggcggggggcgggcgccccttggcgcggtcccacttgggctacccttgcgcccacacctgggccggggccgcgcgacccagagaggggcggtgggagtggagcgcggccgcgtgcgcggggccggggtggcggggctgctcggacagggggcgccgctgtgcggatatggacgcgagcgcccccgcacgacgccggcccgaaaagagccgagggggaaggggcccgggatccgggtcgagcctgcccggccgtcccgactcgctcccgccctcgcggcctagctggagtctgggtgctgggcacggcctggacccttccctggggacatccgcccgggccgccgtggactggggtggccagggtgcggcctggatccccgcgtggcgagcagggcgagtgatgggagtgctgcccctcgcgcccacgttcctgggctggggtgggcggatagggcacccagcggccgcagccgcgagctcgtagggtgcactgaccccgttgggggctggggtgcccactccgcaagttatcactgagcgacttccggtctgtgagccccgtcctccgcaccccacctttccgccgcctagagcctccgcgccctcctgcgcccatcggaacttggcacaggttcaccccactttgtgtaggaactccagatccttccatggggtcctccttccagatactcaggaaccccacttcctgccagggtggagaggatggggtccttgaaggccagctgagggccctgacttcgagtcagaggtcaggggtcagcaagcagaagagtggattcgtgctgagtcattgcccatgggtgggttccgcgccctccctcccttgggcagacgtttggtaggcaaatgtgtgggcatgcaggccactggggtgctccatcttgggctcgggagtggctgcagccccgtccatagcccaggagacacgtacccatgaaaggagacgacgtgaggaatgaagcagttggaggtctgggcatcaccctgtgaggacgaggcatgtctgctgggagggctcctggccacgggggcttccactgtctggatggtccctgcccccattacacacagcctggagcctggacactgaaatccaaagggacagtgggggtcctttctagagtgtccccccagtgtcgggaagtaccctcaaacaacatcagcagggttgttccccctgccctgtatggtcagacaccgcccctacagacaggctggcaatggtgagtgggctcctcggcccagccagacaggcctacacctcacccccatgtggttggcctcgatctgcccctggcacaaccagagcggtgtgccctaaccagccccatatgtcaaccatgaggacggtgccccaacaaagaaatgttgggacagcttctcccaagccggttggcatctagggctgttgagtggcaccaggtatttcccatgtctcaactccatgtcacccccaggggcaccaggcaggacggctgcctcctgacccca

SEQ ID NO: 1883158 - DNA, 4001 bp, Homo sapiens; identical to SEQ ID NO: 587477

SEQ ID NO: 1883159 - DNA, 4001 bp, Homo sapiens
ccaggaattaccagggcagccatggcaccaaggtttgatgggcttgccatctgagtttaagtggaaatgcagaatgtgcccataccagcctgggttacattgtcctcttacaggggcctcaagcccagcagtgagctttggctcccgagttaggcagactgtctcggctggtatgtgacacatggcaaggcacttcattgcttcagagctccttctatgccataaaaggccctacaaggcctgctgctaatccccctctctggactattctccctcatccctggcccacactgctcactccactccagccacactggctaccttggtgtttttcctcaaccacagctggcttgtttccaccacagggcctttgcatatcctgttccccaaacccttcccatggctggctgcttcaccactcaggccccagttcaaatgccacctctttggggaaggcttccctgattccccgactttggtgactcttctccccagttgctccattcaccattcccctgttttcttggctttaaagccactctcatctggtcttttcttgtttattcatttatttgtttattctctgtctctcccatgcaagcagagcctcatctatcatgggtactgctgatccatggtgcttggctcacagaaggcatttattaaacattttgagactgagtaaaaacactagctaacaccgacatacatttaccatgagccaggcactgatccacaggcttttgtactcaacgctgacaacaaccctaagaggtaggtatcattatatcaaccattttatgaataagaaaacaacagcacagagagatgcagtcacttgcccaaggtcacacagggccaggggttgggccaggattcgaagcaggcaggctgtctcctgggtctgaactctcaactactacaccctaatcaaacaatccctctggtcaaatgtgagtgataataatagtacccacctcgtgggtgttgagggtgagcccaagttagcattcagcgtgggcatgtgaacaattatagtcaatattgaatggagacctatgatgcttttatgaaggtttctattttgggttaaaaatgcataaatttctcctgaccagaaatgatctctgagtgctaaatattttatatcaatggaataacgcaaatgattaagcaacaccccataaaatggggcagacccagggaggaatatatatccaaactgactcatcccagtgagctcactgcacatgaattacaaatggaacggggtgcattaagcccctctgctggcagaagggaggctgctgcctgacatgtgcctgtgctgagaatggcaggtccccagggagaggagaggccagccccttctctatctcttccatcacaggcgtgaaagcctcagcgcatgagctgattctatgtagtgctcgacatacagatgagaacactgaggccctagggacagcctttgacctggtcaccgcgctcaggaggaggtggttacccgcgggcctgagggcgctgactttttagaatgggcgagggcagatgtgtcccagtgaccagaacgattactgcctttaaaaagtcatgaaaatgatcgtgaactgtaccccacaccgagcgcgcgtctgcaccccaagactgtggagacgcccccagcttccgccgccagctcgcggggcaggatgggtgagagcgactctggccaggccccagggacggggaccgggtctcgcggccctgaccagggagagcccaggaactcacgtggcaggagcgccgggggtttcagcacggagacccatcccgtctgcccctggactccgcgagccccgcgggcctctccgctcgccccgccgcccacctgccaggggaaggagcgcagtgtgcgcgccactaggaagcggctctcaaaaccctgcagcaagagtttggtacccgcgttctcctcgggcgtcatgatgtgggcggggccgcagcgttgccaggagatcgggcggaagccgggcctggattgaaaagggagcgggcccagggtagtgcgcgggggcagagagggggcggggcctgggggcagggtcaggaggagcgtcctgggggcggactctagggcggggccaagatgagcttataggagggcggggcctggggtggggccaggatgagcgtcatgagggcgaggcctggggtagggccaggataagcgtcgttggggcaggtgctgggtagagtccaggttggcgggtcctggggcggggtcagcatagggcgatcctggaagctggtcttcggaagcgtccaggttggtcgcgtcctggaggcgctgccttgcgtgggggcaggataagagtcctggaggcgggcattagggcggggataaacgccattgggttcaggaggcgggactcggagcagagcccaggagacaggtcctagggcggggctaaggccagacccagagaagggctcaggaggcggggccggggcagggcgttgactatgtcgtaccacatggccaggcggtgcgcggactctgggaggcggaacttaggacgggcccacttggggaggggtccagggtccgggaggcggggccgagtccgggctgcaggctgcgctcaggaggcgggccctgggaggcggagcttagggaggggccggtgtcgggagggacccagggactgggaggccggtcggggctgggctcaggggccgagacctagctgggcttggggcggggccgagacggagcgaggggtccagggcgtgggaaacggggaggggtttgaggaggggatcggaatgtggctcaagttcgggaggcgttacctgcggagggtttgaggcaggtccaggagcgagcccacggtccgccgacgcgggaccaggggcgggccccaggatccggagcttcgggcggggccgagtccgggtttggggcccggaaggcggggccagttagggcgagggtccctgggatcgtcaggtcaggccttgggctaacgtaggcactctcgcagttcctccgccttcaggaaagtctttttagcaggggccttacgggttcgcgctttggtcctggaggccttatcctagcctcctctgtatcagcgccaccagtctggggcccgaaaggagggagctttccctctgtcccccagcctttggactgtcaccaaacaagccattcgttcaccaaatacttattaagcgcctaccatgtgcctgacaagggagatgtaacggtgagaaaaactaggtgtggtccatgtcctccaggggctcaggggctcgtggaagaagtggacattgaagtatttatcacacaaatgagtataaaagtacaatagcgatatctgccacgaaggtgagcagacagagctagcggggcttgcaggaggagttttgatcttgcagggacaggaaggaggagttagctcctgcggggtgggattgggggtggtggtgatatagacgtggggacagactggaaaacaacaaaaatataattattttagttcaaagttattgtgtcttgagttgaaaggcaggacagttagcaacacagttcagatttcagtactgcccctgaaatctgaactgtgtacaaagtctaaaacgtttaccgtagcaaattcctcataaaactccatttggaagagtcccgagagctaatttgttaagtatacttgcagaaggtagatgaggagacagataaaatcttattacctctttcagatgagaggcacttgagccctgctcagctatgagaataagagagggggaattaattctaattgaatacacttgttctcttatagctgttgttccccaccagaaccaaatgagcgcaagatctgacaaagaaaaaaagaagttcatcttttattcccccaaaccctttcatttaaatcaagagggtgggatgtggttattgctgtgtttttaggcagaatcaacggtttctgggtctgagaagttgcatacacactctc

SEQ ID NO: 1883160 - DNA, 4001 bp, Homo sapiens
gcggcttctgcctggaggctgcagatgggagcacagagggcagtcagtcattccattgccacgtcctaaaatccagtcctgacttcttaatcccaagccccgttctcagattcaaggccccgtcttctctggcgttgccattgccatattctagaatgttatttacactaacaacttagggccgaagacgcggatgataataggacccaaggaaaaatcaatgccgagcaggggtgcggggtgcaaggaaggcccatgaggagcctgggctgagtgggttttccgataggagcacacacttcaattctgaggtttctgttagcaaaaaaatcattaagtaagagaacactgagagctatactttcacagctaaaaaaaagttcatttctttagagagagcttccccacagccctaactgctgcagaccgcactccccaccacttccacctctgtaaatcctgcacactcaggtggaccctgtctccgaaccttccccgtggagaaggacgtgtcctcctcactccagtgagagaccaccacgcccgtggccaggcactggggctggcatgaggctgccctgaacaccgggaacagcgtcttgaccagttcaaattaggtcacgattttgcacttcccaaagcaggccttcgctctgtttctccagtcccaagggcttcctgaaacgtgggggcccttctgtcacccaggctcccacttccctgaaactcctccagatgtgactctcgcctggaaaaaggacatcttctcctgttaccttttagcttgttacaaccggagaaactcactcaaaaggctctggacttgtacctgccccctgagaggccagcggggaaggcttgtcccttggccctgaacctctgcagggcctcatctcctccgcagcccttccgctgctctgataagagaaccaccacttagacccggcactccagctcccaggagactgaaacacatgaattcccaatgtcggcttctgaggcctcagcatttcttcctcaatgagcaccgtatgcacatggagagccgtcttcacctcaaatttcagatttgcccgttttacttcctgctcactctgccccagctctgctctcctgcctcagtttcccagagaatgtggaatcccccgagaacacagtcacctccccagcctctggacaccatcacagtcccttcttcctgactccccacagggccgcctcttctgccactactttctcagcacgaagcgggagaaggaggaggcaggcagcttcagacagtgagaaagagagacagacgcgagccgcaagcacctctcgatgcccaagaggggaagctgttctttcctcttttaagtgggagccgctcaccactatctctcctgcaggtcttctggggggccctggccgtgctccctgaggaaactgcagtgaggagggagagagacccagagaggtagagacagagaaagagacagagagagagggaggcagagacagggacggagagagagacacagacaggcagggacagagagagggagagacagggacaaagaaagacagagatgaggacatagagacagagacagggacagagggagacacagagacagggacagagacaagaacagagagggagggggaggcagagacagggacagagagagaccaaaagagaggcagagagagatagagggacagcgagctttgagctcacaccacccactggtgcatatgaaaggtcagagggacacggcgagcccgaggggcggctgcgtttaccaactagaagacaaatctactagtgaatatggaggaaagcatgaatgttcaggcttgcacatacattatgactcagaaattcccattcctagatacttaccctagaaaatctcttgcgaatgttcactgagagacaagtgcaaacgtgtccctatcagcactggttgaactaaacaagcaacatggtggaatcttagaaaggtagaaagaagaacaaagcaagccccagagaacacaataataacattgtaatagatctcagaaatgctaaaatatgtattgtacagatatggaaactattttttaaatgaaggaacactttttttaatgctggagagtggccacatctcccagggaagcaggaacgcagggccgggaaggagccgcagcagcttcagagtccgggggggtttccatagattaagaggaacgggctctccacagggctttatttcatcagtaaatttcaaagcttccatatactattagatatgttccatatttaccacattttcttaataaaaagtaaagattattttcctatcttaatatcaccaataccttaaattgaggtaacattctcctgagcccagtgcgctgtccagtcactgagtgatgataggaagcagttttccccagcagctacggaggccccagtgagggcaggcaggagggcatgtccagggtccctgacaaccaagtcggtgctcttctgatcagaagcctgtgggatctttgcggtcttccagcagctgctactgcacagaagttatccaagggccaccccaggactcaccagcctcctttgggaggtgtagatctccagaaaatttagacttggagtctgatcttcatcagcaaccagaccaccgatgctgggacccacatgggactgggactttacacccagagagtcaccaagttccaaggacatcacctggtttactttgcaaaattgaacttggatccatccaaaggtggtttatagagcacagatcccctggattcatccagttggccatggtctcttgaaccccaatatctcagtggctgagcaaagcaaggccgtatctgttgcccacatggcacactgatgactacagtcaccacacgtcttctcgtgccagggcctgggctccaggagcagttcccatccggaaggtgccattcttgcatagagcgagcaagagtcagtcacaaaacggattttaactggtttgctgagctttggcacatatgtgtctgtgcacgtcatatggtgagagcaagtccgtggccagctgaccatcacaggggcagaacgtgatggtccccgcaagggacacgttggggaggtgggcccttccccgatggaaaccaagtagttggatttaataacacaactatcgcatcctcacaccccaactctcttctcttagtgtttggactaactttaaatttttcaaaaaatttttaattaaaaaaaatttctttgagatagggtctcactatgttgtccaggctggtttggaactcttgagttgacacagtcctcccacctccactgggactatgggtgcatgccaccgtgcccagctgatttaactttgatcatgcatgagacccactggtgctgggaaccttccatagaatggacacctgtaggattccatggaatacaaacctggcagcagggttctaaccacctggactcaaatccagcaccagcacttgccagttgagactgatctttcacaactaagaccaactgtactcaggaacttggcgaaagaggcagttgtgattgtactaagggaccagtgggtttccttacacgtgaacgttcagcttttccacttccagcttttcctgtctttgtctgccgagctcctggggctcttgctggcactgtcctccctttagactgtactgtcttcatttgttgctcccaagatgttcagacacgcagctggcttccctctgaaagatcttattaaataaacacctttctcccctacagtgcagccctgggaggttttgtcaggacgttgagctaattggcaggttgtgtttccgtggggggagatgcaacatttaagaggattacacgaggtttgtttaagtctcttgtatatacggctcaaataagccgttgtatttgctttagacttcacaagaggcttctcgcgtgtttaagcagatgatagtccaataggtagcttcagctgccagctgct

SEQ ID NO: 1883161 - DNA, 4001 bp, Homo sapiens
gattctccggggcccccagctcacctccctggatggcgctttcggggatctggaagggacccagtctcggtttcttggggaagttcaggcaagcctgaatcggagcctgggcaggtctcttggctcccggcccgaagctgagattggagcctaggcccaagctgtgtgtggcggctggcgggcagggctgtgaggtcaccgcaggacgtttgtcttgtgcctggggtctggcggcctggagcaggccgtgggttttggaggcagcctggggaacttctcggcagccaccctcagggctgctgtgtgtcggcttcaccacgaggagaggctcggggccctggtgcctgaatgcaggctgagggatgtcggccgcagcccctgtctgtctttcctttggtccaagacttgaggaggagctcaggctggcttttctgaggggagacagtgaagccaagacggagcccctgccagacatttcggtagctgagcgatcagcgaggacagggtccacgcgcggcctcttactggttgtgtggaccggcattggcccgcttgcaacctgaaagagaggaaacaacacaggttagaagttccacggcatggagccaacgtgaaaatcaaacatatccaaagacaaggtgcacacgccatgaaattcttagtacagtatcgacaggcggtccttggaagtagggacagatccctccacctgagtgctgatcaggacaagacacatgaaaggtgcgctctcgagctatgtgtagctgatctaagcacaccattgttcaaaagatcgcgtcttgggcattaactggatcaaagcgcctccactcagccttccatgaagtggaacggactaatgcccttcccgaggcaggttggtggctcaagggtactcgggacgtcttctctgaacacatgcatgttcctgggtttagccttctccacgtttggggcctctgagggactaatttcctcatgccgctaggaacgtgttgttggcaggcttgccataattggacagaaagaaagcaacaggaaatacggcatgttcagatgccttcgcctggaatccaattgacctggaaggattgtggagtccctgaccccaagaaggcaagaaagaggggttccccgatttcctcccacagacgggaagctgaaaggaaatcaaccagggtgacctagaggagaaaaggaccaggggcccggggtgacactcaccctcagatgctcagaagattccgtggatccttttccattcggcagcggcttctctggaggtttcccggaaaacatgtggaggagagccttcctctgcgggtcttgttgcctgcagaacagaaaaaggtcaggcggtgccccctggttttccccaggagacagggagaaccccgtctggggcccagccccattccgtgttttgtgatacagaaatggacatctggtgccctttccgcctctgcaccttccctcacgtgccaaccttcccatcctccaggtggccctctaggcttcccgactaaggactgtgatttggattccatcgcttttcccgctgtcgtggggaacctgcacgaagcgcccccgcctctccccgtccctgaatctcccagagcccaaggagctcctgggtgtggaaccccggaggacacggagctccggcctatttctctgcagcgctccttccctggcccggagacggaaaggcacacggtgtgcaggtgcagagacaccatctccttaggaggcagcaccctaagagtggtgaaaacccctcccactgctcaccttggtctctcttccttctctcccttatccttgttcaagggccccgggttggcttcaccccggggcttccatggtttcaggttttccttcccttcctttttccccaaggtcgctggaaccagggctgccttccagcacttcatggggcacgtggtacttctggccgtgtggccaaaggccccgcagtttttgcacttgagctgtgggtggaaaggaagtgatgtcagtgagtgagctgaagccacaggcagcgatcccacgtcaacattgggacggattgtgaattcagagctgaataaggattccaaagaggggacaccggcatgggggccgttaagtgctgggagagttcggatacgatgttccctcgcaaagcccttgtgacggaggaactctgaaaggaaggactcaaggttccaaggggcacgatggtgaagccgatgtcaacaacgcagccaaacgtggctacacaggactcgaagtagaaagggaggttgcccccaagagtctctcaagggacctatcgggccggggagaaggtcccaagccacgcccaccttggatgggaaaagcaacctggctggtggtgacagaactctttggaatccaacccagtctctgaggaccgtgggacaccgcctccccccgtccccacccccaccccgatacccaagagatccagggctagacttaccctgggatcttcttcatcgggcgggggagcccttggcccaactggggccctccgctgcttctggagggtctgggctctcaccagtctcttggcccaagatttggggtcccgacgtgccatcatcttcgtctcctgggggttttatgaccgcctttttcaggggtggactgttgggccacctgaaacacacacaaacacacacatgtcgatggttaagcacgttggatattcacacacccacaggaagccacctgctaactccctgcctgtgtggtcatgaggagacctcaccaccagtcggtcaaatctgtagaacacaatgtgctgtgcgcatcctcggatattgtgtgttcctctgccatgactacctagtccaagagtaaaccccacctgccacagggcccgtggcctaggtatggggggttgagctttcaaccccaaacaaacaactgattctggagactggacttaggtctctcacgattcactccggtagaagacacggtgattctatctcccttgacggacagaatgatcgaagacacagggcatggcgtgtgccaccctttggcaggtctgcttgaagtcacggataagggatgcttcctgtgacaacttgaatcgctactcttgccatttcattaggcaacttccaagcacaaattcatacagagaagttaccttcctctctaccgcactagcaggtgaggatctttcctgttctatcttttagctttagctccagcccctctttatttattttcctggtattttacgcacaccacacgaattcatctgaacaaacggggaagaagtgccgtatcgtatcgacgtcttacacggctgaagggcaaaccccccttttttccaaagtcttttttccatttacccaccaattcagcatgctgcagtacatttcttttcccattcccatcttggtcttctcccacacgtggagacggatatgttgtctcgttttctgttccaagaattactagtaacgagaacacatcctaccccaccagcaagccccagtgtgatcggtttctttcggcctcctttgtctcttcctcccccacaccccccgcaaatacccctcagggattgcgtgaaacaaacaattgttcagcgaaactaacctgaaattacacgtctactttcattcccaggctggcgctgagatgggcaggtgctgcagcagcccggctggaagcgatgcagcatccaggacgacggaggaaggggcagagagggacctccgctttccaggctgccttttatactgcctctggtcacctgacatggaacgtaccctaacctaatcagttacctgtaccttaattgcaattaacttaatccaattacatgacctggaaaggtctatctgcacagcccactctaagatcatgtccactgctgacagacattctaaaacctacttgtacagctgcaagctttgaacaatagatgttccccgtcagacatgtaacactggtgcctgtacccctgtcttctt

SEQ ID NO: 1883162 - DNA, 4001 bp, Homo sapiens
ggcttgcaacctgaaagagaggaaacaacacaggttagaagttcctcagcatggagccaacgtgaaaatcaagcacatccaaagacaaggtgcacacgccatgaaattcttagtacagtatcgacaggcggtccttggaagtagagacagaccctccacctgagtgctgatcaggacaagacacatgaacgatgcgctctcgagctatgtgtagctgatctaagcacaccattgttcaaaagatcgcgtcttgggcattaactggatcaaagcgcctccactcagccttccatgaagtggaacagactaatgcccttccgaaggcaggttggtggctcaagggtactcaggacgtcttctctgaacacatgcatgttccagagtttagccttctccatgtttggggcctctgagggacaaatttcctcatgccgctaggaacatgttgttggcaggcttgccataattggacagaaagaaagcaacaggaaatacggcatcttcagatgccttcgcctggaatcaaattgacctggaaggatcgtgaagtccctgaccccaagaaggcaagaaagaggggttccccgattccctcccgcagacgggaagctgaaaggaaatcaaccagggtgacctagaggacaaaaagaccaggggcccagggtgacactcaccctcagaaaaacagaagattccgtggatccttttcgatttggcagcagcttctctggaggtttcccggaaaatatgtggaggagagcctttctctgcgggtcttgttgcctgcagaacagaaaaaggtcaggccatggcccctcgttttccccaggagacagggagaaccctgtctggggctcagtcccattccgtgttttgtgatacagaaatggacatctggtgccctttccgcctctgcaccttccctcacgtgccaaccttcccatcctccaggtggccctctaggcttcctaactaaggactgtgatttggattccatcgcttttccccctgtcgtggggaatctgcacgaagcacccccgcctctccccgtccctgaatctcccagagccaaaggaactcctgggtgtggaaccccggaggacacggagctccggcctatttctctgcagcgttccttccctggcccggagacggaaaggcacacggtgtgcaggtgcagagacaccatgtccttaggaggcagtaccctaagagtggtgaaaacccctcccactgctcaccttggtctctcttccttctctcccttatccttgttcaagggccccgggttggcttcaacctggggcttccatggtttcaggttttccttcccttcctttttccccaaggtcggtggaaccagggctgccttccagcacttcatggggcacctggtacttctgaccgtgtggccaagggccctgcagtttttgtacttgagctgtgggtggaaaggaagtgatgtcagtgagtgagctgaagccacaggcagcgatcccacgtcaacattgggacggattgtgaattcagagctgaataaggattccaaagaggggacaccagcatgggggccattaagtgctgggagagttcggatgcgatgttccctcccaaagcccatgtgacagaggaactctaaaaggcaggactcaaggttctaaggggcacgatggtgaacccgatgtcaacagcacagccaaacgtggctacacaggactctaaacagaaagggaggttgcccccaagagtctctcaaggggcctatcgggccgcggaggaggtcccaagccacgcccaccttggatgggaaaagcaacctgggtggtggtgacagaactctttggaatccaacccagtctctgaggaccgtgtgacagcccctccccccgtccccacccccaccccgatacccaagagatccagggctagacttaccctgggattttcttcatcgggcgggggagcccttggcccaactggggccctccgctgcttctggagggtctgggctctcaccagtctctttgccccaggtttggggtcacgacgtgccgtcatcttcgtctcctgggggttttgtgaccgcctttttcaggggttgactgttgggccacctgaaacacacacaaacacacacatgtggatggttaagcacgttggatattcacacacccacaggaagccccccgctaactccttgccggtgtggtcatgaggagacctcaccaccagtcggtcaaatctgtggaacacaatgtgctgtgcgcatcctcagatattgtgtgttcctctgccatgattacctagtccaagagtaaacttcgcctgccacagggcctgtggcctaggtatggggagttgagctttcaactccaaactaacaactgattctggagactggacttaggtctattacgattcactccggtagaagacacgatgattctatctcccttgacggacagaatgatcgaagccacagggcatggcatttgtcaccctttggcaggtctgtttgaaatctgggataagggatgcttcctgtcacaacttgaatcgctactcttgccatttcattaggcgacttccaaacacaaattcatagagagaagttatcttcctctctaccacactagcaggtgatggtctttcctgttctatctttttggctttagctccagcccctctttatttatttttctggtattttacacgtgccacacgaattcatctaaacaaacggtgaataagtgccatatcgtatcgacgtcttacaccgctgaagggcaaaccacccttttttccaaagtcctttttccatttacccaccaattcagcatgctgcagtacatttcttttcacattcccatcttggtcttctcccacacgtggagacggaaatgctttctcgttttctgttccaagaattactagtaacgagaacacatcctaccccatcagcaaggcccagtgtgatcggtttctctcggcgtcctttgtctcttcccacccacccctcagggactgcgtgaaaaaaacaactgtacagtgaaactaacctgaaattacacgtctactttctttccccggctggcgctgagatgggcaggtgctgcagcagcccggctggaagcgatgcagcatccaggacgacggaggaaggggcagagagggacctctgctttccaggctgccttttatactgcctctggtcacctgacgtggaacgtaccctaacctaatcagttacatgtaagttaattgcaattaacttaatccaattacatgacccggaaaggtctatctgcacagcccactctaagatcatgtccactgctgacagacattctaaaacctacgtgtacagctgcaagctttgaagaatagatgttccccgtcagacatgtaacactggtgcctgtacccctgtctttttttccatcttttttgtttttgtgttttgttttgttttaaaaaatgtggtaaaatagacaccttttaattggaccatatttactctacctcgacgtaggcctcagtgtcttcaaggagattctccttgacatgcagtcatggccatgatccatcttcagagtttctctttcttccccacggtaggtctgtcagcagagaaccctgaccacaccctcatgtgttttctcctccaggaggcgcttggaaaccaccgtcaattggaccgcactgggaaacacagatgaacaaagtcaacaccgctttgtcctgcagtgcctggctcctttttcagctcgtcttgcgactccaggtattggagtccagggaggggtacgtcgcctttaccctgtgcttgccacgatcttgtctccttaatcctcactgcagttctctgccatagagtcttatactgctttacatgtgggaaactgaggctcagagagtttcacagcagggcagggagcccagatgtgaatctgtagataccaaactttctaatttttcagtagtttccaagcatcttttat

SEQ ID NO: 1883163 - DNA, 4001 bp, Homo sapiens
ggacaccagcatgggggccattaagtgctgggagagttcggatgcgatgttccctcccaaagcccatgtgacggaggaactctaaaaggcaggactcaaggttctaaggggcacgatggtgaacccgatgtcaacagcacagccaaacgtggctacacaggactctaaatagaaagggaggttgcccccaagagtctctcaaggggcctatcgggccgcggaggaggtcccaagccacgcccaccttggatgggaaaagcaacctgggtggtggtgacagaactctttggaatccaacccagtctctgaggaccgtgtgatagcccctccccccgtccccacccccaccccgatacccaagagatccagggctagacttaccctgggatcttcttcatcgggcgggggagcccttggcccaactggggccctccgctgcttctggagggtctgggctctcaccagtctctttgccccaggtttggggtcacgacgtgccgtcatcttcgtctcctgggggttttgtgaccgcctttttcaggggttgactgttgggtcacctgaaacacacacaaacacacacatgtggatggttaagcacgttggatattcacacacccacaggaagccccccgctaactccttgccggtgtggtcatgaggagacctcaccaccagtcggtcaaatctgtggaacacaatgtgctgtgtgcatcctcagatattgtgtgttcctctgccatgattacctagtccaagagtaaacttcgcctgccacagggcctgtggcctaggtatggggagttgagctttcaactccaaactaacaactgattctggagactggacttaggtctattacgattcactccggtagaagacacgatgattctatctcccttgacggacagaatgatcgaagccacagggcatggcatttgtcaccctttggcaggtctgtttgaaatctgggataagggatgcttcctgtcacaacttgaatcgctactcttgccatttcattaggcgacttccaaacacaaattcatagagagaagttatcttcctctctaccacactagcaggtgatggtctttcctgttctatctttttggctttagctccagcccctctttatttatttttctggtattttacacgtgccacacgaattcatctaaacaaacggtgaataagtgccatatcgtatcgacgtcttacaccgctgaagggcaaaccacccttttttccaaagtcctttttccatttacccaccaattcagcatgctgcagtacatttcttttcacattcccatcttggtcttctcccacacgtggagacggaaatgctttctcgttttctgttccaagaattactagtaacgagaacacatcctaccccatcagcaaggcccagtgtgatcggtttctctcggcgtcctttgtctcttcccacccacccctcagggattgcgtgaaaaaaacaactgtacagtgaaactaacctgaaattacacgtctactttctttcaccggctggcgctgagatgggcaggtgctggagcagcccccctggaagtgatgcagcatccaggaagacggaggaaggggcggagaaggacctctgctttccaggctgccttttatactgcctctggtcacctgacgtggaacgtaccctaacctaatcagttacatgtaagttaattgcaattaacttaatccaattacatgtcccggaaaggtctatctgcacagcccactctaagatcatgtccactgctgacagacgttctaaaacctacgtgtacagctgcaagctttgaagaatagatgttccccgtcagacatgtaacactggtgcctgtacccttgtctttttttccatcttttttgtttttgtgttttgttttgttttaaaaaatgtggtaaaatagacaccttttaattggaccatatttactctacctcgacgtaggcctcagtgtcttcaaggagattctccttgacatgcagtcatggccatgatccatcttcagagtttctctttcttccccacggtaggtctgtcagcagagaaccctgaccacaccctcatgtgttttctcctccaggaggcgcttggaaaccaccgtcaattggaccgcactgggaaacacagatgaacaaagtcaacaccgctttgtccttcagtgcctggctcctttttcagctcgtcttgcgactctaggtattggagtccagggaggggtacgtcgcctttaccctgtgcttgccacgatcttgtctccttaatcctcactgcagttctctgccatagagtcttatactgctttacatgtgggaaactgaggctcagagagtttcacagcagggcagggagcccagatgtgaatctgtagataccaaactttctaatttttcagtagtttccaagcatcttttatttttcttgtttcttcgttggtgtctttttttttttttttttttttgagacaaaatctctgtgcccaggctgaggtgcagtggtgtgatctcagctcactgcaacctcgacgtctcacattcaacaattctcatgcctcaacctcccgagtggctgggactacaggtgcccaccacacccaacttatttttgtatttttagtagaaacacggttttgccatgttggccaggctggtcttgaactcctgacctcaggtgatccacccgccttggcctcccaatatgctggaattattgatatgagccattgggcccggtcatgtcattggtgccttaaccaagcctcttttaatttttcaaacggaagagcccctgtccctcagttacggctgctgagccctttcaaggtgagtcagtgaggagggagaaaagcggaagtggtgtgggaagaggcggggtctgggccagctgctggtcctgctctcctccctcctttggcctctaggctcccaggagtggtttcgaacctgcgccgtgtgctctggaggctgtggcaaggcaggcgcggcttggaacccgcaccatgtgctctgggggctgtggcaaggcaggggcagcttggaacctgcgccatgtgctctgggggctgtgccagggcagggggagtcctcgtgtcccctgcgcacaacacagacagaaggctgggtccacccagtgggcggtcgggtgccaggccagtgcttaccccgccatgtttgcagcccgaggccagctggctgcaggtgcaggactaggcgtcaggggtcagggtgcacacatccctgcaggtctcggggctcctgggttgcttctggaagggcacagatggggcctgactggagctgccgaggggtggagcttctggggaaaggatccctcctagggggagtgtcttgggcctggggccacgtggcagggacagagacgggtccatggcagtgtctgctcttctctgtgaaggcaaaaggcctctgagggagtattacagccgcctcatccaccagaagcatttccagcagatccaggtctgcaccccctgactgcagggccaaggactacccccgcttctaggtgagaggccagcaggaggctcagggaggaggcggggccttaagcagggggagcaggggtgggcatgatgtactttttctgaaaaggtggctctggaggccacttggggacaggacatgggctctggctgaactcccgggaggaggctacttcctggtgtgccagcccctccctgccaggtcgccccagaggccctttaccaaggggtttgaggaggccacgtcctttcagtctgccacgccctccattcagtcctcttccttcctgcaggagggctgggcctgggtttggggccactgttgcccaggtgtgggagggcagtggctttgggaggaacagggacgatgtgtcaaacagcgtcgcctctcccagtgagatggttctcctttgcctgcatctctttccccgttgatttctccaagtggggagtcgtggcttggtcctg

SEQ ID NO: 1883164 - DNA, 4001 bp, Homo sapiens
attctccggggcccgcagctcacctccctggatggcgctttcggggatctggaagggacccagtctcggtttcttggggaagttcaggcaagcctgaatcggagcctgggcaggtctcttggctcctggcccgaagctgagattggagcctaggcccaagctgtgtgtggcggctggcgggcagggctgtgaggtcaccgcaggacgtttgtcttgtgcctggggtctgacggcctggagcaggccgtgggttttggaggcagcctggggaacttctcggcagccaccctcagggctgctgtgtgtcggcttcaccacgaggagaggctcggggccctggtgcctgaatgcaggctgagggatgtcggccgcagcccctgtctgtctttcctttggtccaagacttgaggaggagctcaggctggcttttctgaggggagacagtgaagccaagacggagcccctgccagacatttcggtagctgagcgatcagcgaggacagggtccacgcgcggcctcttactggttgtgtggaccggcattggcccgcttgcaacctgaaagagaggaaacaacacaggttagaagttccacggcatggagccaacgtgaaaatcaaacatatccaaagacaaggtgcacacgccatgaaattcttagtacagtatcgacaggcggtccttggaagtagggacagatccctccacctgagtgctgatcaggacaagacacatgaaaggtgcgctctcgagctatgtgtagctgatctaagcacaccattgttcaaaagatcgcgtcttgggcattaactggatcaaagcgcctccactcagccttccatgaagtggaacggactaatgcccttcccgaggcaggttggtggctcaagggtactcgggacgtcttctctgaacacatgcatgttcctgggtttagccttctccacgtttggggcctctgagggactaatttcctcatgccgctaggaacgtgttgttggcaggcttgccataattggacagaaagaaagccacaggaaatacggcatcttcagatgccttcgcctggaatccaattgacctggaaggattgtggagtccctgaccccaagaaggcaagaaagaggggttccccgatttcctcccgcagacgggaagctgaaaggaaatcaaccagggtgacctagaggagaaaaggaccaggggcccggggtgacactcaccctcagatgctcggaagattccgtggatccttttccattcggcagcggcttctctggaggtttcccggaaaacatgtggaggagagcgttcctctgcgggtcttgttgcctgcagaacagaaaaaggtcaggcggtgccccctggttttccccaggagacagggagaaccccgtctggggcccagccccattccgtgttttgtgatacagaaatggacatctggtgccctttccgcctctgcaccttccctcacgtgccaaccttcccatcctccaggtggccctctaggcttcccgactaaggactgtgatttggattccatcgcttttcccgctgtcgtggggaacctgcacgaagcgcccccgcctctccccgtccctgaatctcccagagcccaaggagctcctgggtgtggaaccccggaggacacggagctccggcctatttctctgcagcgctccttccctggcccggagacggaaaggcacacggtgtgcaggtgcagagacaccatctccttaggaggcagcaccctaagagtggtgaaaacccctcccactgctcaccttggtctctcttccttctctcccttatccttgttcaagggccccgggttggcttcagcccggggcttccatggtttcaggttttccttcccttcctttttccccaaggtcgctggaaccagggctgccttccagcacttcatggggcacctggtacttctggccgtgtggccaaaggccccgcagtttttgcacttgagctgtgggtggaaaggaagtgatgtcagtgagtgagctgaagccacaggcagcgatcccacgtcaacattgggacggattgtgaattcagagctgaataaggattccgaagaggggacaccggcatgggggccgttaagtgctgggagagttcggatacgatgttccctcgcaaagcccttgtgacggagtaactctgaaaggaaggactcaaggttccaaggggcacgatggtgaagccgatgtcaacaacgcagccaaacgtggctacacaggactcgaagtagaaagggaggttgcccccaagagtctctcaagggacctatcgggccggggagaaggtcccaagccacgcccaccttggatgggaaaagcaacctggctggtggtgacagaactctttggaatccaacccagtctctgaggaccgtgggacaccgcctccccccgttccccacccccaccccgatacccaagagatccagggctagacttaccctgggatcttcttcatcgggcgggggagaccttggcccaactggggccctccgctgcttctggagggtctgggctctcaccagtctcttggcccaagatttggggtcccgacgtgccatcatcttcgtctcctgggggttttatgaccgcctttttcaggggtggactgttgggccacctgaaacacacacaaacacacacatgtcgatggttaagcacgttggatattcacacacccacaggaagccacctgctaactccctgcctgtgtggtcatgaggagacctcaccaccagtcggtcaaatctgtagaacacaatgtgctgtgcgcatcctcggatattgtgtgttcctctgccatgactacctagtccaagagtaaaccccacctgccacagggcccgtggcctaggtatggggggttgagctttcaaccccaaacaaacaactgattctggagactggacttaggtctctcacgattcactccggtagaagacacggtgattctatctcccttgacggacagaatgatcgaagacacagggcatggcgtgtgccaccctttggcaggtctgcttgaagtcacggataagggatgcttcctgtgataacttgaatcgctactcttgccatttcattaggcaacttccaaacacaaattcatacagagaagttaccttcctctctaccgcactagcaggtgatggtctttcctgttctatcttttggctttagctccagcccctctttatttattttcctggtattttacgcacaccacacgaattcatctgaacaaacggggaagaagtgccgtatcgtatcgacgtcttacacggctgaagggcaaaccccccttttttccaaagtcctttttccatttacccaccaattcagcatgctgcagtacatttcttttcgcattcccatcttggtcttctcccacacgtggagacggatatgttgtctcgttttctgttccaagaattactagtaacgagaacacatcctaccccaccagcaagccccagtgtgatcggtttctttcggcctcctttgtctcttcctccccccgccccccccccgccaaaaccactcagggattgcgtgaaacaaacaattgttcagcgaaactaacctgaaattacacgtctactttctttcccaggctggcgctgagatgggcaggtgctgcagcagcccggctggaagcgatgcagcatccaggacgacggaggaaggggcagagagggacctccgctttccaggctgccttttatactgcctctggtcacctgacatggaacgtaccctaacctaatcagttacctgtaccttaattgcaattaacttaatccaattacatgacctggaaaggtctatctgcacagcccactctaagatcctgtccactgctgacagacattctaaaacctacttgtacagctgcaagctttgaacaatagatgttccccgtcagacatgtaacactggtgcctgtacccgtcttct

SEQ ID NO: 1883165 - DNA, 4001 bp, Homo sapiens
gattctccggggcccccagctcacctccctggatggcgctttcggggatctggaagggacccagtctcggtttcttggggaagttcaggcaagcctgaatcggagcctgggcaggtttcttggctcctggcccgaagctgagattggagcctaggcccaagctgtgtgtggcggctggcgggcagggctgtggggtcaccgcaggacgtttgtcttgtgcctggggtctggaggcctggagcaggccgtgggttttggaggcagcctggggaacttcttggcagccaccctcggggcggctgtgtgtcggcttcacctcgagaagaggctcggggccctggtgcctgactgcaggctgaggcatgtcggccgcagccccagtctgtctttcctttggtccaagacttgaggaggagctcaggctggtttttctgaggggagacagtgaagccaagacggagcccctgccagacatttcagttgcggagcgatcagcgaggacagggtccaagcgcggcctcttactggttgtgtggaccggcattggcccgcttgcaacctgaaagagaggaaacaacacaggttagaagttcctcagcatggagccaacgtgaaaatcaagcacatccaaagacaaggtgcacacgccatgaaattcttagtacagtatcgacaggcggtccttggaagtagggacagaccctccacctgagtgctgatcaggacaagacacatgaaagatgcgctctcgagctatgtgtagctgatctaagcacaccattgttcaaaagatcgcgtcttgggcattaactggatcaaagcgcctccactcagccttccatgaagtggaacggactaatgcccttcccaaggcaggttgctggctcaagggtactcgggacgtcttctctgaacacatgcctgttcctgggtttcgccttctccacgtttggggcctctgagggactaatttcctcatgccgctaggaacgtgttgttggcaggcttgccataattggacagaaagaaagcaacaggaaatacggcatgttcagatgccttcgcctggaatccaattgacctggaaggatcgtggagtccctgaccccaagaaggcaagaaagaggggttccccgatttcctcccgcagacgggaagctgaaaggaaatcaaccagggtgacctagaggagaaaaagaccaggggcccggggtgacactcgccctcagataatcagaagattccgtggatccttttccatttggcagcggcttctctggaggtttcccggaaaacatgtggaggagagccttcctctgcgggtcttgttgcctgcagaacagaagaaggtcaggccgtgccccctggttttccccaggagacagggagaaccccgtctggggcccagccccattccgtgttttgtgatacagaaatggacatctggtgccctttccgcctctgcaccttccctcacgtgccaaccttcccatcctccaggtggccctctaggcttcccaactaaggactgtgatttggattccatcgcttttcccgctgtcgtggggaacctgcacgaagcgcccccgcctctccccgtccctgaatctcccagagcccaaggagctcctgggtgtggaaccccggaggacacggagctccggcctatttctctgcagcgttccttccctggcccggagacggaaaggcacacggtgtgcaggtgcagagacaccatgtccttaggaggccgtaccctaagagtggtgaaaacccctcccactgctcaccttggtctctcttccttctctcccttatccttgttcaagggccccgggttggcttcagcccggggcttccatggtttcaggttttccttcccttcctttttccccaaggtcgctggaaccagggctgccttccagcacttcatggggcacctggtacttctggccgtgtggccaaaggccccgcagtttttgcacttgagctgtgggtggaaaggaagtgatgtcagtgagtgagctgaagccacaggcagcgatcccacgtcaacattgggacggattgtgaattcagagctgaataaggattccaaagaggggacaccggcatgggggccgttaagtgctgggagacttcggatacgatgttccctcgcaaagcccatgtgacggaggaactctgaaaggaaggactcaaggttccaaggggcacgatggtgaagccgatgtcaacaacgcagccaaacgtggctacacaggactctaagtagaaagggaggttgcccccaagagtctctcaagggacctatcgggccggggagaaggtcccaagccacgcccaccttggatgggaaaagcaacctggctggtggtgacagaactctttggaatccaacccagtctctgaggaccgtgggacacccccttccccccgtccccacccccaccccgatacccaagagatccagggctagacttaccctgggatcttcttcatcgggcgggggagcccttggcccaactcgggccctccgctgcttctggagggtctgggctctcaccagtctcttggcccaagatttggggtcccgacgtgccatcatcttcgtctcctgggggttttatgaccgcctttttcaggggtggactgttgggccacctgaaacacacacaaacacacacatgtcgatggttaagcacgttggatattcacacacccacaggaagccacctgctaactccctgcctgtgtggtcacgaggagacctcaccaccagtcggtcaaatctgtagaacacaatgtgctgtgcgcatcctcggatattgtgtgttcctctgccatgactacctagtccaagagtaaaccccacctgccacagggcccgtggcctaggtatggggggttgagctttcaaccccaaacaaacaactgattctggagactggacttaggtctctcacgattcactccggtagaagacacggtgattctatctcccttgacggacagaatgatcgaagacacagggcatggcgtgtgccaccctttggcaggtctgcttgaagtcacggataagggatgcttcctgtgacaacttgaatcgctactcttgccatttcattaggcaacttccaaacacaaattcatacagagaagttaccttcctctctaccgcactagcaggtgatggtctttcctgttctatcttttggctttagctccagcccctctttatttattttcctggtattttacgcacaccacacgaattcatctgaacaaacggggaagaagtgccgtatcgtatcgacgtcttacacggctgaagggcaaaacccccttttttccaaagtcctttttccatttacccaccaattcagcatgctgcagtacatttcttttcgcattcccatcttggtcttctcccacacgtggagacggatatgttttctcgttttctgttccaagaattactagtaacgagaacacatcctaccccaccagcaagccccagtgtgatcggtttctttcggcctcctttgtctcttcctccccccgccccccccccgccaaaaccactcagggattgcgtgaaacaaacaattgttcagcgaaactaacctgaaattacacgtctactttctttcccaggctggcgctgagatgggcaggtgctgcagcagcccggctggaagcgatgcagcatccaggacgacggaggaaggggcagagagggacctccgctttccaggctgccttttatactgcctctggtcacctgacatggaacgtaccctaacctaatcagttacctgtaccttaattgcaattaacttaatccaattacatgacctggaaaggtctatctgcacagcccactctaagatcatgtccactgctgacagacattctaaaacctacttgtacagctgcaagctttgaacaatagatgttccccgtcagacatgtaacactggtgcctgtacccctgtctt

SEQ ID NO: 1883166 - DNA, 4001 bp, Homo sapiens; identical to SEQ ID NO: 587480

SEQ ID NO: 1883167 - DNA, 4001 bp, Homo sapiens; identical to SEQ ID NO: 587486

SEQ ID NO: 1883168 - DNA, 4001 bp, Homo sapiens
acagggtatttgtacccttaatttaactaagtagcgttattcaagttagtccacaagagcttctgtataccactccccaagtctgcacaaaaacagacacactgaacacagtggctttgggggagtccgtgaaatgggagtgggtaaagaagtaaaaagggataagtgaatataaaaaccaagaggcgccctgcaaggggcagtgatcagaaagtaccatggaccaaggactgtgatgaactcaactcttacttgaggtttccccactgaaccctgagctgccccaacctgaggcctcctatcccagcacagtgtgctcactcctgtcctttacccctgtgttccttgccagcattctcacaggacacttatccctgaccccctgcctgtgatgtgggtgcttgtcttatcttctgccttctcccaggagctctccaggggcagggactgtcttgttaccacagaatcctcagagatcaagactgtacacagtaggtgctcagaatgaccctggctggctgaatggaaaatgagtcaatggatgacttgagacatatattgtgtttactgaagtgaaaactatgtggagcagcccctttcacacacacaggcacacacccacacatgcccacatgcacacacatgcacacactcatgcctgtataaacaggagaattactggggagtaaaatttgatattttagaaagagaagaggattttagaatcagaaataaaatcgatgctccggcatgggttaattgtgcaaacttttgaaagtcttttaacctggttgtgggccatttttcctcatctatgaagtggagagcatgctatttcgcatggttttagtgaagaataagacacataacctggtgaaagcaccaaggaagatggctgggttcaaagtaccccataaatatcacctcttccctttcttcaggacttccattcctgtctcagaggagggtggatgtggctggtggtctccttttgtctgtctgtggatacatagatggacatcacacacagacacacatgtgcacacactgttcttgaaaagcccactaacacctgcccccttccatgatttgtccacagaacagcatgtttttcagctgagggctcacatgtaccaagcccggggcctcatcgcagctgacagcaatggactttcagacccttttgccaaagtcacgttcctttctcactgccagacaacaaaggtaaccagggtaaccaagacagcctgcttctttcctgcagcctgcaactgacccacagaagatcccaggaaagaaacaacgggggcatgttgcaaatacctgcatctttgggtgtgtagatgtttcagactgaaaagcgaatatgtgcccagaaggactggtgtggggaaggtctattgtttcagtgtgattcattgtcctagggcaaaggatgcaagtccctgaggcgaaggaaggctgggagaaaaagaggaatgaggcggagaaggctaaagtgccaggcacgaggccaagtgcagtggggaaggagcaaatgaggaaacagcacagatcaacctgcaggaggtttatgatccaatcattatgaaggggtctcagtggggagaaacattttccagttttgtggtcaagatgcgctagactttgcactcaccagctggggagcttcgcatgcttttaacatctttatgcttcacagtccccctcctctggaaaatactacttcataatggatattgtgagtattaagggagatgggttgtcttaatccatttagcattgcttataacagaatacctgaaactgggtaatttctaaagaaaaggaaattattttttacagttatggaggctggaggtccaaagttgaggagccgtatctgatgagggccttcttgctggtgggaccctgcaggttccgaggcagcacagggcatcacgtggcaagggggtggagcatgctaatatgctcgctcaggcctctcttcctcttcttctgaagccaccagttcccctcccatgacagcctattaatcatagattaatccatttgtgaaggcagatcctttatgacccaaacacctcttaaaggtcccgcctctcaatactgtgacattagggattaaatttcaacatgagttttggaaaagacaaatatgcaaatcatagtatgggtctgtgcctgtttcctctgtctttctccctatcctatacaactagtactaaaatgtgaaaggattcctaatcagcaaaaatccagtaggatgcttgtctcattagattctgttctttaaacatttattctgttctctgatttgtggtttgaaaagaggaaaactcagtaaagaattgcccatctcagggagttaagcaccatgggttagcacacacagtgccctaaggttactttctagctcatctcctctttggctgcatgtctttgggcaagtaacacaactcactaaacctcaggtttgtcattttaagatgggactgtcatgaagaagcagatatttaagtttataaaatgattgataaatgatggccatgacattggctgatgttgagagggctaacattgttctccagggcaaagcccatgacctcgatgatagagtagactgcattttgatttatgactcgcacactgacagcgtgatgtgaaccagcctcacattcattgaaccagtgcctgtcgggtgctggctttttgccaggccacatgctgggctctggaggatgagaggaaccagactctgctccagtgtaatatacaatccaggcatggatgcaggcctcatgacacacgagtcactacactatgataagcctcagggtgcagggctgtacagagtcctacaagagccaggtagagaaagggttagttctacctgggggagaagtcaggagacacctcagaagaaaggtgacttcatcctcattcagtgactgagcataaaaatgagaagacaacagactgctttctctttcctgtgttttgagagttagtatagagcatggtgatgatgagtatagactctggagctgcgctgtctgggtcaaaatccacgctcttccatttatcagctgtgtgactctaaacaaacctctgtttgtgcctcaatttctttatctgtgaaatagggatgataaccttgtacattccttccagaggataaaatacccaggacagtaccttgcttaaaactaaggcctatgtgactgcttgttgttgttgtaattgaggcttccttcctacagcaagggagttctcataggatggacccctggagccctcctccacctgccacaacactgtggagttccagggccttagtgaagtacaggatttggactaaatccttggtctgctgtgtaattatccttgtattttgtatctccatacagcatcttcatttgatttacatccatatctcaaaggaacagatggcttttatttgtcaaataattatttgaaagggaaaataggttctgttgagttctggactctgtctccataattttaagccaagtacctcatttttgttaataataatagctgctatttactaaaagctccccacgtgctgggcacaatgcttagcattttatatgcatcatttgctacatctcactgcagcccaaagctggatgttattagtgtcttcattctacagatgaggaaggtaaggctcggaagcgatatagctagaagatggtggagccaagatggaaacccaggtttgtccaattccagagtcactttgcttaaccactccacttccattttcataagaaagggtaccaatttccctctcctgtttcacttctgcgctaacacagagggacttgtctgcaggtgacatgccccctttatgtatttttaatgatgaggaaagctgaacctgggcccctgcagtcatagccgagtgccactgttcagctggtagcactcacctgaccacgcggggctcagggagaaaaagcctccgaaggctg

SEQ ID NO: 1883169 - DNA, 4001 bp, Homo sapiens
gcatatacatttgccatcatggcccccaaacctctcaaccccttgtctaccctttggtaatgtttcacattatgagccctgccattcccagaactcacaatcctagattgctttacaggtcattgcacacgtgacttagttcacaccagttagattcacacaagatctgatgaaaaatgaattatctaaggaggtgccctcacgctgggaaagcaagtatattagcagaggtatccacttttgtgggcactgcaatggtggatactcagtctggtcccagtgaggcttgtgtcagggtagtgataatggtgatggtggcagtgccgcagcagctcccatggcacctatcctgactatatcacttcagagctctctgagcttcctcagattgggacctactgaatatctctaaataaatccctttattgcttgaaatagcaagggtttattttgttgtttgcaaaacaaagcctgcccaatgttaactggagctcagaatttcagattacctgaggccaggcgcggtgtctcacacctgtaatcccagcactttgggaggctgaggcaggcggatcacgaggtcaagagttcgagaccagcctggccaacatggtgaaaccccatctctattaaaaaaaaaatacaaaaattagccaggagtggtggcaggcgcctgtaatcacagctactcgggaggctcaggcaggagaatcgcttgaacctgggagatggaggttgcagtgagccaagatcatgccagtgcactccagcctgggcaacagagtgagactccatctcaaaaaaaaaaaaaaaaaaaaaagattcagattcccaaactcagaactcttcccctgccatgctcagggattagctttaaacccacagcttcctttcctccagatgagtaactgaagataaaaaactgaggacacctggaaagagaacttgggactcggggactcagtccaaatggacagccttggatagggtgacacagaggaaaactgaggtcactgcaccccactagggaaagcagagggagaggcaggaagcaaaagaattattagaaaaggagaagagaactcagattactgagtattggattcgtgccaggcacaatattaggcactttataaacagcaagtaaaaaaaaaaaaaaaagtatataagatagacagatattcccagcctttctcacgttcccacttggtaaggaggatttttaactaggtatatatatatttgttttacaaaaatagcatcacactctgccctaagttgtgtctttgagtatgcctgtcatgtctaatgttaagtcatgctgttcttttcacatttctgctggtggcaaggcattctatttgtgtggatgtacagtctgccctccatatctgagggttctgtatctatggaatcaatactggaaaatatttgaaaaaaaaatgcaacaataaaaatacaaattttaaaatatagtgttaacaactatttacatagcatttacattgaattatgtattacaagtaatctagagacgatttaaggtatgggaaactgtgtgtagtaggttatatgcaaatattgtgccattttatataaaggacctgagcatcctcagattttcgcttctgttggggggtcctggcaccaattccctccatgaatagtaagggacagatgactataccataatttaaatgatcctatattggttggcttttatattgtttacagtttctaaccaacataatcactattataaatactatgatataaagacctttacgtatattaatttgctcacttggctgaatacttcttctgtattagtccgttttcacattgctataaagagtaccacctaacactagctaattataaagcaaagaggtttaattgactcacagttccacaggcttaacaggaagcagggtagccggcttcaggaaacttagaatcacagcggaaggtgaaacagaagcgtacacgtctcacgtagcagcaggcaagagcgagctggggaaaccgccatttatagaaccatcagctctcgtgagaattcactcactatcacgagaacagcttgcgggaaccgcccctgtgattcaaccaccttccaacaggtcccttcctggacctggggattataattgggattgcaattcaagatgagatgtaggtgggaacacagaaccaaaccattcaacttccatgggctaaatgccgaattactaaatccaagaattactacaccattactaaggtgcagggtaaaagcccctgagagtaataatttaagcatacaattagaataaacctgtatggcagacgcacctgaatgtgtgtttcaagctagggaatccaggagtggccaacccagagattcattccttgtttatgagaaacatctgagtccccgtcccgtcccgtcccgtcccgttgaacatgggccataaggaaggattgaggccctgagtttgggcggcggggggggggggggggggggggggggggtacctgaaagttgccaggtggaggtcgttaaggggaagctgttaactgaaaatgctatataaactacacgctgtttgcaggccgttgtgtttttcctgcccagcctgccaccactggcctggatataaggtggatatcttgtccagcccggtgccactggactctctcccctgtatgtaagccgctaataaaaccctatgtcttgtttgctgggtttctggcctcttgaacctggtgtcttccctaatgaggttaataaaggttcggcacagcaaaaggtgtcatgtaaatacctttaagggttttggcctgaattgcaaaattgctctcccaaaaggctgtagcactcttctcctacaagtagtatgtaagactctgtttctccatacctcccccaaggctagctattattcttgtaatctttgccaatctgataaaaaaaattgatttgatttttttgtaagactttgattactaattaaggatggacatgttggcttcttgttgagcacttggttatctcggcacacaggaaatttcttttctttttaactcaaacacaggatttgaggttcctgaacacctggtataacagaaaactggttgggcacggtggctctcgtctgtaattccagcactttgggaggctgagaggggaggatcacctgaggtcaggagtttgagacaagcctggccaacatggaaaacccctgtctctactaaaaatacaaaaattagcctggtgtggtggcacacacctgtaatcccagctatttgggaggctgaggcacgagaatcacttgaaccctggaggcagatgttgcagtgagctgagattgcgccattgcactctagcctgggtgacagagagagaatccatctaaagataaataaataaataaataaataacagacaacggctccctctcattctccccagttgattacaggacctagcaatgtcctgtagagtaaattctcctcccagcctgcctaagtgacagcccattactcaagctgagcaggggcccacctctcaatcgtgctgtccaatcccagctcctctttgaaatagcaacttgtctgtaatgggaattttcaatcctggctgcatatcacctggactaaacattttttattctttagtttaaattttttttcttttaagagtacataatatattactcacgttttttaaaaacacagagggagattcagttaaaagtctccctattatctgtggcccccatctgccccattcccctccctataagcaactgatgttactaatttctcatggatccttccagagatataaacagatatttaaaaatgctctttttggggacccacgccagaatttctgaatcaatttctgggatgaagaatctggaaacttgaatttttttgaaaagcccacagtattgttgaattataatcagggtttagagcaacttcttgagtatatcattcatttatgcattcaa

SEQ ID NO: 1883170 - DNA, 4001 bp, Homo sapiens
gatttattcacttaaatatgattaataatgctcctgagtaatgtaagacaagccagtcagaatctggtattagtaagtacagtcagctaatgccagctcaccatcaaatcaagtatcaattaaatgtttactgtgttgatattttgctgtagcctaagggatacaaaaaatagtaatactgagctcttatcctaaaatatgctatgatttagtggagaaaacaagaaaggttttgtacacatattaggaattaactatttgtcaaaaaagcattaatcaatataattcaatataaagtttgatcaatattataccagaagatccttgggcaaatggaactgagagagatttactcctattgaagacactgaagaaaacttcctaaagaactgggccttggaatgtggggtgattttaacacgtacagatgagggagtcaagcagtctctgtaggagacaggaaaatgtatgccactcacagcctaccccttatgttatgggcacactctcttatacagaatagcatgaacaaagacaccaaaatgagaacaagaagaacaagttccaggaatggcaattccagttggagtgctttgagacataataaatttgataaagcttgaatgattacagacaaatggtagtggactatgaatttaagaataagaggtttggcctctgcagtaaagatgcttatataaatacaaataattaagaagaaattgaggaaagaaaacaaattggctgagttcctagccaacctgactgcattaaaattctcaagactttatgaatccccttattcctataaatcctgtactataatcaaatgacaagttcttaaaaatagatttctaaatgcctttctggctttttgtaaagcagcaaagaatattgtggaaagaacacaggtttagggccagtaagacctatgtcccaggtctctcactctaccatacacctatacgtcacagcattattaagaattaaataggccaggcgcggtggctcacgcctgtaatcccagcactttgggaggctcaggctggcagaaaatgaggtcaggagatcgagaccatcctggccaacatggtgaaacctcatctctactaaaaatacaaaaattagctgggcatggtggcacgcacttgtaatcccagctacttgggaggctgaggcaggataatcacttgaacccgggaggcagaggttgcagtgagccaagattgtgccaccgcactccagcctgctgacagagctccgtctcttttttttttttcctttttctttttttttttgagagggagttttgctcttgttgcccaggctggaatgcagctcaccacaacctccgcctccccggttcatgccattctcctgcctcagcctccgagtagctgggattacaggcatgtgcaaccacgcccggctaattttgtatttttagtggaaacggggtttctccatgttggtcagctagtctcgaactcctgacctcaagtgatccgcccacctcggcctctcaaagtgctgggattacaggtgtgagccaccatgcccacctgaaactccatctcaaaaaaaaaaaagaaaagaaataaaacagagctttcagggaggagccaagatggccgaataggaacagctccagtctacagctcccagcgtgagtgacgcagaagaagggtgatttctgcatttccaactgaggtaccaggttcatctcactagggagtgccagacagtgggcgaaggtcagtggctgtgcacaccgtgcaccagccgaagcacggcgaggcattgcctcacttgggaagcgcaaggggtcagggagttccctttccgagtcaaagaaaggggtgacagacggcacctggaaaatcgggtcactcccacccgaatactgcgcttttccgacgggcttaaaaaacggcgcaccacgagagtatatcacgcacctggctcggagggtcctacgcccacggaatctcgctgattgctagcacagcagtctgagatcaaactgcaaggcggcagcgaggcggggggaggggcgcccgccattgcccaggcttgattaggtaaacaaagcagccggaaagctccaactgggtggagcccaccacagctcaaggaggcctgcctgcctctgtaggctccacctctgggggcagggcacagacaaacaaaaagacagcagtaacctctgcagacttaaatgtccctgtctggacagctttgaagagagcagtggttctcccagcatgcagctggagatctgagaacgggcagactgcctcctcaagtgagtccctcacccctcacccccgagcagcctaactgggaggcaccccccagcaggggcacactgacacctcacacagcagggtattccaacagacctgcagctgagggtcctgtctgttagaaggaaaactaacaaacagaaaggacatccacaccaaaaacccatctgtacatcaccatcatcaaagaccaaaagtagataaaaccacaaagatggggaaaaaacagaacagaaaaactggaaactaaaaagcagagcgcctctcctcctccaaaggaacgcagttcctcaccagcaatggaacaaagctggatggagaatgactttgacgacctgagagaaggcttcagacgatcaaattactctgagctatgggaggacattcaaaccaaaggcaaagaagttgaaaactttgaaaaaaatttagaagaatgtataactagaataaccaatacagagaagtgcttaaaggagctgatggagctgaaaaccaaggctcgagaactacgtgaagaatgcagaagcctcaggagccgatgcgatcaactggaagaaagggtatcagcagtggaagatgaaatgaatgaaatgaagcgagaagggaagtttagagaaaaaagaataaaaagaaatgagcaaagcctccaagaaatatgggactatgtgaaaagaccaaatctacgtctgattggtgtacctgaaagtgatggggagaatggaaccaagttggaaaacactctgcaggatattatccaggagaacttctccaatctagcaaggcaggccaacgttcagattcaggaaatacacagaacgccacaaagatactcctcgagaagagcaactccaagacacataattgtcagattcaccaaagttgaaatgaaggaaaaaatgttaagggcagccagagagaaaggtcgggttaccctcaaagggaagcccatcagactaacagcggatatcttggcagaaaccctacaagccagaagagagtgggggccaatattcaacattcttaaagaaaagaattttcaacccagaatttcatatccagccaaactaagcttcataagtgtaggaaaaataaaatcctttacagacaagcaaatgctgagagattttgtcaccaccaggcctgccctaaaagagctcctgaaggaagcactgaacatggaaaggaacaaccgataccagccgctgcaaaatcatgccaaaatgtaaagaccatcaagactaggaagaaactgcatcaactaacgagcaaaataaccagctaacatcataatgacaggatcaaattcacacataacaatattaactttaaatgtaaatgtactaaatgctccaattaaaagatacagactggcaaattggataaagagtcaagacccatcagtgtgctgtattcaggaaacccatctcacgtgcagagacacacatagactcaaaataaaaggatggaggaagatctaccaagcaaatggaaaacaaaaaaaggcaggggttgcaatcctagtctctgatgaaacagactttaaaccaacaaagatcaaaagagacaaagaaggccattacataatggtaaagggatcaattcaacaagaagagctaactatcctaaatatatatgcacccaatacaggagcaccaagattcataaagcaagtcctgagtgacctacaaagagact

SEQ ID NO: 1883171 - DNA, 4001 bp, Homo sapiens
gtttaaatacatgaacttaaacaggtatttaaacagaaatacagaaattagccaggcatggtgacacatgcctgtaatcccagctactcgggaggctgaaacaggagaactgcttgaacccgggaggcggaggttgcagtgagacaagatcatgccactgcactccagcctgggcaacagagcaaggctccatctcaaaaaaaaaaaaaaaagactgggctgtagtcatctgaaggctggactgggacaggagttcccaatcctaggtggttttttcgtatgactgtccattgctggttgctggcaggaggccttagttcctcaccataagagcctctccctagggctattcgagtgtcctcatagtatggtatctggcttcccccagaatgattgatccaagagaaagagcaagaaagaagccacattctgtttaaaagaagcaacttcttaagtctagcccatactgtagaggagaattcagctccatctcttgaagggaggagtatcaaataatgcatggacttattttaaagccaccaaagggaacaaaggaagccagagttcctaaactttctttctccactgtcctgactccccaagtgtgatggatgactatggatccagttattggcaagactaaaattgagattcagacattatcaggaaagatttggaatctaaacacaaaagagcgcaggcaaaactgtgtcacttctgggatggagccctcgagtgaatccagacgtttcctccaaactcagggaaccagcatgaaagagaaagaagaagccagacatacgccctgttagctagcgtctgaggagtttccttaagcaggatgatagaatcgaggagggatgggcaggccctgagaggcaggcagcatcagagaggcccagccacaggggctggcaggggcaagaaagcagtcttggggtctggggcccttgggtgcagagctggatgactcaataggtagctgaaatacggatttggagacccagcccagcaggcatctcccacaaaactgaaaaatgtttggcttcagtgagaactgaactgaaattttacaatctagatatctcaagtgaaatcattttaatctcagcatctatatcagttttgtgttttaagtgttagtatcatttttattttgaattacataatggcagggcagagggaggatggcagaagggtctgtaaagccgaacttaccaactcgtatgtcccagcatcctggtggcctgttcacaggcagggctctcacctgcagccatgtagccactactctgcacaaagcagctagcaggaggggcatgtgggagctgaaagcagtctgtgtcctgaccaccaagcctggcatccagcttgtgaaaatacggcacatttttattattcctagtttctgctagctgatggttctgctaatgagttatagatgagttgagatgtggagctctctagctcttgggaggccaggcaggtgagagaagctggagcccccaggccagattccgcctgctgggagaagctttgcccagagaccaactcaaagaaaataaaaatggatggaggcccaaacccagccataagcaggcagctcaccacacaacaaacagcaataccctaccttgtgcagggttgggcagtgctgtacatcccatcaaggactccttacaggtcctctgcttattgaccccaagtctgggtagtatgggctcccaggctaaccaagggggcataggagcagtgccagaggagagcgaggagatgggcagcctacaccgagagcctgccctcccagaggggtgcactgggaaagctggctcagccagtccctccagagttccagcagctccactctccccaacctggtggcccagccccacaaaggggctatccctgagaccctcctctgaaatgcccctcccttcgaagagctccatccagttggaggggctgtgagctggagtggagcagcataaagatgaaggatatgaggccagatccctcccccactaaatacagcctgaatctgatcgtcacaggttgtgctggacagctttatttgcccacaggattggaagttagaggcccatggactggattacgctaaaggaagtgacatatgcaaatgagtcacatgccaggctgctgcgaccagactgacagctttatcatgcagtaccccgtatctctcagggcctgtttacagaaaggtctggagtcttctcttgtcttttggcaacgatccagcttgctcaggcatgacttctcatggaaattcggtttgactttaaaaatgctccttgtggtggtaacttagcagccaagaccggctctgcgctgaattattgaacggtgcggatgtttgccttcccctgtcacagcccctcttctctgtagctccttttcctgacaagtaattttaaatatgcagcagtgcaagtctctgtgctcacttggcctaatgctaagccagattccagtcgtgcttgaacaactgccaagacacccagggcagcaggccttgctccaggggcctggggactacagatttgggcaagtggatattttgatgacggtgatctccaagctattgttctgaagggatcatatcttaaggtatctaaaaccaaaatcattcgttaacacccagctggctccttcacctgttttctctattttcaccactggtgtcacaatctgttcagctgcccaagcccctgccttggcctcacccttaaccctgcaacatgtgcacagtctccaagttttgtctattgcgcctctaagatattaatcagttacattcaatcctccctatcctcactatccctgacttgttgaagttgatatcatctcccctagactcttaacatgcccttccaatcaagctccccttctccaatcctttggccacaatgatctactcatatccatattattgtccagctttcattggttttattaacttgaggatcaagtctaaactctttagcatgttagtcacagacaggtatcaaatgagcaaaactacaatatccttgatcttaaagcaaggatgagggagagaatcagccaagcaaacaatcattgccccatatttttaatataagttttatcacttgcaattccatgaccttggccaagtcacttaacctataaactgagattatcaacaggaatgacgattaatattagacacaatataatttattctatatattctaaataatctaatttcttataaaatacttctatttcacaccgtactttaaaactggaaaacttatttcactttcaaaatattcaaccatggaaactgcaaagcaattatatgagttcactagtgtctaatatctttattcttaaaaaagaaaatggtcatttttaattagaacaaaaaatcaaagtttaattcccatttttaaaagagcaaaatatttttaattacaactaatttcaaggatctttacgtgttgtacaatcaaagttacttactcttacagattttcacatttgacatgcaaaatgaaaaacttaaattacattatttacctataaaaataataataacggggattaaatgagataacatatataagtaacatagtttccgtatcaggtgtctagaaagtaccagaaatgctcacctctgtaactgttgctgctgttcaaaccctggcttccctcccttccattgtcatctcttgactacctggaatatcctaggcaaccacacccattctcaaatcacgtcctaccaccgcatatgtttgtgtctttgcatagccattcccctacctggaattgcctttatctccttgtctagctagtaaattgctactcattcctaaagggccatctcaaatgttgccctccctggaatgtctctagtgctcccatcttcacattttcatagcttttgcacataactttattgtaacttttgccttgaaatatttattcttggggccgggcgtggcggctgacac

SEQ ID NO: 1883172 - DNA, 4001 bp, Homo sapiens
aacacaactactaaggagaactaatctatgaacttcacaatgtgataaaattaaaaatcaatatttaaaaaccacttttatttctacacattattagaaaaacataattggataataaaatttccaaagcaatgttacttataacatcaaaaccataaaatatttaaaaataaaattaacaaaagatatgaaagacctctacaataaaaaacagagagaaattaaaggaggcctatataaatgcaataatgccatgttcaaagagtagaagattcaataatgttaacacatcgattcttcctgaattaatccatagatgcagtacaatcccaacaggcatgtttttaaagaaattgataaattaattttaaaattgttataaaaaagcaaaagacctagaatagctataactatatttaaaaagaacaaacttgaatgattcacaatgcctgatttccaagttacttttatagttacagcatccagacaatatgatattgagataagacagacagaaaataaattaaacagacccaaatatacacaggcagttaatttttgacaaagatgtaagttaaatgcaatggggaaaggaaaattgtttcaacaaatgttattggaataactggataacatgaatttcaatccttatttgacaccttatacacatattaatttgaaatgcatcatagtcctaaatatgagagcaaaaattataaaacttctagaagaaaacattgtaaaacactttagtaaccctacgtttggcaaagatttctttaaaaagacatgtagtaacataaaattaacataaaatattaacataaaaatagatacatggacctcatcaaaattaaaattcaactggaaaacattacctcaacaaaattagcttaaaaacactccataaaaatataaatggcaagacatagactgggagaaagtattctcaaattatatatctataatcttcacatgtaagtaaagaactcttgcacataattaaccaaaccacaaatgatcaattacaaatggacaaaagaattagcatccaaaagaagatatatcaatggttaacacatgaaaagttctcagcacaattagtaatgatggaaatgcaaatcaaaaccagagattccctttcctatcactagaatggctacaataaaaagtgttgacaacaccaaatattgaggaggatgtggtagatctgcaattctcagacatcactggcagggtgaaaatttaagaactttaggaaacatttgagaggtttttagtaagttgtatccgtacctactctacaagtagttgtacttcaatatattttagtagttatacttcaatatatttacccaaggggaataaaaatgcatttcctcacaaagaattgtacatggacgttcacagcaacattaatcacattattcataatacccaaagagtgaaaacaattctaatgtctatcaaccaacaaaagaataaacaaaatgttttatattcatacaattaaatattattcaggaattcaaagtataagctttacactcctatgcacgcgcgcacacacacacacacacaaataataaaggcttcatttgttgtagttgagttctgttgcttctagatgcctacacaaccctcaaggcttcaaaatagcctcttccagaaaaaacatttaaaaatattcacccctgacatggctccaattgtgggaacacagtttattcagggtaataaacggaattttacatcttctcttcttttgtgcttaaagaagtgttttaaaatgtttcatttattttaatgtgagattaaagtggagaaaaaggttattaaagtgtaattatgatataatacatccttctatttttgttatactaggagaagagtgttaatataatgaaatacctacctttaattttacaatagatgaaggctacattcatttgcaacttttgtttaaagaatctgaattagaggaaaatgtttgcttacttctgtgaataaaaaaatgaaaccaagtttaatagaaattaaaataagaagaaatcaaagaaaaatgatttatcaaaacttattatttacttacaataggtttaagccttcacattatataaattatatatatcagtaaagggtctttcagcttctctccaggacccttggcacacctataaatttgaataaatctttccagcctcttttttctggtgaattctttcactacaaatttaaatacttattgtaagcaagtaatattttatatagttattatatttcttcatttcaagagcacatgcatatcttaattcattctagatgatcccaatttgtggaatgttacagcttgtgttcatgtgtaattatgtaccattaaaataataatagctgtcattcattcagaacctcctatacctgacactgtgctaactatatcacacacattatctcaactaatcctcacaacaggcctaggaagtagggacaataattaatctccatgttgcagatgagaattcagaagctcagagaaattaagaaacataaccaaagtctcactgttaggaaataccagagcaggatttgaactaagttcttcaagactttacagcctgtagttttaaaagccaggcatactgctgcttggttctctgaacttaatacaggttattatgcataactaatgtcacccatgaagggcctgacaccggatgtcttagataacacaaagagaaactgtccacagctttactgtggctcttcccatagccctggagctgtctgggtgagtggccctaagcagtataaatactgagattacctcgttgtaaacataacatcactaggcttcagtgatacccaatttctagttgtattttaccttatactttgttcataaagatctccttaccaaatatatcagatggattatggatttatttcttctaccaaagccctgctaaaagaatagtaaatgtgtttcaaattgtattaatctaccagggcaataataggaggagaaggatgcttggaaaatagaataggaaaaaaataatgactttagacaactaccaaatatgaatcttgatatagaaaattatatttaaaataaaaattcaagtaaacctcacagaacataaaacaaaaagtcaaaaatatggaaaatataaaagaaaaagtaataaacatttccaatatctttagagtaatatttctagagagagaacaaagaaaataaaggggaaagaattatcacatataaaactcaataaacaattttaaaggtaaaagacataagcccctaaatttgactagctcactaagtacccaaaaaagcgaataaaataaaaagatgaacccaaatgataccaccttgaaatttcagaattagatgttctacaagaaaagctcccagaagaaagaaagtagtctccaaaggaggaacagaaatcaaataacatcagacccctcaacagcaatgctggatcctagaagacaatgtagtcagatcttcaacattctaaagaaaaaaatatttttcacctaaaatgttgtataatatattgctgaaatgtaaagatgaagatatttgcaagcatgcaaagtatataacattagtaggataacagcatatgctaaaataaaggaatactattatgatatatatatatatgtaaacaaatgtgtgtgtgtgtgtgtatttgaagattatttcttgctcttctaaaggaccatggtaacaatccatgctactagatgtcgctcttcatgtggtcactcagggaactcagaccaaaaaggccctgccacctccaacaagtacatagaggacacagagggggaacgaacttgagaggccacacgtgagaggcttttacaagccagacctggaagtggcatatcactttgcacattccattggtcataatttagcttcatgggagatgagaattataaccatatacctagaaagaagaggaaatggacttcggtaaaca

SEQ ID NO: 1883173 - DNA, 4001 bp, Homo sapiens; identical to SEQ ID NO: 587501

SEQ ID NO: 1883174 - DNA, 4001 bp, Homo sapiens; identical to SEQ ID NO: 587509

SEQ ID NO: 1883175 - DNA, 4001 bp, Homo sapiens
atcatataatactattttaatatattttgaatttatcattttacctaggatttttgcatctgtgcttgtcattaaaataattttctttctatgtatatctttgtttacaatcaaaactacagcagtcttttaaaataagctgggtaaagttcggtctttgtttcctggagcaaattatattaggtagcagttaactgttcattgaaactttggcagaattaatctgtaaaagtacctagacctgaatagtctttgactaccagtttaatttctctaacactcactggactattcaaattctctctctctctctctcttttttttttttttttttttttttgagatgaagtctccctctgtcacccaggctggagtacaatggtacgatctcggctaactgcaacctccacctcccaggttcaagcggttctcctgtctcagcctcccaagtagctgggattacaggtgtccaccaccacacccagctaatctttgtatttttagtagagacagcgtttcgccatgttggccaggctggtctcaaactcctgacctcaggtgatccgcctgccttggcctctcaaaatgctgggattacaggcatgagacatcgtgcctggccaagttctctttcttcttatgttaatttgaacatgctttcgccatgggatgtgcctgctcccctttcaccttccgttatgagcataagctcccaaggccttcctagaaactgagcagatgccagcaccgtgcttcctgtaaatcctgaagaactgtgagccaatcaaacttcttttctgataaattacccagtctcaggtatttctttatagtcatacaagaacagcctattacaatatatgggtatatacatgaatgacaaagaatgtctccctgatcagactctggacagcctcctccgagctctctgcacgactgggcccaacctgggcattccttcctctgttcctgcagagtctagttttagcaagaatcctgctaagtcagtttaatcccaattccccacctcaggtgtctgaataccctccatatctgaccaaattccaacacctgctccaccccacccccatccccgatgtggatcaacttggcccaccctcagcaggaatcctgttaggtcagggaagccagaacccccacttgatgtccccttctcaatgactttccatccaccgtcccccacactgctccttggctataaatccccacttttccttattattttcggaccccaatctctctcccctgctgcaaaacctcagtgcagtcccttacatctaaggaaatggttctgaataaaagtctgtcttaccgtttttaaaacgtcagaatgttttcagatacgtgtgtgtatatatctccatatctgtaaatatatataaatatagatatagatatctccgaagagaaggttttccaatgtgcactttttcttcttgcacattgcgatcttaaccctcaagcacatctggaaaaagcttccatgaggatacagcctgggatggatttgtgggcgaggtgtagaccacgataccgggtaacgtgccctgtgttttctggacacagaactgtaagatttcaaaaagacccaatcaatgattctaacccaactctacatatatttactcaaacacagtattcctccctgactagtggttaacggacttgctttaggcggccccagaggcggtggccagtttagccacctcccgaggaacctgcgcagtcccgacgctcaccaagcgctttcctggcggttacagggttgggggcagcgcagaacccgcttctgcccttatcaggagcccggacctgagctggactccaccacctcgtccccacccaccctggaagccagaaaccccaagcatcctccctccctcccctgctggccactacgaataaaccagacatacaattcgcgcctaacggcttagccagaaatgccacccgcagtcgggccccgggccggaaacctccccgacgcggggccgcgtgcaggggaaggggcgggcgcaggctgcggggtcggcacggaagatgcacgcgaggctcctggggctctcggccctgctgcaggcggccgagcagagcgcgcgtgagtgcggcagcccgaggctgtgctcacccctgcagcccctaaccccaccccggcgccgggagccgcacaggctgcctatgcccgggcgggcactgccccagcctgcgcccagcactgcgcgccggtgacgcacggtggtggccatcccacctgcagagcacgtcctcccgtccttagtagatgcccacgcatgcaccatccccccaaggatgcatgattttcctccacccatgctcggttcccccccctcccgactggtgcttgacttcctcccgcccatgcacgatccccccgccccacgcatgcaagatcccctcgcagaagcaggggagatgtatccgcccttccttccatcacaagctttgcaaagtgctgcgatgccaagatgtgctgagcgcaagtctgggggcgcccgggctctcccccgacccccggccgtccagggggaccctgcgacttggaggccgctcgcagaaggggtggcggggggagggggacagggctccgcatccacgcggccctgtaggacggcgactccgcttcggggtttaggacggggcgggacgcggcccttcgaggccacctccgtcgcagggggaacccagagcccgccagccgcggcggagcaagatggccccatttttcgcgcccttctggtttgaacgcgtaactccttcagtgccgggaggagcgtctccgcccacttccgccgggctccctgcggaagctttttcccgggcagagtccctggggtggaagagggggtaccctgggaacgccgccttgggacttttccctgagttcgcgggcgtccccgcaggtcccgctgcttccgaggcgcgccgagcaggacgcacacggaggacgcgcaagcgccctggctccgcgccccggactggaagggctgagacaggacctgcgggggtcggcacccaccccaggtgtcctcccttgccctccagctgggcacggactgggtgtcagcattccccagccctgcagcaccgaaggcttttcgtgcaagggaggctgccgcaggacgctcggggtggtgacagccggacccagcctgggcgctaagggctgcctgagcccggaccccgcggtctagagctgcagcgtctgcagctgtacctcagggcagttttcccagtttccctaaaatccgcggcttgtgttcattcatccacttagaactttactattggaaaacctaagtaacagttgtgtgaaacgatgcctgtgtgcggtgcctctaccagcgcaccgcctccaagatcagcctcagacaaccctgaggaggccgtgctaggagtattggggaggcccagagttccaggccagggagttccccatgtgaaagtaggagaaaagggaccccacagagagagctgtgaccccacagggactaacggtttcgtagtgcggagttactgactgcggagtgcacattctctctccactgcgtaaccaccatcaaaaacaaacaagcaaacaaaccagagaggaggtttcatcgttctcgaggatgcacaagatgctaggcgcttcacacatgtcgtatattgcccaacagctctggaaagccctgacaatgtcatttagtgaatgcctgtccctgttgccagaggctctgctggctcccagcctgctcctaggagactcttgctggtgatggggacactgtgttggttggttactgttttgttttgttttgagacaagagtcttgctctgtggcccaggctggaatgcagtggcccaatctcgactcactgcaaactccgcctcctgagttgaagccattctggtgcctcatccatcccgagtagctggtattacaggcacgcagccagcaaacttgctcatttttgtatttt

SEQ ID NO: 1883176 - DNA, 4001 bp, Homo sapiens
cagcccattgaaccagagacttgaaacagccccagccaaagacttttctcccaattctgcgcttcctgggttctgctgagtcttccacaggctttttttttttttttttttttttttaagacgaaaaagagattttctgttatcgggggcagaaagactgaagcccaaaaaaaaaaaaaaaaaaaaaagaaaagaaaagaaaaaagaaaagttaatttatttttaaagcataatttttttaagaattagactgaagtgcaacggaaacataaagagaatattagtgaaattattttttaaagtggggaagaatcaaacatttaagactcccctatcctttttaaatgttgtttttaaatttcttattttttttggccggtcgtctcaaattcatctgatctcttattacctcaattttggaaactgcccgccaccgaccctccgggaccacacagacaggctgaggacgactttatgaccaagagctgaacaaggtacgttacactggcgcgttttggtgaaggatgaaggtcctccaacaggccagggagaaggaagacatccttataattgttttaaaatttttaagccagtttcgatagaaaagttggaagtttaaaaatttccaacagactgaagatcagggaatatttcaggtcactgtcaggcttagcaacatagccctcttttcccatttctgcggctctcgccagaaatccgctgcctttctggggacacaggtagcctctctgcctgggaaaggctgcacgtcctcagatgtacttttccattttgcatcttccggagcagcagaggggctccagagttaggaaacaagaattcccaatgtaaggaaaatgcattctgcacagccgccccaccccttcccttctttttttcccacacacacacacacacacacacactgtggggagaaaaactggaatagcccagcgcgttttacttctaagtgaaaaagtcgcttcttgctgggaatgcaaagggttaagcaatctgggcttccagctccgacaagctgggaccctggagaaggagggtccttctctacctcctcgcagctaccatcccctctcggccactcccccctttcccgggcctcccctcctttgcacttcccgcaccccattaaagtgtcaggctcgtcagtctgggcttactcgggccaggggtccctgacgcaggcggtggcacccgcagataggagcgggaggagggcgcgcatccctcctctcctcgccgggccagcccgccggccgcccggaggcagggcgtgcgtggggaccgcgcgctgcgcttcggcagctgcggcgtccccagagccaattccgacgtggcaccgcgcacgccggcgcttctctcctcagctgcagctggggacactgcccggtgggagatctgggggcgccgtctcgagcgcccagccgatgaacggggcgaggggcctgtgggagctggggtggaggtgggagggaagccagaggctgggttgggatggataatcaacaccttggggggaattcgtcacggcagttcccgcccagcgtgagccagggctccgaaatgggtccctgtgaacaggagggcgggtctgaaaggagggtctgtatgagggtgagaaccgggaggcgaaagagcctttttcctctgaccacggaaacgcagccgcgggggaacggcgctgaaaggataattaaagctgcaaagaggcgctgggagcacaggggcggtgcctggggaggaggacttgcaagacctgtgtcctattacacagtcttaggtgccagttcccctagcgcctctccctccgtcccccaaacgtccgcgctgaatacttggactcaaggacaccgcgcgcctctggggcgaacgagctgcagcagcccagctacgggagggaacgtgtagaagccccatcagcctctccctgcccactccctcacccttgggaccgttgctgcctgttgggtctcaggagcaattgcccagaaacgcgacgctgctccaacccacgtgtctgggctgggattgcctttgacgtcacacacgggggaggtgtgacgcaatagatagggaagccccgattggccaccaagggcttcccccaactggaggcctgagtatatatagaccatcagctcagtgttagaataaagagaaggaagttggtagatgggctttgctgaaggagtgaggccgcttgttaagagggagacaacttcactgctcattgtacattccaaggctttggctcagatttctcactgcggttaaggcatatgataagtacttctggcggtattaaaccaggttattatttttaaaaaaggttattttaaaaaggtcaacacatatttacatacacgatgccaggtttaaaattaaaatatgtatttccatagatccaagtccatcaacctctttgtagatacaatttttttatagttctatgacttgaattgaaaagaacttttaaattccaaatttttatttccttccaatgtgtgcaagttgactcattcattaaattagttttcaccacatttttctagagcttaataaggttacagtacagctgaggtactgtattttgagtacccatcatactccaccaaaagttttcccaatagtttggcgattcttttacattttcaatgacaatttaacactttaagttacctgttgcgtttatatattatgttttgtatgtgtttccaattctgggacagataattctgatttttaagtggacatttctagaacaaaatattgtaactaaagtatcatcccccctatttgttttttcttagatatcacctgagtcgggtaaatagaaaaatatattgtggacgtgctgacaaatgcatattacctgagttgcttgtactgtacccggagtcgaatccctttatcaaagaaagttatgcagtttataaaaattcaaggacttaacaaatcagtgactagcattaaactctaaggtcactttccataaagcaaagatatttagtcagctaccttcctggaaattgggaattgtgcaacaagtgaataagaaactgttactagaaagtaagttagttggaaccactcatttttgttaggtctgtagaatatagccccatagtattgaatttcataaatactttcccatacatggtttccttactaggtaagatttttaaaaaaatttttttcttgaatttttaaacacttacttgtcactggttcatttatttcctgttgttggcactctggggaaagtcctttgtctatggatcaaggtagacataccctttttcaaagctatattacacatttactttcaaagtctaagaacaagtagtttgttacattactagctttctggctcttgtatgaagtgtgatccctgagttaaagtaatgagaggacagagcataacccccatgtctccttctgggttctctttttatccatgcaaacccatgccgtgtttctgtcaatgacagagttggtggcagctggtatgccaacagagtggagggacagctacctgtagagaactcatttccatcaccccaacttggtattttatcctttcccttctagcagcaatctgtgtagagtattatcctactgcatacagccttaaattatttaagcatattttgctcatgcctataattccagcactttgggaggctgaggagggcagatcacctgaggtcagaagttcaagaccagcctggccaaaatggtgaaaccctgtctctactaaaaatacaaaaattagccaggtgtggtggtggccacctgtaatcccagctactggggaggctgaggcaggagaatttcttgaactcgggaggtggaggttgtagtgagccaagatctcaccactccactccagcctgggtgacagagtgaggctctatctcaaaaaaaaaaaaaaaaaagtctattttgaatggtagtcatgtggagttcatatatatactgcc

SEQ ID NO: 1883177 - DNA, 4001 bp, Homo sapiens
atagttttatccaaaaaagtgtcttttaacaaaagctctaaattttcttctaagcaatgagcttcatctttcgtattttgacaaatcatcttttcattgtcatttaaactcatttatttctttttaacccaattatcactctgtagtctgttttttagattcaaaaatattgttttatctatccttttattgattcctaattttattgtatataatcaaacaggcttcatttatatatttatatcattccattccacaaaatttcaaggtatattataacggcatatgaagtgtaatgatatagaaaaatgtgaattaaaaattaggtcattggaaaatgtgttataaagcagatttcagtgggcatacaggctgggtccacctcggctggactcattactgctgtccaggtgcattagttctttcccatgatgctaataaagacatacccaagactgagtaattgataaaggaaagaggtttaatggactcacagtttcacatggctggtgaggcctcacaatcatggcagaagatgaaggaagaacaaagggacttcttacatggtggccggcaagagagcatgtgcatggaacaataaaaccattagatttttgtgagacttattatctatcatgagaacatcacaggaaaaaccctcccccatgattccattacctctcaccaggtccctcccatgacacatggggattatgggagctacaattccagatgagatttgggtgaggacacagccaaaccatatcaccaggtgtatctggatgtctccagggaatggtagggcgattgaggaaagactcacaggggtgggagaacaaactgggatgaaggagcatttagagacccccaagaccatcaccgcgtttggtaatttgctcggaggactcacaggacatagcctatagtcatactcatggcaataatttattacaactaaagaatgtaaagcaaaatcagcaaaaggagtgtgcatgggggaaagcccagaggaaaccagaggaaagctcccaagagtcttttccccatggggtcacatggcatatattcaattcttccagcaacaagtcatgccatgtgttaaatgctgtctaccaggaatacttcttagagactcagggcccaaggcttttattgtctgcctctacctggcacataccaaaattccagactcccagaagggaaagcagaagttcaacatataccacatcgtctgtttaggtactgtgagccacgcttatcaattctggggaaggtggaaaccctccccaagtccaagttcccagatgacggccatgcctgcaggtctttctaagcatagcagcctcagacctgctctgttaactcatttttgggggagaactcaacctgatgagtgcaggggttggcttcaagagctgtaccaggaacagactttaacctcccgagaagagtggtggctcagaggatagtgtggtgacaattccaaaatacgcctttagcagaacctggggaaactggctgagtcctaaggagagatatggctttgcatagggtagctacttaaataaaaataccactgccttcctaacttggaggtgaatcctgggaattcaggagaagagattgggcacagaatgcgtcattgtctgacaacgtcctacagctctgttggttacccaaggcagctattgcatgaacaatctctaaacaaaataagaccacgactgttcacaagaaatgaggccaagcaaagttatgttaccagaaagaatatatatgactgccatatggagtccaaatcagggttttttggaaaataatgttcatggtataaggtgggttttatttgtatctcagaatggaagagtcctcccctcctcctgccctgttctaaggggtagagcttactcttccagatggccccacctaaacctaaacctcacaaggtcagcctgcagcaaaacaagatcctacctttctctctgcggctcccagaatgatgcaattgacaacgtttttaagacacagcagaaggcttagttttgatcacttttatagagaggtctggtacttccaagaaaacgggacagctggggtcctgttgggggaagaggattaagaagacagggcttgagaaaagagaggaatggaagcatggattatggaaagagtatcaattgaggacatcaactcaagtcctagagtgcgaggctttgcttctggaatgacagtgaaggggctggcagttctttcaccagtggtgtacaaagttgggtcaattatcggagctttttggaaagaatacccaaagctttcttggagatccagtatctgtttgtactttgacgacaggtgagaacaatgacaagggatccacactgtcaggaatctcattatgcaccactggctaggtgatggccactgaccatccacagctgaagacacaggagagggagacagtattctcacttctaccccaacaccccccacttgcacacagaacaaagaccagggaaaacattttcaattcatgcaaaagtagtctcttctctaaagtctgagagccctcaaagaactgcactgggaactcttctattaatagtaaaggattgcctgcaattcctggacatgttggcatggccagagcccaggggcatgcatagtggtccaaagaacagcagcagagactggaggctggaggggaggatgtccccagaaggtgctgtccaattgagtagagaaacactgacactgtgagaggttccccagaaatacatgggcacacaagctggaggtccttcatcagcagatggggctagagccagagaaatttgaatgaaggccatggcaatgatcccagataaactcacatactgacaccttggaaaatttgagttatattagatagaattcaaagatactaccagaaaaataattaatgaataggtaagtacaatattacagttcagtgtggctttcagagaaatacagccagaggaaattaaaatttttcttttctatttttatctgcataacctaaggaacaccaaagaggatctaattcataattctgaaccactcttctaaactgcctctgaggatcttttatttggccttgcattgatttgtaaatatttttatctccagaaccctccaaaggaaggagaggcaggcagtgatgtaggttctaaaaatggcctaggggtaaaattaaacctgtatcttcccccaccccccatcacccacatcttttatttatacaacaacaggtgaggaaccacctcctcttcttgacacagggaacattgcaatgtcacctaagagcttcatggaggaggaagggcgttgtggtggactgtattttccaaagatctcccaacaatatctcttgttccacatgctctttgagaaccttgtactctccccagcaagaggtggagactcttctccctttgaacctgggccggcctctgtaatttccctgatggttagggtatggcagaaatgagctatgcaacttccaaggctaggtttttaaaatgccatacatctggctggacgtgatggctcatgcctgtaatcccagcactttgggaggccgaggcgggtggatcatgatgtcaagagatcaagaccatcctggccaacatgatgaaaccctgtctccactaaaaatacaaaaattagccaggcttggtgcgtgcctatagttccagctactcgggaggctgaggcaggagaattgcttgaactggggagagggatgttgcagggagtcaagatcgtgctactgcactccagcctggtgacagagtgagactctgtcgaaaaaaaaaaaaaaagccatgcatcccttcattgtcctcttggggtgctcactcttggaacccaaccactctgccctgccctgaggaagcctggactagctgtcatggacatgtgtggccgttctggctgtcgggccacttgaaggctggtcaaaagcatcagctgccaaatgc

SEQ ID NO: 1883178 - DNA, 4001 bp, Homo sapiens; identical to SEQ ID NO: 587549

SEQ ID NO: 1883179 - DNA, 4001 bp, Homo sapiens; identical to SEQ ID NO: 587554

SEQ ID NO: 1883180 - DNA, 4001 bp, Homo sapiens; identical to SEQ ID NO: 587555

SEQ ID NO: 1883181 - DNA, 4001 bp, Homo sapiens
tgcgttgttgacatatttagtggttaaaaacttattgccaaattctcaacagattccagaattttttaaagttcacaacacgagagtggacgaaatgtcggagcttttgctcatatccagaaatgtggcctctgcctcccactcgggccctgcggtgcagacgggttcagggcggcgaggactgagccaggagcgccgagagttccagctgctcccaggctgggttctaattaacgctggacccctgctggtaaatgctatttttaatggctttgtgcaaattaatgacgatgagatttccataagtaccgagagccagagcctttactttctctttttgtgttctttttgcttgtgacagtctttgccagttccatgctgtatacacataatgagccgttacaactccagcaccaaagctaacgccccgggaacatctttaaaacctttttcactctgttgccaagaagagtagtacctgctgtcagtacttgaattacaggaggctgaaactcagcgagctactgggattttttgaaaattgaaaacttccgttaactatagcagaaacagacccttttggtggaagctaaaataattcccatgctgctccgtttttattttgttcagtttactccaaaaatgttccaaactctactgtgatcttcttagtgcatctctacttcctttcggctgcagaataatacttctttttctcttttgtttttttttagagatggagtctcactctgtcgcccaggctggaatgcagtggtgcaatctcggctcactgcgatctctgcgtcctgggttcaagcaattctcctgcctcagcctcccaagtagctgtgactacaggcatgcaccaccacacccagctaaattttgtatttttagtagagacagggtttcactgtacattggccaggctggtctcgatctcctgacctcaagtgatccacctgtcttggcctcccaaagtgctgggattacaggcatgagccaccgcgcctggcctaactacccccattcttttccagagaaacgtgaacaggccaaacaaagcctcacctggctatcccgccaccctggggttgggcctccaaaggcccgggaggtcacctaagacacggtgttctgaacatgcaagcccgacagcatcttctctaccattctgccagagtccagagacctgggaataggtcataccccccactgcattttacaagcttggcatacattaggttctcaataaatactgaattaatgaaaaaattgctgaagtaactgaaaacatccatccaaaccccacaccatctggtagataagtagtctgtggggagtcccatatttttcttaccttagatatttatttggaaatggactgtaggcccaatatggtcaatgaaacttgcagaggaacatttcatgcctttaattagttcttcataactgcagggacctctagagttcctgaaattgaactgggttgtaatactgtcaagaaaaaggaggacctatcttaaatctatttcaagggtaatactattttactatgtaaattttcccctggtcagggacagcctgatcatgcatggtagactcgaagcatgcaaatatttcaacatgcaaaaccgccctaaaaatataaccgaagcttatggagttgtccagggtacagtggtttactggcccctgaatgcgggactccatcaaactgggttccaggctgggaggtctctgaacccaatttctagacagcctgctttggagttcaactgatgggaccttagacaccagccttaccctctgcaagtcttgtgatttggagccagatacttggcctctctgtgctccagggagacaccactgcacctacctgagaggactgaaggagaggatctgtgcaactcactcaggatactggatcttaagccaatgggtggacttacattcgtcacctctgattctgtctcctcctgcgcggtgacttagcaaacacttcttcctctccagctctgcttcttactctccagctctgctgccctgttccagtgctgacgccagacaacagataatttcccaaatgcttgtattagcccttaggagttcatgtgttcctcccccagccaataaagctgttaaatcccaataactgtcaggaatggagccaattgctataaagtacttccagcttcttggcatgaagaaataattagaatatatgtgttggctttgaaacaacactcactggttcattaaaaaattctgtgcatattgtacaaaagtagtcttggccttggcactcccttaggtgaaccttacccggccctggcactcccttaggtgaaccttacccggccctggcactcccttaggtgaaccttacctacttcagtgcttcctcagctctgatgaactgtgtgcaattgcgtttttgtcgcaagctgctgcttaaatactgtgaagctctttccttatgtcagtctctccacctatgttaccagccagcgcctgagaccctcatattaaggaaacagtgtgttcctaagtcctctttgatattgtccactattgactatcgatagcaaacatgcattggccatgtgctaagcatgtcattccccaaattttatttttttgagacagtttcgctcttgttgcccagtgtgaagtggaatggtgtgatctcagcgtactacaacctccaccttccgggttcacgtgattctcctgcctcagactcccgagtagttgggattacaggtgtgtgccaccacgcccggctaattttttttatttttaatagagatggggtttcaccacgttggtcagtctggtctcaaactcctgacctgaggtgatccacccacctcggcctcccaaagcgctgggattacaggcgtgagccaccgtgcctggaccccaaattttaaattacagacagtcccaggtttaagatgataccctaattgtcctgattcgaatagggaaacggaggccatgctttttagttttgtacccctgggcccagcaatgtgagggcatgaagccaagctcggtaattgttgactaaatgaaggagtgaggcctgttgagcccaaatgcccattgctcatcatccctgacaggctctcccaggggctgcaggggcctgggcacgtggttccctcaagcagattgcaggttacccacaggcaacacgctctgccagtgaattaacgctgctgtctccacatggccagtacgtttattagggggaatcctagtaaccatttttcagaaaaataaaggaaataagatggcaaccattactttaaaatagtttcaaggcatatattaataatgttagagcaagttagctgcaatttaaaatattttgagggtcgggggcagtgactcacatctgtggtcccagcactttgggaggctgaggcgggcagattgcctgagcctaggagttggagaccagcctgggcaacatggagaaaccctgtctccacaaaaatacaaaacattagccgggcgtgctggcgtgcacctgtagtcccagctactcaggaggccgaagtgagaggattgcttgagcctgggaggttgaggctgctctgagccatgattgcgccactgcactccagctggagcaacacagtgagaccctgtctcaaatatatatatttatgtattttaaatataaattttatgttatatttatatttatatatttatatatatttatatagatttatagatttatagatttatagattttattatttataaaatctataaatatataaatatatataaatatataaatatataaatatatattatatataaaatataaaatatatatttatatataaaatataaaatatatatttatatataaaatataaaaatatatattacataatataaaaatatattttatatatattttattatatataatatataatatatttataaatatacattttccatataaaatttat

SEQ ID NO: 1883182 - DNA, 4001 bp, Homo sapiens; identical to SEQ ID NO: 587562

SEQ ID NO: 1883183 - DNA, 4001 bp, Homo sapiens
gcgcccggtggccgccgacaggaggtagaccgagccgtcggcgcacgcgcacacgaggcgcgtaggcagcgactggtgcgcaggcgcgggcaacgcgggcgccacctgcacgtggagcaccttggcgggcagttgcgccaacggcgagtagagctcgcgtacgcgccacagctgcatgctgctcgcgcacagggacagcaccggccagcccgggcgcaccggcgccagcagacggcccacgcgccgggacagcttgtcctggccccagaagcccagcgctacctcgcccacctgcgccgccgcctgcaggtcccaggtgcgtagcgtcccgtcctgcgaggccgacaacaccagggtcgtgttcgggagcacagtcatagccgtcaccgggcctgtgggaggggtgcaggtcactcggccgactgaaggcaggggagccttcagcctgtgttgcagtcagcgcagcaaggcctggccggagctgcggagatgctggacagcctagagcggctggaggcaaagggccgaggctcggggtgcagagaactcagagcacctgtgtggcccacgaacaccatccggatctgccagtcagcctcccacaccttcacggtgctgtcccgggaagctgtcaccattgcctctacttcctcgcagtaagccaggtccgagatggtgctacaggtggggaatgggagaatcccaatggacttaacatcgccttgtgtgtgagggccgtgtgcccctacatgcctggccctccctagggggatccccctcacgttttgtgcaaatcccggcgcacatctacgagagtccaggcatgcagatcgaaggtgagcacggccgagccataggccgcgaagcagcgcaggacgtggtggggaggaaccggcgccacagccagacgcatgagcctgcctgttgggctcgggggcgggtgcagtgctgaccctcgcagcaccaggcggcgaccacctgaacggaactgccagagcgccaggctgctgttcatctccgcaacgagcagcagcctgaggtcgggaaccggcaggcagcaggtgggcgcccaacccggggccctgcccaccccctgctcgctcagccacagcaggctgaggttgggcctcagaattgccagccccgcggggccccagcctacaaaacggcccacggcacccagcgggcccagcacggtcaccagccccgtaagccggacaggcgccagcagcgtctcctgtgcccagccgtcttccttgtgcaggtgcaggcggcccgcgccgtccagcaccacgaagcgtccacccaccgggtcctgcgccaccgagcgcagcccggctgccacctccaggcggcgcagtggttccagcccatgcgtcaggcgcgccgcgcgcagctcggctctcttctcctgtgggccggggtgggcgggcccgcaatcaaaggttggggctactccggcctaggggacccctaagggaaggcccagatccggaaagaggccaggaggcgcaggacaggcacaccgcaccttttccacgacttcgtggaggctggtgcgcagaagcagccacagccggcgggcgcgggcgcgcggggtcaggctttgccactgttggctgctggtcaaaaagggcaggacctgcgacggctccgtgaaagtcaactctgcgggcaggaactggaagttctgccacctacagcctcaggtcctcgaccctgacggttatggggagccctcctccaggggccctgccctaccagggactgcccaggggagttttgttccaggggacggaacccaagcccgaatgagacccacttcctagcgggatgcccggagggcgaggccaggccccctcaccattcttttcggtgagcagcccagggtctgggacatcatagccatccgcatcatacaggtccgagtccagaactaggttgtagccttctgcctcccacacctctgcctccatttcagcaactgcggtcccagagcccaacagctcccaggacttagcggtcacggcccgcagcggcagttgctaggataccagatgccgccggccactcccacaccgcaggccccacccccacaccgcatcaggtccacactaagtcacagaaacttttattggaaagaaacgagctgcagcaaagtgacactcagtgcacgcggccaaatgggcgaggtgggggtacaggtgggcaccggggccggcccaagaccagagccggtgactgctggggcctgctcgtggggcctccggccacagaccctttgggctggagtgtgcaggcccagtagaaatacaaaaataaactctgcggtccagctgtccctgctgtggcagttcatttgggcagggcagtcgctcctcccaccaggccccctgctgacaagtccggccacagcatgggcagcaggagtctgaggggtgagtgggcatccacaggatggagccaaagggctaggcaggtatggccttgggcagtgccaggactgtggcagcgccagggtctggccagcagctggggaggccccaggggcctctcaggtggacaggtccaggcattggttgaagctggatgaagctggggcctcggctcctcctcatcaaatacagatcactgggaccctgggcggaggttggcacacagtgggccttcaggagccaccacttagaccaagtagaggaggcccccaccctgttgtacccactccaggcttcaaggacccgggtcatggcccccatcacacacctgtcctcctccatggtgctggtctcctcggccccactgcccccgcttctgctttcttcctccacctcctcctcccccagctccatgtccagctcgttgcctgcctctgagggtgtgtaggtggagccactgaggggaggcagggaaaccagtttcaggacccctacccaggcctgctgctggccccagggaggatgttcagggagggcaaagctgggtggagatggcacagctggggaagttgtatcggcccaacagggaggtgggggaggaggcggggggtgcccacctgatggaacggcagctaaagaagacgattcgcttgagccgcttgttgtagaagaagtagttgaaggaccagaggctaccatcctccccgaagggatctgagtccaagtctgggttatagctggggagtatagggtgacaggtggtgtgaggcgccaagtgccccacaaacctggaggcctggaggccatctgcagggatgccggcccacctgtagatgtcacattcagccaggcagatctcctcgtccaccgcgttccacagctgtggtttcagatccttgaagtcctcccgcacagctgagaacagactgcagttgactgcattcaccacctagggcaggtcacagtcagggtgacaggagcccagggctacccaaagtggggaaggacagtggggtggctgtgggtcccttccctccacctgaccctcacccagctaaggctgggctcccggctgaactcatggctgcgggctgtgctgaagtcatagtcaggcctgaaggactcattgagcgtggcaatcaggtagaagagggtcttgcggctgcacttgtcactgagggggccctcctcctcaccgccttggcttttgctgagtctgcacagacagaaccatcagctgggcccatcacctcccctcaacccccagccccaggtaggccccaccatggctcacctgctggggctcagtcctgaagtctggggtggagaaagtgcctccagcacgtggggctggccctcctggcagaactgcttgaacatgtgtttgtcgtctcctgccatcttacatgagtagctctcaatcctataggatgcagagagaaccatgaagcatgcttcccccaggttccactgaagggcgcggcagtgtgacctccgagatgccagcccccccagcctgcctcacctgccaatgatgtgggcatctccagtctccacagtcagctg

SEQ ID NO: 1883184 - DNA, 4001 bp, Homo sapiens; identical to SEQ ID NO: 587576

SEQ ID NO: 1883185 - DNA, 4001 bp, Homo sapiens
gcccctgcccagcccacacaggaactccttgtaaacacactttgctttgccgcagcttgtatgcatcttaaaggaagtttctactgagccgtgtcccctcctcaatgtcgttcagtcatgcaacaaacacctgtgcatacagaaggaaacagaggtgggtcagacaccagggacgctcagcgggaggaggccggtgagcaaacgcatctcacaattcggcaaacgaaggctgcaaggtgccttccaggaagtctggaccgtggactgaagggaggatggtggcagggtggtctggaagtggccaggagtagcggcgacctcggcctgcctccaggttctgcctctatctcgtgccatggactgcaggcagccccactcagcaggacaggctgtgctgatgctggctgtgcagtccggtgggctccgggatgggcaggagggagatgggcatggcgaggaatgtgcagaaacggatgagggcgggagagtcatgggtgacctggagtcgggagaataggcctgatgagatgtttcgagtggtgtcaggctggagccctgtgggaggcgggtgggaatggggatacccttttacctctgatgaaggggctagggcccttggccagtcccagggtgaaggcctgccatcgcacagggttactcgaggtctggatcctgcatcacaacagcagcccacatcccacaataaacaaaggtgttgttattaggagagcttggcatccctcgcgggctccgtttcctggggtttcactctgtgagtgcaggagctcttcaaatgttttgccaattagactgaaagacccatgagagggcagatgccaggaatccccaggcagggacctgcccagagccacaggcccagcaggatgagaaatgctgtgggggtgagttgggctgtgggctcaggccactgccagaaataagagcagtggacagagggcaggtgaccccatggaagtgtgggcagcccagggggtttgtggcaacccaggggggtcaggcagcccaggggggttgtggcagcaccacagtgaagcccaggctcctttcctcctgtttctctgctgtcctcgacacacagcttccatctgtggccaaggtggctgctcttgctccggccatcacatctatcctctggccagcagggaggggagaatggaccagggtggccggctccttcctgttagcaacttagcccagaggcttccctcgtcccatccctccatcctactggccatatgttggtcccaggactacccctgctgaagggtggctggaaaacagagtctttagccagacagccagaagccctccaaaactgggggaaaaaatcgcaggctctgctacacttagctgttgttagtgagggaggcgtccaggacgggccgagagggcaggctgttagtgagggggcaggtgggaggtgagtctagaatgttctctgacagagtgtctggcagagtgcccccccttccttgtcaggcctttccaaggacccttcagggagtgtcctggggtgtctgggagtttccaggtgtacgggagggacaccctccgattctcacagtctatggagggagcagcctcacccacgtctcagcgaaaaccctccctctgctcaccccagccacacggctggaactccagcccacttctgctgcctgtgaagtgagtgagggcgtgagggctgagggcagtgggcagctggaggctgggctgggcaggggtggaggggtctgagggccctcgggagaaggcagcttccggcctcgtggcgctgggaccaggtggcctgagctaagtgggctgtagctgccgcccctctctctgcactcacctgggagctggggaacctgggggctggtccctggcgctgacttacccaacgcactcgctcttgggagaagagaacctgggcctcagagtggggcagcagccggacaggagagaggcaggggcttgctgctggggccatggggactctcccccttcctgccccagcccagcagctgctaggggcagagctggtgctcagagcccgccttcccacagagccctccaatgagaggtcttgcccctcctccctgggggcggggtctggagaggggcggagcctttctcccaacaagcgagtcagaaagaggtgcccagtttaggagctgaagcagctgagtcccagggcctgacagtcaacaggacccggtagcgatgaggctgcattgttctgggtgcacagtcagcctgacagccctgcgcgtgcgaaagtcgactcctttgggtgatggaggctgtgggctgccttctccctgcactgggaaggggcgaggctcccggctacaccagctctgttgtgggttggggacactgccccttcccgagcccagtgcctgtgggacctacagtcctccctgagaatcctgcagcccttgagtgaccccagcctggagatcaaggaccttaccttggcacccaggcctggtatgagctctgacttcaaagtctgagcgctctacccccccggggccacgcactctgtcaccctaagcgttctcccccagcccctgctgtcctgcagatgtccttgcaaactcaattttccttctgtatgcaattctcttgcacctctattccatcggcaaactcctgttagtgcgtcaagacagaatcctgatgtctcctcctccaggaagctttccctggttgcactcactccctgccacctcctctcctaccctccacatgcaggggtggttgttgcctccctataagcagctgccctggcctttctaggggtggctccccactgggttcagtgcggcttgtcctgtgcagccgggctggtcctcaggaaattgatgcttcccatcactcgcctgtcttcttggaacaacttcagggtttattgaatctggaaagaaagaagagcaaaaaaagggaaccatgtacatcgcacaaatcagttgttctgacagttttattaaataatggggcggttcaatcatgttgtgaaacaaggctctggggaggaggcaagaggcaggatctggggctggaatttctggaagaagtctagcatcttccggaattgatcgagcctccttcatactgtggaagatgtgggttcagacccaggctttccaccagcagcggggtggctgggagcctcgccctccctgctcccacctgcttgcttcccagagggtcaggtgctggtgctccaggcctgcttgctgtgggagggagtcgctgaggagagccagggagccatgagaattccctcttcagggccttttctaggagggcaagaggaggccgaggccctgagagagccaatatggggtctgggccctcggctgggagggtggaggcggtggaggagacacgtctatttgactccacctgccgggagctgggtggcttgtgctaggagaccctggcaagccccccagcccctgcaccgccctccccacccggcccaagctcctggccttcagcatccagagctcccaatgaacttcccaggtctccccaggattcccaaggaaccttcatgcaagatgcagtggactcagatagagagggcccagccaggcacgccctgaggcctcttcctggggcttccacaggtctcctgcagctgctggacactgagggacgctggccactgtgggcagtacagcatggtgcttggcaggcggggcctggagcctgccgggtctctcctcctccagcctcggctgccgtccacagaatgggaaatacctgtgacttcctgggacaggatgggatgtggtggctgcgtggatgtgcaccatgagcttccgggccaccctgctcggcgctgaccagtccttaccaggtgggtgtcacttgctttacagcggggctcagaggccacaccgaggggcagcagtgccgttggctctgggaagaggtcccacccaggcaggggtctggcccctctcctcccaggcccttgccct

SEQ ID NO: 1883186 - DNA, 4001 bp, Homo sapiens
gttgtagtaactcctgagttcccacccttgtcccaggaaggctgggcacaattgcagttcagctcaagaaacaaagcatagcatccttagctgcacagaggtcatttccatcagccccctgcctccatccacaggcccggcctttctgatgaaggcctgtctcatactgcaagaaaagggcaagtcatgcattctgtgggcttttccccccaaacactgttagggtgaactgtatgaaattgctaatattcaatgatttttgatctacagaattgcagttttatatggtccaacctcatacttgagaggtccacattggcccaacagaatttgctgggaagccctgattagaacccttaaatcctacagtatgccaagtcctttctcacgtggctgactctgtccctgcaaagtgctctccagggccagctgtgctgggagcagctgggcccaccctgttggcaaaccttgccaatgggggaacgcaggaaggacgctggactggaggtcaaaagccttgtgacctggagcaattcacgcaacttccatgagccttggtttcctcatctgtaccttcccacagcattatcatgccatccggtgaaaggatctaagtgaagtgtctccctccaggcctgcactcagtgccgggtaagtctgtggggagtgagttggaatcaccgagaacccagttcagctcagaaagtctccatgaagatgcacggccagaacagaacacttcgggatcagccacccctaccccagctccactgctgggccctagagatgcctaggccactgccagacactgtggtggccatgttcacctctctccatccgacgcttggcctgctccatctcttctgcccgtctgcctggctattattttgccagaggccctacacacttgttcaggcttgctgggttgagggtgctctggacttggaagattgctcccctcaactctagtcctattcctcttggacagacccctacagcccacccagccctctgaaaccccacttcttataacacacccacacttctacagcacttcccataaccacccccgtcatggtaccatagccacccgccttcatgacaccccactccccgtgacccacccaccccaggacacactcactcctggggaacacacccatccatccatctttgcatctttcctggcctcccggcgaggggtcccaccacttttacctgccctgggaaatgatccaggcagaatggagcagcgtctccaccggcctctgagagaaccaagaaagtgttgacgtttcccccagtcagttcctctaagtcttgattattgtctccaagagttaggggacattggatgagagctttctaagtgcccggtcctgccctaggtattcaccataaccctaggagataaaactgttataattttcataaaagaaacctgaggcacagagaatttcagtaacttgccagaaatcacagaggttgagcccaggcagagaccagtctgcacacctccagctctgagggtctaagggttctttctgtattgaggcctggaacagcttcctgcagtcattaatggcatcagagcccggagggagctaggaacagatgctcagtctctgaggagacttctccacagatcggagattcctgctaagtccagtaagggattttatccagaattctccaaagctcccaaaatctcagacttcaggtgagcctggactcacagactagactcttgcaaaggtgaagatttggaaagtaaggctgtcctgctactttcagggggtactaaggagctcaggagagattaacagagtgttgtcagggaattgctttaaaagagattagtggtaagctcatccagtaggtttctggaggttcttggaagcctttacaaggtttttcttccctactcaggtgaaatatatttctccatttgcattggtttggcgaattctatttcctcaaagagtgtgccagagaaactccacgttgctttttcagagttatagacaaagttggaagagacctaacagggcttctaacctttcctgttaatgctgaggaagccagggtccagaggttgaccctgatgctgatgacgacagtacccggttcctaacactggggccggctgggttcgaggtgcttggtctacatgacaatagtgctcggttcctggcactggggccaactgggtttgaggtgcttggtttccatgaggacagtgcccagttgctggcactggggccagttgggttctag[450 bp omitted]ggacccctgctttccgggcagaagactctgcagtgacctgttactgtgtttgcagtcacagcacaaacctgggttctggtgacctggtcctggttctgctgtgtatcttctggtgacctgggttacttactatctctgagtgtttccccatctctgaagttagttaggattgtgtaaagatgaaaaggagccaggcacggtgactcacgcctgtaatcctagcactttgggaggccgaagtcagtggattacctgaggtcaggagttcgagaccatcctggccaacatggtgaaaccctgtctctactaagaatacaaaaattagccgggcatggtggtgagtgcctgtaatcccacctactcaggaggctgaggcaggagaatcacttgaacccgggaggtggaggttacagtgagctgagattgcgccactgcactccagcttgggcaacaagaccgaaaccctgtcttaaaaaaaaaaaaaaaaaaaaaaaaagatgaaaaggaacaaaaagaacatcccttgccaggcacagtggttggccctagtaggcagccatcaatgccaggcgccgtgactgttattgtaggaagtgggggttctgaagaatgccctccttgggatgtcatagccatggagttgtccctagtggccagaagtcccctcccccaaattaggatgctggcctgggtggaggggaggggccagtcctctcggctggtgggtgcacggcctggaccccccagcagcctctctggcacagggacagggacgataagcggtgatggactgttctgagggctccgcggcgggcacagggaaggcagtgtggtgtggggtggcctccccactgataacctgggggagggcgctatcgggagaggaagtgggcagggaaggggctggagggggccgctagagccccagggcgggacccaaccccaggggtcacgtcatccattctctgccaccaggcacaattgcaccgaaccatccatcactgcctgccggcctggcttttttcttctccgaatgcattaatgcactctcactacagaagactccagcaatgcgggtaaaatgccagcgcccttccttatccctctgcgctgacagccccagccgctccctcctcggaggtcacggggctctctttggttggtatcactgggatccctttgctgcatgtttacacaaatatgcatgtgtgtgatgaacataaaattgtgtgtgtgtgtgtgtgtgtgtacatcatgctgcatgtatgtgtttt

SEQ ID NO: 1883187 - DNA, 4001 bp, Homo sapiens
ttttgtagcaatcgagccttgctgtgttgcctaggctagtatcgaactactttgcccttgaattctattgtcttttactagttagtcagtaactgtctctgtatattagcttgttgaaggagagtaagagaggttaaatgttcagtatcaaattctggacatagagtgtacttgtggccaaaggcatggatttccttatccctgcccaaagtggaagcaagtgaataccctctctattagttcccttgggctgccatagcaaagtaccatatactgggtggcttaaacaacagaaacttatgttctagaagctagaagcccaagattaagctgtcagcagagccatgctccctctgaatgcaaggaagaaatctgttccaggcctatctcttaacttctggtcatcccttaattaaggcagccaactccaaacttcttatgatgttctccctttgtgtgtgtatgtaggtccacatttccccctttttataagggcaacagtcaaattggattaagggcttacactgctcctgtatgacctcatcgggttttgttttgttttgttttgagacagagttttgcacttgttgcccagactggagtgcaatggcatgatctctgctcactgcaacatccgcctcccaggttcaagcaattctcctgcctcagcctcccgagtagctgggattacaggtacccaccaccacacctggctaatttttgtatttttagtagaggcaaggtttcaccatgttggccagcctggtctcgaactcctgacctcaggtgatcctcctgtctcggcctcccaaagtgttcatcttagttatatctgcaatgaccctgtttccaagtaagctcatattctgagatactgggggttagaatttcagtgtctaaaattttggtggacacagttcaacccattcaacccattacattctctctggagaaaggcgtaaacattctatgcctcatactaatcctccaaataattttgaactataataaccagtatatagtcaaatttaaccaggtacttaataataataatagtcataaaaatcatggggagtgacagaagatgtaacaagcaaagaaaattaataaaaattggtgaagtttgttattagctctgactagaagcagcatcaccagtaaaaataaactgtcatctgtaactgtgaacatggagagatgggaagcagaggaaagatttacaaaaaaaaaaaaaaaaaaaaaaaaaaaaagaaagacaaaagcagagaggaatacagaagtataaagagcacatgcagtcccctgtaggtaagcatgtttatcaggtaagaagaaatgtgttcaaaaagtcagacttccaaagaatggctttttatcatacctcaaacatctgagcaccctttagcttacctttggtgctaggaatgaaccaaatcgtatcctattgtggtgctagtttagagagaaagttgggcatggaaaacaaagttcatttgtccagtaggatgtctgttttattgtgagcatttaaataaagtacaagtacctactttcattcaatgctacctgtgtcaagaaaaaaaactggactaaaatgttgaatacatttgccccatgtatgcaataaatactaaacaagaagtaaagtgcctctaaaagttccaaagattccacaattcttcttacacatcaagttgcctttttcttgcttgagaatcattaaaacttatctttccaccgattattcagtaattttatggatagtttaattgaccaaagcttttaatttcccatttcaatagcaatatttccgtgatgtatggtatacagttccatgtattagcaaatggaacttactgaacttaagatcagctgtgttagataggcagatggtttgggacatcaagttgactagtaaacatccatggtgaatcttagagtgaattctgttcatttatctttttctttgtagaatatgctgttgcagagcctcccatatcctataattacaaaagtattattaaattaaagctgtgaaaatattgtttattgttttgccttcagtgaaactgtcatcagctctaacctattttttttaacttttattttaaattcagggatacatgtgcaggcttattacataggtaaacttgtgtctcatgttacttgttatacaggtaaacttgagggtgtgctgtacagatgattttgtcacccagatattaagcctagcatccattagttatttttcctgctcctcttccccttcccaccctccaccctccaacaggccccagtgtttgaggaatgcatgttgtttccctctatctgtccatgtgttctcatcatttagctcccatgtagaagtgagaacatatggtatttggttttctgttcctgtgagctctaacctattttctaattcaatagctttatattcataaggaaatattatcatcttctcaaactttataatattgctacttaagatcatgaatataaataaagtaatgtggccgggcacagtggctcatgcctgtaatcacagcactttgggaggctgaggtgggcagatcacttgagtccaggagttcaagaccagcctggccaacgtggtgaaaccctgtctctgctaaaaatacaaacattagctaggcatggtggcgcacgcctgtaatcccagctactcaggtagctgaggcacaagaattgcttgagcctaggaggcagagattgcagtgagctgagatcatgctaccacaccagctgggcgacagaaccagaccttgtttcaaaaaataaaattaaataaataaataacataatgttacatttttattctctcataaccacaaaaagaactctacatcattggtactttttttttttttttttttttgagatggagtctcactctgtcacccaggctggagtgcagtggtgccatcttggctcactgcaagcgccacctcccgggttcacaccattctcccgcctcaggctcccaagtagctgggactacaggcgtccgccaccatgccccgctaattttttgtatttttagtagagacggggtttcaccatgttggccaggatggtctcaatctcctgacctcgtaatccgcccgcctcggcctcccaaagtgctgggattacagacttgagccaccgcgcccggcctccatcactggtacttttcttcaacatctgatatatcagtcaggattaaagtaacttaaatttttaaaaaggagtttactgactcataaatttgaagaatctaaaattgaatatagcatggctggacccaggaattcaaatgatgttatcaggtctctgtctcaccatcttgttaattaagtcttcttttcactcattggctttatcctttcctgccttagacaaatggtataccacctaagcaccccccaaatacgcagtactcataagaaggcaatggttttgttttgctttttacttttttccaagggttttccgtctaagaattgcatcttattatgttgataccgtggcttctaagccagatattattcagacaaaagactgttaaataattgcccaataagtattttgattttggtcacctctatgctgtacaacaaggaagagaagtgtgttcatttgcttagtaaaagggattttctatggctatatctttttgatgcaaaatatctaaaagaaaacaaagaaacaaaacaaaaaccctcaagataaccaaacaacccagcaatctcagtggctaggctttgaaaccaaaatacccattcattgattgagttttcaattttagtaaaggcattgcagtttcatgtgggcagaactcaaaatgcacttacaaaaaacaagtaactaattgtatgaaaaggaagacttagcttgatggtgattgggatcccagaccaaaaatgcaaactcaaccaagtaagaagtactttacaatggatagtgataaagagttgtacttttaagatgctagaaaa

SEQ ID NO: 1883188 - DNA, 4001 bp, Homo sapiens
tttaaaggcccaggcagaggaagagaggcatatcacttaggtcatgggatcacagatatgtccccatgtccccagtaggcagaactcaggcagatgaggagagtcatatcacctagatgcttccctagaaatatgtcacaatttaatatgtgggcagaaactgggcagaagagccatatcatttgagtgctgggtgttgagatatgtcacaaggctctcttaggacagcacccaggcaagagagttacatcacctaggtgctggttctctcttatgccacaatgctccatgtgggtaggtcccaaggagggagtcacctcacctaggtgataggcccagggttatgtcacaatgtcctctatgaagcaaagccctggcaaaagagtaccatcacctgtgtgcctggcatagaaatgtgtcactctccaggctggcagggcccaagtaggagagccacataacctagatgataggctgagagatatgtcaaaatgtcctcctttgggcatggctttggcaaaagagtaccctcacctgtgtgtctggctttgcaatatgttactatcattcctttgtgcaggacccattccagagaggaaagttacatcacctatgaggtggacacagaaatatgttacaataattgtggtaggcatggtgcaggcaagaatgtagcatcacctgagtgttagatccagtgatatgtcacaatccttactgagagaagggcccagccaggagagtcacatcacctggaggttggcctaggtagatatcacagtcccttctatgggctggaacaagtctggagagtcaaattacacaggtgcttagaaaagatttataccgcacaatcatgctgtcagaaaattccaaagatgagatttacaataccatacatgtcttgttttcatgtgtgacagttcgcttcatccatgtgagataacgacagtccttactgtcagctggttctgcataaaagactcacaatttcgcctgtgtgctgagccctacttttactctgtctgtataacccaaagactttgtaaaatatgtgagaatgttgtaatcttttgtaacctttttacaagaaggtgacctaggacatcacacatgtccctaaacctagttataagagtcataatatcctctgttggctgagtccacatatgagagtcattatcatgtctgtgacccatgcctaggtatatattacgattccctctgtgattatgaagcaggcagaacagctacttcagggctaaatggtgggctagaaatattccaatattctctttgtaggcagggtcctgtcagaaatgtcacataacttgtgctcttggtccagctctgtggcacaatgtcctttgtgggcagtgtccaagcagggagaggagagtcttgtcatccaaatgatgggcctccaaatatgtcacaatgcctcttgtagacagggcccaggcaacacagttatatcatttggatgcagtgcttagaaatgctacaattaccaaaggaagcagggtacaggcaggagatgagagtcatgtaacctagatgatgagtccagaaatatgttacagtcccctcagaggacattgttaatatagcacagtcaaatcaccaaggtgctttgcctaagtatctgtcaaaatctgatttgagggatatacccaggtagaatttttaaatcattcaggagctgagcaaaggtatatgtcactagtacacttttgcaaaggtttaagaataagactcaccatcctgcacatgtcctggctccaggcatatgagttgtaattaggcttttgttagggtctcaggcatatggagcaataccacctgcagccagagagaaggcaagaaagttacatcacctatgtgtgtgcaggtccagtgagatgtcacaatccaccttgtgggcaggaccctggcagaagaatcacatcacctggatgctggtttcagtgacatatcaaaccgctctctgtgggaaggacttaagcaggagaggggattcacttctaggcaatttgcctagatatatgtcacaatgtctgttctgtgcagtaccaagcctggagagtgacctcacatttgtgctgaacccagcaatatgtcacaataccctgtggtcagagcccagtcaaaagcaaagaaacatcacgtgctgagccaagtgatatgttacaatgcttcctgttggcagaacccaaaaaggagaatcacattacctgtgtgaagtgcccagttgtgtgtcacaatgcactgtaagtgcagggctaaggcagtagaagggagtgacatcacttatgtgatagacctagatttaagacacaattctctttgtaggcaggttctaggcagataactcacatcacctggatgatggtcccagtgatatataaaagtaccctttgtaggctaagccaaggaaggtattacatattgcttagctgcttgttccacatatggcacaatttcatctgtgttctgggcctagaaaagacagtcaaattattcatgtgctgggcaaagttaactgtcccaatcacgctctcagaaaggctcagaaataagtttcatatcccacacaaatcctggtttcctgtatgtgagtcaacactttctgtggtttgggtggaagtagaggagtcacaatctcaacaatgggcaagatccatgtataactgccccaatcccacttgaaaattgtgttccagtaaagaactcacagcaccacaggtgtgctgaatcatggttcaaatattaccaattcacctgtgaatcagatccatgtataagagtaattatttcaacttttgactgctttttatgtgtgagatttagtacctcattcctaggccctgttcatgtgtgagcacgacaatcatgtcagccagatgtgcatagaagaatcatattctcacttagttgctggtctctgttatgacactcttaacccttcatgaactttatacaagtgaaaaactgaggactttacccatggccacgagactggctatgagtgtcaattatttctactttctggatctaggtatgagagttattattgtgcatgtgtgcttaacccaggtatatgtcacaatttcacctgtgagcagggacaagccaacagagtcacatcacctgggtgctcagccagtgatacagtataatctcatttgtaggctgggtctagccagaagagtcacatctcctgggtacaacctcaaagtatgtcaccaagcccaccatagacagggaagaagaagaggaaagtcactccacctaggtgctgggctctgcaatatgtagtaatcctctctcttggcagagtctagaatatgaaggacagtgacatcatttaggttttgctatcagtggtatgtcacaatttctttggtgagcaggacccaggcaggagaggagggtcatattaccctagatgttaagtcaaacgatattacacaatctcctctgggggcagaggcaggagagacaaataacccccttataggcccagatatatgtgataatatcccctgttggcagggtccaggcagaagagtcacattattacaattctaactcggtgatatgtcacagtgcacccatgggaagaaatttaagccaaaaagtctcaacacctgagtactaggccttcatctcctgaatgaggcagcgacacctacagaatcctcaggcaataaccctgccccctcatgctaaaaaataacccaactctctacgctattaaaatcaatcgtgaataccacatcgtactcaactattcatcgaaccaacatcaactctattaataatcctaataagaaagcccctcaaatgtcaatactttaccctcatatttcaggatattcctcaatagccatagccatagtataaccaaaaacaatcatcatgccctccaaataaatcaaaaagactattaaccccacgaaacccacaccaaaattcaacagtatatcacaacccacagc

SEQ ID NO: 1883189 - DNA, 4001 bp, Homo sapiens
gagagcgaaaacctatttgacattaatcaatcacttttgaatccttgccacagcaagtaaaatgtgaggacaaaggaacacagactgggtcatgattcattagtacttaacttagatcaagctaaagcagacaagaggagataaatttcttatcaaacagctttagtgatgatggaagatttagactctatttcagcattttgcttattgaattccacatagacaaatttatcattttgaatctccccagtaaattttctctgcattcaaataaatgataagctatgggcgaagaaattctctcctttaatactttaataccatatacaaatctagtcatcacattagttgaatcctagaacctccttccttttgtgaattaaaaacttacagctcttggaagaccaagatatcaatactgagaataatcaaagggtacatgtataaggatggtgatgggaggttaatctcaacagatacagaagtaaacaaagcttggcttaataaagcaaatggttattttaagcaacatcaaatttttataacgagatcagtaatggagaatatataatgaagcttttcaatagagttcaaggattgaaacgaagtgtgaaaaacacgacattttagaagcacacatctatacaacactgaaattaagattagggatagtaagtgacatggcaggaatttctttccatttttttttaatttcataattttttttaatttcacagatttttttgtttaatttcacaaggattagtacatgagccattatttatctggcttagtaaaaagttttctgcctatcttagctaagagaaatggaaggcaacactttgatatgagtgaatatagcaataatcaagaaattcctattctatgagatgtggcaatggtcgcaaataaaatgtgactagtgtccatgggcaaggtgaataattaatatattcattcactggggacctacatatagttcccaatgaatgggaacttttggtattaaaaaatttgtataaaggtaattttttggtataaaagaaaattattagcttaaatttcatcctgtgctctcaggaaaaagaaaaatactattggtcgttttttagagaatgatactaggtatcagctagcgtactcaagacctgtgatatatacacatcatgtaaaatttaaacacaccaacacttactaacatacagcaatagcaccaatatattgaatagactttaaacagattattttcattaattaaagaaaatacctgatatacctcacacagctacctgcaaaatgctgcaaacacagcagaagctcaatagagatattaattaatccagtcagctaatggtgataccgtaactacaaaagctgtatccaagatgatagagttcttaactggcctctctgtcttcagtctcactgaagtcccaccctctagactgcaaaataatctttccaaagatgaaatttctactatgacactctattttttaaatatttagtggcccgcaaaataagttccaacttccttagcatgtcttcctcacacggcccttcatgatttggctgttatgtatctagacacccttagatcctgatacttccacacttattccctacactcccagaatgctagacaaccagcaattccttgagtataccttgtagtcccgtttcatgccttgatctctatagcagccatcattgatacccacccatatccgttcagcactcaccatttctgtgaacctctaactgctggctttcacctgcgactctttgcctgagggctttctcaggtggccagagctaatggggcccacacctgtggaaaatctaaaatagagaagaattaacatccatagggagcagctctcaaccacagaatgactggaactggtgagcagctccaagtcatagccacactgtttcccagggtgctcccaaagaactgagagacccagttgctcacagaagtaatctgccagaaaagacactctttacagtcattcttcccttccttatctcacttcccactcccctactagtgtttcctcccaaataaactgctgtactcaactctttgcctcagagtgtgcttctgaggagaatcttgtccaagatagtccctttacaagtatcgttcccacttctggagaatatttttcctttccttcaaacctacttgggaattcttcaccatcctttaaagcaaaccttcttaaaatttaatgtcatacaaatgaccagagatcttattaaaatagagatcctgatttggtatgtcctgaatgggatctgagattctgaagttctaacaggcttctggaaaaggcgaatacccccagtttgaaaaccacactttgtgagtagcaaatatttaagacacagttcaaaaacctatttctttggaagtcttccctaaaactccttcattcctatcctgatgattaatttttctttttcccctatgtttattactgtgtgtggtaattctttgtttacaggtctatctccaatgagtttgttcctttaagatgaggattgtctttttcttatccatgtatccacaataactagcatatagcctgacatattacccatacctaagaaatgtttgtgaactggtaaaattaatgaacaaattataattttatggcatacttcaccaaaaattttatatgtacacatattgtgttctgacacattcaactaagtcaactgtgttataaatataaattgtataaattcttcagatttctggtctatttttacattaaatcatagacttcaggacttctgaacaatgcagattatagaatttctgctgtagagatatttaataggctatgtcaacatcagcttaaaatggtttagttaactgttatctaaaggtcaggaaaagtatcaatcactagaatcccttctttgtattcatatttaaaatctgtggatgaatgttgtgcaagttagtcattcattgggtttagggaagtggagaaggtggtggcagtgtgtgtgtgtgtgtgtgtgtgtgtaggcacttgcatgcattttgggggtgggagatatattagagcagaaatcacaagaacatcctaggaggaagtactttatggactgctctcttacctgccacaaattgcttgcaaatgccattgccctcagaatctcaggattgaacttcttgtttattttagttgcttccttcttaagaaaaattcaatgtaaggtggtgaaactaaatctatcaagggaatagctatatggtatccttagatggacaactaatggaaatagcatctgatctttctactttaagatgcaagaacagaaactagggtgttttgagcatatcaagttctgaactagataatagcactgataatggactaaagaaaagtgatatgtggagcccacagtgttgactggaagtcagctcctatctcattccaacctcattctcttaccattagaaatcaaccctgagcatgttagaaagatgttctcatgacaaggaaaatggcaactgaaagcccttgacatattaagatttgactagatcagaacttgaataacattttgtactttatttgcatctaccacattgtattttaattcttactgtctaggtccatgtttccaattaggttagtcaagtccttgagagcaggaatcaatttaattcagttttttattcctggaatatcgcttgacctattgcagatgttcagttatcactgttgagttaatgaatcaatgaatgaattgatcaatgaataaattatagccacatcataattgttaaaagaacactaaacagtggattaaagctttgggagtccagagagctagggaggagtcacagtttctcaaagattttactagttcgaaagggtgtatttaacattaaaacaacaaagagatatacttagaacccactctaaacaaagactaataataacaaggactgacgagaatgtaagaactggaac

SEQ ID NO: 1883190 - DNA, 4001 bp, Homo sapiens
tagccaccaattcctctaccaaccacaccatccgtaacatttccactgccctctcactctgatccctctagtctaggccacatggcttgcatccgccaatagtgtatcagcaaacataacataggcagagacttgaaaggcacttgtgcagttgacttgtcctgctccactgttttggaactctgaaaccatggaaagaagcctggctgaggtgctagacaataagaaacacgtggcccctgctgacgacctgccaatgccgtgacacagaagtgaggcctcttagatcatccagccgccagctgaccagaaaggtgagtaagagcccagctgagcagaaccaaggtaaaagaaccacccagctcactcagaatcccaagctaaccaaacgattgtaaaacgtcactaagttttgtggtgatttgttacactgcaaaagtggatacagtagcacatacctcagtggcaattttacacatctttgattagcttctatcactgccacataactgtgagctctctaaaagcacagactattctgaccttaggttactgtgccaacctcaaagccaagcataatacctggaacacaccaggcatccaaccaataacatgctgagcgaatgcaaggagcaaagagagatacacattgtaacacaagcgaataggggaagttcaaaacaaaggactgaggacatctatttgtacaaaataaaaacttttaatcagcagcacacggcagcgaggaatacaagaccaaaatcacatttaatctgtctcaaagggttcaaagtctagggtacaggaggcagtacaaaatcaacgaagtgtactgtttgagcattccaacacttcgctccttcagacagtattaggaccccgtcccaaagcgttaggacaaggccctaacgctgcctgaaaaagtgaagtgacggaggatcccagagaggtttcttgaagcagataaagtctgaattgaggccgggcccggtggctcacgcctggaatcccagcactttgggaggctgaaggggggcggatcacttgaggccaagagttcaagaccagcctggccaacatggcgaaaccccgtctctactaaaaatacaaaaaatcaggccagcatagtggtgcacgcctgtaatcccagctatttgagagcctgaggcaggagaatcgcttgaacccaggaggcggaggttgcagtgagccgagattgtgccactacactccagcctgggcaacagagcgagactccatctaaaatacatatataaataaacaaagtctgaatagagtccttgcagtatttactgggaaaagcagcacacgcaaggccaggagggtcaaagggacagaggcgttcaaaggacaaaggagagcctcctgtttgtttggggttttattctttttgaatttttgttcccccaggccaactctaagagccagaactgttcgttatttatctcagcacaggttcggtgtaagcgttgcctccttacccgacgctcaggcccttcaggtccgggacccctgcttcttaattatgtttctattactcccagtgtctaacacaatctcttccacgaagtcggaacttgatacatatttgctgaataaacgaaaagttaaagatgaggcagaaagcacagctccttccaagggcagctctcaagagcccacgttttcagattcagcagtgaagcggacgcgtctggtacgagactacaagtcgcacaggcggagagggggcccccgggcctctggtttcacgtctccctcctggtccccggcggaccggcgtcttttctcccctgctcggagtagcctagcagcgctggaggctggctgtctggtaagcgcggctgttagagaggatggaggcgccgtagccccgcggtgcttctcacagccttcgccggcagggacgcgcgggacaaccgcgcaggcggctctgcaggggtgggcgcgccatcacccctctcggtccctgcctgcttggcgctttccgagccccagccgcgctcaggctgcctcgggcattgaccgcgggggcgcgcgccccgtttccatagaaacgcccggcctgccgcggcggcgcgaggggcgggctttcaggctcccggcggctgcttgcgccccagcgcgcgcccaggcgccttggaatccccgtccttgggcccccgcaaggtccccggccgtgcgcgaggcagcatgatgaggcgcaccctggaaaaccggtaacagcccgagcccagctgcccagggccgcccacactggagggctggggtgagggaagtggaagcctctgtccatggggcctctgcgccgaattccgaccctgagtgggaggctgcacggtccccgctgtgacctggggcctaattccttgggctgcagccaccgccggcggcgaagaggagcccggggcccggccggctgccacccacccacgccaccgggtctcgggtccccacactgccgcgggcagtgcggaagcctaggaggcagccgggcgcccaggccgcgctgcgcggagcagccggagcagccacctccccagttaaggccaggcccacccggcctgggccttttcctgtgcctacacagtccggatagtgaggtcaggaccccatggagagcagtccgcgccgggagacgctgggtcgttgatgggtttacgccttcaaagctgcagaatgcccggggaatgtttgcatgttaaattaacgtgaagccttctcatctctaacgagaatgttttgccttttgtgtcaccttttccctaggaacgctcaaacgaaacaactgcaaacagctgtctcaaatgtggagaagcattttggagaactgtgccaaatcttcgctgcctatgtgcggaaaactgccaggctgagagacaaagcagacctcctggtgaatgaaattaacgcgtatgctgctacagagaccccgcatttaaagctgggcctgatgaactttgcagatgagtttgccaaacttcaggattatcgacaagcagaggtatggagtgagatcacagtgtcattgttatgaatgagccatgaagtagtggatgaaggaaccgtggaaactttcacttgtaatctacctaactgcagaggtggatgcaaacttgataaaacgtacattttcataagactgtgtgagtctattaaagagaagcgttctgtgttttattttacccttttcaagctaacctttagggcatcttgaggtcttgaatttccccactttatttgccaacttttggccaaggggtggctgtttactgggggtagtgggaatagtacccagggggaagaaaataagcataacttaatgtcttgtgtggcacataagtacgttttaaagaatgactggagatggaaatgttgggaatggtaatgtggatggataaattattaataaatgggtaagacatcattgctgcatccatggtttggaaaattgaccaatggtttactaacaacaacaaaatgctatgaattgtatcatggaagcaaaccaatactgagacaccgtgtggactttttgctctgggtagcaggagaagtgtccttgtgattgttttctttctaaaagcccatatttttcctttaaatacttaataagcacttttacttgtatttattttcagtttcacggcataggttaacttatcagaagttgcccagttagaactgcgttgcttttttatacttttcagaacctaaaacgggaatttcaattttcaaaaaacagaatgagtataaaaaaaattgaactcatcattgctatccatacaaatttgaagagtaatcatatttggaggtacttttggaaaaatgtggagttcttgtcatgaaacttctgtaataaacaagtaactctcaattatatatgataactggggacttaatgtttcaaagataatttatattcacaggtaatcctaaaatcttattttagccaataatttcaatgcccctttgtagaa

SEQ ID NO: 1883191 - DNA, 4001 bp, Homo sapiens
tgtgaagctctttatagcaaagaatgtaagtatgcacagtagaaagaacacggttttaggatattattaaggtagtgaatcccacctttgataatgtgctagtgaaagataagaatatataactctaccagacttgttctaaggactagaatagtgaattactgtttctatattccatcttttaccagaacaaacttgagataattcaaaatgtcacatgcttggcacatagcaggtgttcaataaatgtaaactaaaaataacattaatatttcatactgagcctgttacaatgactttaaaatgaaattagatgtgatcctgtgactgttccatgaggaatcacattagacaaaaacaatactgctgagaaagcagtcagaatttcctggggggtgtagggagaaacaagaataggcttggagtcaaacagtaggtcctcctaggtccatagactactataaattaatgatgataataaactgacttgaaattcagcatcaaaagtttactagcaccccaaagatcttaactgataatcacattaaccctcttatgaaaaatagattacaataattatactagatctttgagaatccacctgagtgacctttctattacatatgcaacaaagaccaagaaaaaaggtccagagaagcagaaaacatgcttgcaagtgtggtgtcacacaatccaagaaaggaaatgcctcaaatagtacgaatagtcatcaggaccaagtgatgctgaatgattaaataagcaaaaaattcaaagtgccctgctgggctgagagtcatggaaatcattcataagagcaagtagaattgctggttaacacaagcaatttcagtgggatggtaacagtggacaccagatttcagtgttctgagaaaagaatgagagggaaccaaggagagattgtaagtgtacatgacactcaaatgagtttggcagtgaaagacaaaagtgagttggaaggtgctgtagaatgaagggaggttttcctggaagttcagaaaaactcactcacatttaaatacttaagagaagaagcatgttgaagttacgtgaataagaagagcacaatagaatacaattccaggagaggtaaaaagataggtgatctagaagaatggtggcgacattaggctttgatgatacaatgaagaggatggatttatcattcacagtagcaagtgggaaggagaagaggatggggacctggccactgaatcaatcctggccactgaatcaatcacaggacattgaaggagttccaatctgatggcttctattttattcctgaagaagtttttctctcactcattcctctgacttgtaaattaaataggatttttttcttttatccattttccatttggagaaacagggacaaaaatggtcaatggttaaataactttggttgtatgtatcccttttgataatccatgattcttcttttaatctgtgaatccacccataatccacaggtacatacacactgagaagtatgcacacaaaacagtttctaagctgtgctctgattcgttaatagtttctcaagttggtaaaatttatatttgagttacaaatgggtaaaatatctactcaaataacatgtgattttagtgcggcagtattgaagccaacgtctcatgtaaagatttagggctttttcatcaagacactgtattggaaaatcgcctgctaagaatgtggtcattaccgtacattttgtgtgcaaagcaaaggcggttgatactgtaccttggcgaagctgccttaaccacctttgtcgctgcccaggtgtttcccatgcctgtggcagacttagaaggtggaggagtggagcctgccagaccagttgcaaagtgcagaacatgcctcagggcctccattcacaatccaatttgccttagcgcctgtgcccagccttagcactggaaggctgacctttcgacacaggtaagttcagcaacaatcacttggccacagccacagattctgcctggtgccaggaattctatggtctcttgggtgacggccacttggcagcaattttcagagttctgctctggcacagaataaggctgtgcatgtgtgtgtgtgtgtgtgtgtgtgtgtgtgtgtgtgtgtatgtgtgtcttttccatagttaacattcaacacttgctggaagggagagtgaaaaaagatatagagttggaataaaaacaccggtgtatctctcttctctctttctagcctattgtcataacactctggctctgctctgacttcagtgacagtgaaaagcaaaatggaggaaagggaaaaggaagatgggagaaagataaaaggaagaaagaagacggagaattctgaaacttggaggcaagagagggcagaagatgaaacgctgagttaaaatattatcctggaataagccccacatgtctttgggtagaatgtcaattcaccccttctgtctctactttcttccaattcaaaccttgggcacactgaagtggacacacaagaaaagtcttttgttatcatttttacaccttccatatttgtggtctttgaattcctctaataaatttccctctatcagtggaatagcaaaacttttcatgatgcttcttaaagtatttttaagtcaggtctacacaacacaaagataattgcttggttaatattaccagttggacagataagtagataactcaagccaaaagtatttctttgcctgatgaccaaaaatccacttcacactgagctgaaggggaaaaaaagaggcaaatattaataacagtcaagggcatatactttgttatgaaagacgttcctttctcatataatttccaaatgtgattctgtagtaaacaacacatctaatatgaataattgaaatgattttccttgtggaagcaagctcctctgttcttttttatattatggaactacacctggaattggtttcaagggaaagtgaatcagtttaactgcctcagccaaacctagagggccccttgctctcatctgggctgggaaagaactcaaagtagcatctaatgatgattttagtgcaatatctggcacatagtgaatggtctttaaatattagctgtttttatccaatcaggagaaaaaaccagaactaaacaatatggagagcttacacatttagaaaaaagaaagaaagaaagaaagaggaacaaaagaaatactaatggttctttgtgagtatgagcaattttaaagacattaataaactggtggaaatggaatctaaattctaagcaactcaagagtaataaatgtgatgtaggataatagaggaaagtgtagactacccttgagttaggcagtacaaagatgtaagaagatgataatacattcatatcatcagggcttagagtctatcaggagaccaaataattacccttcagaatacatttattcttgatatcccaagatggccgaataggaacagctccagtctacagctcccagcatgagcaatgcagaagacgggtgatttctgcatttccaactgaggcaccaggttcttctcactgggactggttggacagtgggtgcagctcatggaatgtgagctgaagaagggcagggcatcaccttgcccgggaagtgcaaggggttggggaattctctttcctagccaagggaagccatgacggacggtacctagaaaatcgggacactccaccccaatactgtgcttttccaatggtcttagcaaatggcacaccaggagattatatcccacacatggcttggcgggtcccatgcccatggagccttactcactgctagcacagcagtccgaaatagaactgcgaggcagcagcaaggctgggggaggggtgtcccctattgctgagacttcagtaggtaaacaaagcagcctggaagctcgaactgggtggagcccaccgcagctcaacaaggcctgcctgcctctgtagactccacctccaggggcagggcat

SEQ ID NO: 1883192 - DNA, 4001 bp, Homo sapiens
cattcatttatctatcttttcagctgttagcaaactatttatgcaaattaatagcacattttgaaaggcaagactttttttctccattacaaaaatgttaagccatcttaatattaaaagacagcatgtgtaattcaaaaatgttaactttgataactttgatttatgtaaaattaataaagatctcacacctcgagaaaaatgagtcttcttattcaagaacgtgaaccttcttcctacttcaaagtttccttctaaggtctctcagcaaagaacatatttacataggtattcattgatataaaatattggattttagccaaaaaattattagcccagaaggtgatatattatgggaattatttctttcattatgtacctttccataacgtatctaacattatcttttaaaatgtgtgcattaaaaataaaacaatatatacttaattttattaaatcactttaaagttctctctgaagtgctctgtaagaggaactgtgggtggaggaaccagctaaagttttgggtttattttgctgctcataaagatggcctgggccctccacccccaaggcgtccacatcccaggctctgcggagtcctcctaggaagaaagccagcgccctggggacgaggacggcccaccccgcacacactattctttccacgcctcccctggcccccactccccaagcccccaattctgaaggaggtgcttctccccacctgcccacctcctccctcaacccccaagcctgcagcccgcagttcccgacacctgttcttgtagatttcagactggtcttttctcttcagcgggagcctcagctgcagctcccacgcgttcccctggacgcagctttgtgtatcatcccgacatcctcatctggagtctggtaccaggggtcagagaagatgcagttactactccaggagctcaggcgcacctggcccttctggctctccacagccaagatcatcttcatggcccagctattggcttcagagacgccacaactcgccctcgcccttcccccagcccagcccccacccggcccccatccggcccagcaccagaaagcaaggcagtctggcccagacctcagacagggaccctccaacttctcggacaaggacgtctccaacctctcggagaataaataatatacggagcagagcagttgggccccagcgcccatgggacctcaaaaggcaaccgccttgcgcgtggccagaaactgcgtgtggccagaaaccgccctgagccgagcactcgccggcaccgcatgcaggtggcagctgctgctgagacgcctgtggactggccgagctccctagagccgagcgcgcggtcccagctgtctcagggcccgcctaacgacgctgccccctgcagctgctcctcctgtgccctcttttgagcgcgaggtcttgagtgctgggcactgtgcagccgcctacatggggctgagccactggttcccccctcctgcagctgaagggccggccgcccgaattaggcgctgctggggcatctggccaggggtccgcgctgctggtggctcgggcagcgttgagagttgccacctctgctgccgcgcgccatatgcagatgacagctgcagctgaacccaaggcggaggctggcaaggctggtcccagagggccttcaggtctccgagtgcaccaccctcccaactggggtcctctcttccttgccctgcgcccagagaacgaggtcgccagtgctggggactgtgcagcagcctaaatccgatggctgagcagcgagttcccgccctgtagctgccaggccaatcgcctgaattaggctcctggtgacgtctggccctgggtttcacgctgctggtggcgtgggcacggtgaaaggttgccatcactgcttccccgcaccgtgtgcaggtggcagctgcagctgagcccacgatggaagttggcagggctggtcccacacagctgagggtcgcttagtgtacatccctccaaccccaggttccactctttttttgtcccacgcacagagtgtgaggtcctgggagctgggcaatatgcagcaaccgggatggggctgagtggacctttctcactctcctgaagctgcagggcccaccgggtgaattatgcggccgaccctgggatcctcattggtggtggcagtgggcagggcagcggttgccaccgctgctgcagggtgccttgtgcaggtggcagctgcaactgagcccatgggggagatcgactgggctggtcccagacgtcctgaatgtcaccgactgcatggccctttcaccatagggtccgatatggaatcttggccagctccgagagctccgcgtcgtgggtcctgggcactgtgcagccactgggatggggctgagcaccggttcccatcctccgacagctgcggcacggaccacctgaattagttgaagtggcaatgtctctccctggggtccagggctggtggtgcgggcagggtattggattgccatctgtgctgccgcgcgccatgtgcaggtggcagctgcagctgagcccaggcggaggctgggaggcctggtcccagaaagcctgagggtcgccgagtgcacctccctcccaccctacggtcagctcctctttctcccgcgccctgagccccgggtcgtgggcgctgggaactgtgtggccgccaggttctcttcctgcagctgcgggttcccttcttgcagctgtcctgccaaccgcctgaattagaagccctggtagcctctggccttgtatttttcactgctggtggggccggcagtgttgggggttgccatctctgttaccgagccctatgtgcaggtgacagctgcagcagagtccttggtggaggctggcagggctggtcccagacagccttagggtccccgaggacaccagcctcccattctaggctctgctgctcctcccattctagggtgtgcccaacctcccattctagggtgtgctcttccttggcacgaggtggtgggttctgggcactgtgcagctgccagtatgaggctgagtggccttttcccgccctcgtgctgctgcaaggcggaccacctgacttaggcgcggcagtggcatctgacatgggagtctgcgctgctggggcccagaggggaagcgggaagttggaggctgcagggccacttctatcagtgcgcaacctgcacgtagcggctgtagctcaggtactggctccggatatggggcttccctcagaaggcctccaggtagctaagtgtgcctgctgccaggcctcagggtccactcctccttgacctgcatctggagagcggccctgttgctgggtaatctgcagccaaagacaatggggctgagctgtggttttgcccattgttccacagcccagccagctacctgacttagcagcctccatggcatctggtcaggggatcagtgctcctggggatcactgaaactaaagtaacaattgaatatgagttaccacctacctgcttggaggtgtgaaagaatgtttataaagcagttaggagatctccagagaaagccaacttaacataaagcaagactttcttactaatgggtcagagtctcacctttaggaagtccatgaattttctctgcagtgatgcaagaagggaaaaacaaggcagctccagaaaggtgagatgtgtgaaattaaactggttatgaagtcagcccagtttcaggagttcttttcctcttcgcagatggatgtgaaaatcctggaaagtctccaaggtccacctctgtactgagaagtggctttctaatggacaggtttcggaaaggttcattatagatatgtagtctctgtctctgatgtcagagatttttagtgaaaaatgtcctttgatctgcagaacctgctctacctgaagaccagcaacagtttgaaagcaggggccagtgggtgttgagctaaggatggagttgcagcatgagatccgaggtgaca

SEQ ID NO: 1883193 - DNA, 4001 bp, Homo sapiens
tgcaagctccgcctcccgggttcacgccattctcctgcctcagcctcccgagtagctgggactacaggcgcccgctaccacgcccggctaattttttgtatttttagtagagacggggtttcaccgtgttagccaggatggtctcgatctcctgacctcgtgatccgcccgcctcggcctccctgtttcctctttccattccttcaagggagtatcctgggtcactgtagtcaccctgggaataaatttgtagtccaaaaggactagcctctgtccatgagaagcgcaatctcatagggaacccagaaaggccaatgggcaattgctagtcaaagcttctggtgctatgacagtgctagggtttgtggagtagaagggatagatccctgcctcaggtctgggggctcaagaagggcttcccagaggaagtagcctcaggactttggagttagattggaaatgctggtgcatcttttgcttgggagagactttgagtctaggagccaaggaaggccaagggggtggcccaggggaaatagaatggacagtaggctgcttgacattgcctttaagctctagacaagaaaggaagggagggagggaagaaggcttccttttgccttgccgtgactcaaccataagtctcccttcaaaaaccattctagttcatgaccactcagcatattcaaggacaaggggtgcctttggttcactcctgcattatgactcttgacatatgacaagcagctgggcaaggctcagacccagccaaaacatcttctgtcacaaagccaaaaagaactgcatgagctttttaaaaaatcactactgacaaatcccacaaccagtctcagtgctgaaaggtgagtgaactcaggaatgggagtcaggaaacagcttttgatttaatgtagtgtgtggtcttagccactcatttgactgacttgggccttattgcctcatttaacttataggattaataatacctgccctacttactcaacaagtttgttgggaggataagatcacataataaatatgaaaggtttaaggcatataaaaataaagcccatgactgtgtccagtgttctttcaatgtgttcatgtgcttctgctttggagttaggtattgctcttatccaccactgaatgtctgggctgtcctgtcttttaccctcaactgtcaggcattggtccccctgcccgcattcaccttcccatgacacttgatcaaaagctgctactcatatggccatggctgagccattccaagcactgaatcatgtcatcacttagcatcttcaaagtattcatatggccctttcactttaagacctttaagcccatattccccaagtctattcagagtccaacaccagtggagtgtgccccctacagtggctcagagaggaagccttcatctctggacaccatagtcctgggtttgcccactgtgtctaacagcagtctcccaacctgagcatgtctttcttcttcctgaagatgatcttctggtgcacctaccacaagtgcttggggctgcttcagcaagaatgatggaagcatcaccccacttctgctatactctcttgtctgtccttggggagggttatgccaactggctcattaacataatcagtatagttttgactgtgccctgaccagctaggctaactgcctagctcatatcaagtactcagcaggtgcttgtcaaataaacaattagatctcatcatgggctgagttatgtcctcccaaaattcatatgttgaagtcctaacctccagtacctcagaatatagttgtgtttggagataaggtcttggtattagtctgttctcacattgctataaagaactacctgagactgggtacttatgaaacaaagagatttaattgactcacagttcagcaggctgtacagaaagcatggctagggagtcctcaggaaatgtacagtcacggtggaaggcaaaggggaagtaggcacatcttcccatggcagagcaggagagagagaaagagagagagacagagagagagagagaagaggggaggtgctatacactttcaaacaatcatatctcatgagaattctatcacaagacagcactagggggatggtgctaaaccattagaaaccacccccatgatccaatcacctcccaccaggccccacctccatcactgcgaattataattcgacatgagatttgggagatgacacaaaaccaaaccatatcagtctttaaagagttaagttaaaataagctctttaaagtgggccctaatccagtatgactggtgttcttataagaagaggagatttggtcacagacatggttgcatgcagaataaagacttttcgaggacacactgagaaggcagccatctgcaaaacaaggaaagagtcctcagcagaaaccagtcctgcagactccttgatcttggacttccagccactgcaattgtgagtaaatatattttctgttgttgaagccacccagtctgtggaatttttttgtgccagccatagcaaattaatacagatctgtttaagaacacataaaaatactaatcatcagctgggcacagtggctcatgcttgtaatcccagcactttgggaggctgaggtgggtggatcacctgaggtcaggagttagagaccagcctggacaacatggtggagccccatctctactaaaaatacaaaaagttagctgggcctggtggcagatgcctgtaattccagctacttgggaggctgaggcaggagaatcacttgaatctgggaggtggaggttgcagtgagccaagattgcaccactgcacactccagcctgggtgacagggtgagaccccatctcaaaaaaaaaaaaaaaaaaaatatatatatatatatatatatatatatatatatatatatataaatcattccacagaccagcagtcagttgcaatctggaagttgcagtcttaaccagtaagtaaatgttgtgaccatcatagtggggactctggtggaaagtgtttttggctccatcacagtttcttggacagccagaagcccttggagatagatgaccaatagtgtagaaaacataagccttcataacaggaaggcagcgactgctctctgggtgtttacgggatctctctgtgttagattagaagataatatttctccattttatgaaaaggtgatttggattctgcaatgaatctgtagtaaatttagaattgaatcacagctggcatattttccaaccacaatgtgccctagctgatctttgcttcctctccttcctcatctgtacttgctttttgacagatggcaaaccctaaaggacatacataagtacattctatagatattggaaagtgggggaaaatttgaagagtaaaccaatatttaacaatagaaaaaaactgcaaaagcatctttacctcggtagccttggcagctgggacaaaaactaaaagctcaactcattaattatgccatgtctctccttacagctctaaagctgaattaaagagaagtaaaaccataatgagcagccaagaggaagtccccaggggtccagatgacagaatgaagcatgcatgttggggagatgatcagaacaggcacctggacccctgtggggtcaagggctctgctctcccctacatgggagctctgcaggctgctctcccctctgcacagggaacctgtgtttgcaacctgtctccctcctgggcctgcccatcgctgtcctgaccagcagcctccatcagtaggatcctttttgttttctctttcttcttccatttatccacaagccttactgagagcccaccttatgcgcagctgccaagagtccaaaccccatcctccaaggttggtggtgtaggagaattactgtgtgggtaaaggagactggactccgtgggtcctgctcttgcctctggagattcagcttccccaatggctcctctccctgattatgattgccat

SEQ ID NO: 1883194 - DNA, 4001 bp, Homo sapiens
ggcattacgtgggaaggcatctggaggttttacaggagggcagcacatcagcgaagggtacagcaacctctgaaggaattacggggaagcagttactaaaaagaggctcgtcaatgtggacgtttgtggggcaaggggtttagtaatcggaggcttaaaccatgcctaagagaagcatccagcggccttcacagtgagcagaaggggcagagcaaggcgcttcacaccccaataaggcccagcactgactgctttcttcttcccaaacctgtccagaaagggcggaggggacaccaggactcagaaagctactggtttcgggggaggtatattttgaaggcaacggcaaatagacaagggcttgtgaaggctcaggggtgagagaagctgttctccctttctgtcctgcagccaagcttgccttctgggactccagaggcagcccagcacctgcagtctgcaggatgtgcactgcagctttctctctgcgggggcaagcaggttgtgccacattctgcagacccagagaaggttctggaagtatctaggtgaggtgcaacacacttaacctctgcctgactctaaacactgctttaggagggcaaatgaagagcctaagagttaataattacacaaggattgcacacagtaggtacttaataaatatttggggaaactgaggccggggaggggccctgatccaaggcatcactgaatactaatttatttagcaggctagactgaggctttggagaggaaagaagtcctcagtaagcttcagtggagactcttagggcttgattattgtgtcaggaatcaaattaatctcctaagcatcccttatggccttggccttgcaaagccaggcctctgccatgctcgggggaagggatgcagcaggcttcctgggcagaaggatccagctcttggcctcctttctctgctcctccctctactgcagggacctgcccctcctccatttcctccacctggaaattaatgagcttaggtcttgccccatccgctgcagcttggtggttaatacagagctggaaatgggatgagactgtggcagcgcagtacgaggggggtctctaggaccagctgctgctcagggtctagtgatgggaggaaggcctgatttgggaagcaggttcttcaggatgaaaagcttaaccctttccattccctgacagcctctttcaaaacagtctttcctcagacccccagttgcacacattctgtttttccttctgttcacatttttaaaggaacacatgtctcccttgggtccatgtaggttattgtgcctctcccttcctctgcagctcctggatctctgcctgaaactgcaataacagctacagggagggcgtgaggtgctccttagagccatgaccacgctttcaactccgatagagcttgtgaacccgctgggagctggctccttcttgtccacatagcccaacgacttccttaagcttgtcaggtgctctcagctctacagcaaagtgtgacaaacagctccccctctcccttcctaccgcctgccctcctccccaaacctcaagcagaacacaatatatccgcagtccaggccctgaggcagtctgccagtctctggatgccaaattattatttttttaagggcaaaccaaaaaactcagctcagaacaaaaacacagtcacggaggaaggtgttgacccacatacaatgagtcctgagcccagagaaaaatctgcacacacaagcactccgcaatgcgctcccaggcgaccccctccccacgcacaccgcatctgtgctgcacagatctgcttctgtcacagaatcagcttctgtttctctccctgagtctgtttgcatctctaagcccctgtctgtcacaggctgcacacctccccaccccacgggctccggtgcgggacaggcagccggagggagctccagacccctcccctcgcgcccgcggccgctgcgcggaggtctgcggagggcgcctggctcggtcggtcgctccttccttggcgggccctcgccgacccacggtgctcagccagccccattcttggcattcaccgcgtgccttaattgtatggacatttaaatcaaggtccgctgtgaacacggagagagaggcctttctcctgaggaaggaaaggaggaaggaaggaaggaaaggtgaaagaaaggaagaggggtgggtagaagatggaataagaaaaccaggaaaaagaaataaaaagcggcgcgtgtgcgtgcgcactgacagcggggagagggatgggggtggggaacgccggaggaagggaccacagcatcctccccgccgcagctcccccaatcacacagacaatgagataacagcgacgtcttccaaaggctctttgttctcccccatcctttcgcatccaggctttttcctgcaaagcggagggggtggagggatgggggtgtgggtggaagtgggagacggaggggtgcctcccccgtgttaattaccccggctcccctcgcccctttccccgcgcctcgcctcccctgcagctccagacaatgaaaaaacaacatcgaccccacctcgccccagcgcagcaacccacccacccatgtcgccctctgcttcgcccaggaaactgaaggggactaggaggaggaagaagagagcgaaggacaaggagagcagcggggactcggcagcggcagccggggcagggcgcgcggccgccgcctctttacctccatcgctgagtgggggcgcagccgggccgggcgtgccgcaggggcgagttgccgcggtccggggctgggacctggggattcagccttccggaactcgcctgctgcagtcctctcgctcaggtcccaagtggtggaggggggaaaggaagagagacgagagagagagagacagagagagagagagagagaggaagaagaagaagaagaagaaaaaaaaaccataagagcgaggcccatctggcccctcatcagctttgtcaagtcttgcatacgctaaaatgctaatgacctagatagctcatgcaaaatgcagcagggagggcgggagcgagggaggtgggagggaggaagagagaggagtgcaggggggagggagggaggagaggcggagggagggagagagggagagagcacccctacactctccccaccccacccccaactgtcagcgggctttaccaggtaaagggtggacgtagatttaaaaggtcactcgtgtataatgcggctggatccccgggtcaaaaaaagggggcgagacagaggatgagagtccctaaagccaaaaggacaataagacatcattttaagcccccacccccatgccctcctccacctctccacactgtttacacacaaatcctgtcgccgcctcatgcatgtgcacggacatgtcaatttctcatcaatttctcagcgctcctatcgacagacacccgaattctcattcccagcaaaactcatccactggacccgagggaggagaagaccccttctcctcctcagtgctcttcgggctggcccatccctactcacctccatctccactctctactcccttagccctccaggcagcagagggctccttctcttttctaagccttgagtcccctgtcccctttccaacccccgcatcttgagaaggagacgcagagtagcaggaaagccaagtcaagtccacctaggtctcccacaattcagctacccctcccagaaaaaaaaagagaccccaacaaccccgacccctctcctacgtagacactgtgaaagcaagccacagggacaaataaaagacaatccgaataccctcagcgttccgcacgccgggcggacgcccttccgcagcggccacgcgtgttctgggttcagcgctcctgcgcgtcccttctcgccgaacccaaggtgctttgtcccggcggccacacaaggtcttcggctttttgttctccttttttaagagactggccgcagtccccag

SEQ ID NO: 1883195 - DNA, 4001 bp, Homo sapiens
gaaaggggctcccacagtgcagcggtgggcccaggcagaggagggtccgagagcgagcgagggctgtgaggactgccagcatgctatcacctctcaatatcattctggtaagttccataaaggcgtgaacccagacaggttgtttaatgctctatctcctgcctttagtacagtagctgcccgagtcagtgttgagctaatttatattctaagaagactggcaaaaaggagccaatatctccatctggagagcaaaataatcacttataattctgcattaaggtggagataaactgctaagacaaagaataagagggctgtcctggaaggctgtgcttagaatgaaggggttaggagtttccttcaattgtatcttttgattttttttatgtttcctctttgctactcttcacgtttgtggtccaaacaggatctttgagacctaacctctgtttcgaattttctctttgtcctgaagcatagtggcttaacttttagctgcctcaattccctcattaaaaaaaagaaaaatcaaatcactgagccagttaatagatgtgttagccttctatgctggagttatgctctgcaaaaggcctggtgaataatagcttgctttaaaagtgtatccagtgcatgtatatgtttttaggaaagattcagaaaatagcgttcacgatagagaaactctccctccctttcccctacactacccaggctaagcatactaggaggaacacaatgtgagctttcattgtgttggcaaggatgtttataaatgtaaatgtgtgtgtgtttacccaagtaatttaaaaataacggaagtgaactaagtaagtgcatgccatgcttaccaagaatattaggaagcaaaggtccttaaatatctgaattagctctgacactgattcaggaaaaaactggctcacaactcttgcgtaagacttatgtaagagcttagatgtggtgcctgaactattccagttttctacagcatggggaaaaaagcaaagtatgttacattgttgatacttgctcagttctttccatttcaacagcttcgttgcttagagaagtaaagcatctctgcttctttttttttaaaaaaagtttaagttttctagtgtttgctacacataggtagatgtaaactaaaagaacaaaactatggtataggcagtaggtaatttagaaattaggtagagatttaaatttgttcataccgagacagtaacgagttgtcagtttgtgataaaactttaaactccaaggcgacattccacacataggtgttacagattttcccacatcttataaaatagcttctcaatatttagagcacaattcatcatcttcatcattatatgctgaaagtgatttttgtcaaatctaatttccagatattttgaccaaaatagtaatgacgatcatacatgactcagatagcctggtctctaccataagcttttgcttggttctcatttaaaatacacacacacacacacacacacacacacacacacacacacattcctcgtgggactatttgatatagagaaaagaagaattttacagtcaaaccattcaatataagtacagataccagtaccatcacttacttgctgtaagacccaagaaaattaattaatctgagcttattttctctattgtaagatgggaataataacatgtacttcttagggtggttgtgaagatttagatgtaaataatcagcgtgtgttaagtgcctactatgtaacaggcatggtctcagcgctttaaaaaattgttgaatccttatatcaagaagcaggtattattgttacctgggatcttgagttgggatggacccttcagccaaggagatcaacagagctggagctctagatcagcagtctcggttcttgtgatagtgagcaaagaaatgcaaactaacaccaaaatgcaagcttgaaacaaagcttgttgaagcacagttatacactctcagagggagggcgggctgatctctgtgaagtgaaattggctcttctttacagagctcagtgctttcatggggtttgttgggaggagttgagcttaggctgtgtttgagtgacaagttgatgttatttgattggcatttatagttatatcattgaaattaaactgtgcgtgtttttacccataattcgtaattcattaaggaaagcccactcgggggggggcaaaaccacatgtaaagtttattataatgattgtataatgaagacaatggggaaaaggcctcaaaggcatttcagtgaccttcatggtagcgccttccattacaggcctgaaggcccaggaagaaaaaaatggtttcatgtgccaggcccagagcctcacgctgtgcagccttggaacactgctacctgcattccacctactccagctccagccatggctacaaggggcccaggtacagcttggacagctgtttcagaggctgcaagctggaagccttagtggcttccatgtggtgttaagcctgtaggtgcacagaatgcaggagatgaggcataggagcctctgcctagattttggaagatgtatggaaaagcctggatgttcaggcagaagcctgctatgggggtggagccttcagcctagagaacctctactagggcagtgcagatggaaaatgtgggactggagcccccatacagagtccccattggggcactgaatagtggagctgtgagaagagggccaccgtcctctagaccccagaatggtagacccccagcagcttgcaccctcagcctgaaaaaggcgcagggactcaacaccagtctgtgagagcagctgctggggatgaactcaggaaagccacaggggtgaagctgcccaaggttttgggagcccaccccttgtaccagtgtgccccagatgtgggacatggaatcaaaggagattattttggaactttaagatttaatgaatgctctgctgggtttccgacttgcctggggcttatagcccctttcttttggcccatttctcccttttggaatgagaatgttcacccaatgccaacacccccattgtgtcttggaagtaactaacttgtttttgattttacaggctcataggcagaagggatgttctttgtttcagatgagactttgaaggggatttttgagggaatgctggcatgagttaagactttaggcaactgtttgaaaggcatgattgtattttgaaatgtgagaaggacatgagatttgggaggggccagaggcagaataatatggtttgaatctgtgttcccacccaaatctcatgttgaaatgtaatccccaatgttggagttgggcctggtgggaggtgactggatcatggggttgggtccttcctgaatggattagcaccatcccctcggtgctcttctcatgatagtgagttattgtgagatctggttgtttaaaagtgtgtagcccttcccctatctctctctcttcctcctgctctggctatgtgaagtgcctgcttcttcttcaccttcatcatgattgtaactttcctgaggtcactccagaagctgacaccaccatgctttctatacagcttgcagaaccatgagccaattaaacctcccttctttataaattacccagtctcaggtatttctttatagcagtgtgagaacagactaatatacaactgggaatgactataattattctcaaaaagacaggataagtgcttaattttttcactaaaacatttcagagtaagttgttggcataatagtagcctctggctactattctttttctttcttgtttttatagtatcatgtggactcatgaattcttacttattcattggattacaatcaattacagtcattattgttttgaatagtcgtaaatttggccagttggaggcccttcaaactcactgtgtcctttttaatttgttctacttttattttgaaaaaatttcaaactcacagcaatgttgtgaatataatacaa

SEQ ID NO: 1883196 - DNA, 4001 bp, Homo sapiens
taaggagaaaagtaaaggaaggtagaactggggaaatccattgaaagatgacagcactgagtaagggaaatgattaaaatgtttccattattccctggaatttgatcatttttctcttcagttaccagcagacagagtcttgctctatcaccaggctggagtgcagtggcacgatctcggcccactgcaacctccacctctggggctcaagaaattcttgtgcctcagcctcccaagtagctcagcatctgagtagggattataggctaaacaccacgcccagctaatttttgtatttttagtggagatgggatttcaccatgttggccaggatggtctcgatctcttgaccttgtgctatgttcacctcggcctcccaaactgttgggattacaatgtctttctgtatgtccctccagctattcttttgactagattacacacatacttaaacaaaaaattaattaatttcaattgcaatgattgctacaaagtagaaatgtaaggtgacttgaacttcctaatctaatcatggaaatcaaggaaggcttcccaggagaagtgaaacctgaaagacagataactatgagttatatacagcagagttcctcagccttggcactgacacttgggactggataattctttattgtggggattagttctgtgcactgcagtacgtttaaagagcagcatccctggcttttacttactggataccagtggcacttttgcccaattgtggcaaacaaaaatgcctccagacattttcaaatgtcccctgaggagaacagctaatctagagggatggggcgaagtgcagcattctcagcagaggaaaccacatgtgcaactctaaggcagggaacgtgaatctgaagaactgaacaaggctacagtgtctagatcatgaagcctcagtgggctagtggtactaggtgacataaataaggtagggttagatagatcatgcacaacctcatgcatgtgaagatttgggaagaatgagatgagtaatgtatacagcatccttgaattgtgaaagatccatacttaacaacgtacctatttggattgttccccctctaaaatccatttacctggtcattgtgatggactcaagctgtctgcaaaccttgaacataatttgcattttgggtcacacagtccctatagaatttgtaggttttgctggcttttaattttattgcctatgacatttaactttcaagctccactaaagagcttaaaaaacaaaacaaaaaacttctatttacaatctgttaaccttttcagctataatcttttttttttttttaacctttccttccacacgccccacaacacatattgaatctgatgcaatgacttacccgttactccttcttggagtctttgtgtcatcacaaagcctctcaagccaatgtcttactccttagctggcttccttttccataagtttgctgctcatttccccacagacacagatggacatttcaaagattttactgtgatttgttttctagaattaatctcatcatgaacttactgtgctctgtgatggccaatgtagtagcatcgtggaaaaatggccctgtgtagaaaggataattcttcttcgtggttgcagtggatctgtcttcgagagatcgtgccaattaaattaacacgtttatagctcttcatcttttaaattccacatcattctgcttttcatgccttcactttatctcaactcttgactctacttagtctttccaggaaaatcttctaaaactcaagtctaaatttcattagggtgaagtttctctcttattcttctctgtgcctatagatctgggattgcttcctgttaactaaatttgttacggtggagtctaccttcttctgtttacctgggccataactgttttgccacagttgaagtaagctgagcttttaaatagtgttctgatagggctgatggggatcagattttggagtaatgttagggcatgtacaataggcagtagaaaactgaaataaacacagtgactcctgcactggccatgtgacaggaagtggtatacctcatcgctacttacctgccattggccacaacaagttgcatggtctatcctaacttagagggtgcagggaattgcaatgctacattttacccagatattggtgagtgaaaacatcagctatagttttagtacctaccatgattagcagaagcagagaatccccgcccttatggctcacattgtccattgggacagccatggatcaaagtacagagtgatgatcatgaggaatgttttcaaaacaggagtgtatggtgcccatgagcacataaaataagcagacttgaccattgaaaactgaaaggtaatatggattaactaactgaggatggaaataagaattaactaagtgaggatgaatgcaacccgggcagcagaaatagcatgtgcaaaggccctggggttggagagaatctggcatattctagtaggggaaaggctgctatgactggagggtggaaagtgaaaggaaggcttatggaagataatgccagaaatgtaagctatgactttattataaacccttaaaatgtctgaggcttgagagtggtggttttgttttgtgaagtcaaagagaaaaatttcaaccaaatggaaaggatggaaggaatgtattgagcactgaatcaaggggtcagatgttagctggagagataaggtaagataagcccaggaagatcacagcaatgaccctttgtgcaaatgcttcctttaaaccagagctgtgactgaaaggaaacataccatttagatggtaaagaggcaacattgttgggtgcttaccagagaagtcttagtttttttcacccacagtgatgaagaagggaagtagcatcacctaaggtgttttgtgcatatctcctgaatgtcccacttaatcccgcaagaggtttaaagttcagaaaaattattacacaagttacaagggtagatcatggtgaagctgagattctagtatgttttgcagtgggcaggcatatgcacatcttcttcccaaggcccagggggctgagaggttgaagaaagaggctgacatatccagtttccttgaaagaaacatttaataaagacctacaaacaaaaagccgagggataagatgttggatccccatccagttacccccagacccagggcttatataccatagagaatttgcttaagggcagagtttatgataagtacgcatttacaataacatcaaagttgtttcgacttaagggctggatttacagtaagtatgtgaaagtagaaatcttagaggcattcccagaactggagttgatcagaagtcaacatggtggattagcatccaagatgaagttgctttagcctccacacaatataaaactcttaaatgggtaccatattgcaccttggaaaaaaggagggttgttggtgtagatgatcttcaaggtctagctatgcctttttgaaagcttcatacttttcagagaaggatctgggcccccaaactgcatgatttcttctcttcatttgtgtacttcactaaagctctgtcacccttctttatgctgaattttcaccaatgaaatttgaagataatttttctgaacaggacttttaaaatccacagtgtagcatacatcatcaaaatcaagaatttggcctactgtgtgtgtgcatgtgtgtgttgatggttttattcctcttgtctttgatctcaaaaagcttaagctttactgataacacagttggttaacatatatttagtatgttacatgtattatatactatagtttccaaagcacattacctaaattgctaacctatcttgtaatttgcttactaccattcagattttagaagctggctcattgactgtgcccacccaatcagcaaaaggctagaatatagctgcttctccagtaaataaatgggaaaaggaagatttgtgtttatctttgcaagtc

SEQ ID NO: 1883197 - DNA, 4001 bp, Homo sapiens
atattagaaatttgattttcctaatttcaaggaagttcaagaatacttaacttatgtaggctctcattcatctctaagacaatccagaaggagcttatttaaggcgttttataatttaatgtggtaataccatctggaggtaggaaaatattacacaaacaaaatgtatgtgcacatgcacaaacacacatacataaacatataggcagacatagccaacttacagctttaatttttaaattttagccatgacttaggcataatcacagaaatgcaaaactcactgattcatataaaaaaacagagtattgactgggcacggtggctcatgcctgtaatctcagcactttgggaggccaaggcggtcagatcattaagtcagaagatcgagaccatcctggccaacatggtgaaacacagtgtctactaaaaatacaaaaattagctgagcatggtggcatgtgcttgtaatcccagctactttggaggctgcggcaggagaatcgcttgaacctgggaggtagagattgcagtgagtcgagattgcaccactgtacaccagcctggcaacagagtgagattccatctcaaaaaacaaacaaataaacaaacaaacaaagtatcatcattgcctcacgtttatatttttacaaggataatatttttggtagatggggcaagttgaagtaacctgttcagtatgagaactgaagcatcttcaccaatatttgtgtaggagacccataagctacccttggctctggtgtataattctagggaagctgtggactcaatttcaagggaggcatggaggagagaccaagcggtcatctggtgtctccagagcccacctgaggggataaaacattcagcctgtttccggtgagcctttttagcctcaggctgttgctcttagtgcccctgggcttctctagagcctcccatgaagggacaggacttaaagctcaagggattataaggaattgaggggccagagtgggagaggaaaggtctggcaggagtggatggaaaggtggaggagatagagggttgaaagaggaagatccaaggattaaagggagctgaagggaacatggaagatggtagaaaagagagattgggggataggtgatgagaagacacaggtcacagattggggaaggatgactgtctttgaaagaagcaatggtcactgaaaagtttttgagagagagcattttttttttctgcctctttgtaccaaatgcccaccaccactaacaaagcatctattgcttggatgagatcttggtggcacaggattcaattgcccttcgcagaatgaggcaatttggaaaaattctacgttctccaaagaggccattgaaatttaagttgtaaaatattgccatttttttttttggaagaaagtgggtggaattattaccatagtaacacagagcataccccagagttgagggttctggagaacaacagccaaattgacggtttctcatgataatggaagggacacctgctggtgctagaggctttgggatttcaactcaggtatgattctcaggagagaatgaggggctttcaccacactcaaaaaaggcagaagggaaagatggaaaaacagaagaaaatgacaaaaatgagagaaatataagtcaacttctcactgtgctacaacagacagacgtctggagcactggattagaaatcatgacttaccactgtgtattctgatttccccagccaaggagaggcacaaggagtccaataaggcagcactgggtgaagaaagcaggacccagaggcaatgggcattttgtccaagtcatggcatcattattgtcaaagaaaagaagtttaatctagacattagtctagaaaaactttcttaagaaggggagtattgcaataggagtggggcaacagcataacagaaagatgctcaaatcctaagtcagagaagggatgagtgagcaaagcttttaagatacctgtggaaagttgaggggaaatcaacaaaaccctgcgaaaatctgggggtgggagggaattcttaaaacttaacaaacgtcctcaaacgttatatgaataggagaattgagacaggaaatgttggtttgtggtcaggcacatggggctgggtctgcacccaaaatggagcaaacaagttaaagtgagaaattcacataaagcagagggcctgttagtcctctgccaaacagccaaaagttgtttcagctaacagtcaagcacagtcttctcagcctcctcagtgcccaaaattgcctttgagatttcccagaggacctctggaaagttgcaaagatgtgttctttcaccgtgggaaaagacaagaattggaaacagttaggattgtttgatatgttatcattgacaagatgtctaggaagcattgtccaatcggaagagatgctcaggtttgcatagattaaatttgtgtgggtaaaatgtcattaacataaacatgtttaaaactgtattctacataagaagtttctggagaattgtgaatgtgtgtgtgttttttttttctttacacttttaagattacagtgttaaatgtttatcaagttacatttctacagctagcaggataacacatgtgttactggcactcagacctcatcctagggaatgtttactgggaattcccaaatacaccacaagccaaataacttccagcatttcccatctttgtactttcttcatttccatctttgcccaagtcatctggtttttcatggaccaccattgcatggccaatgatggagtggcctcctgagagtgagatcatagaatcttcaatagacacatcattgcatcatctttgccagcagtcacattgcccaggtgtttaacatgcctctcttgatcctttggtccaccgtgttttggggatagaggattaaagtgaggacctgcactggtacagccttgtatattatttgcacactgatgaacatggcatctgctggccttcaggcaatcctgtaatgtgtcccaacaccacaactggtccattttccttctgcttgaaatggataattctcggtaccagcccttcgcccttcagcatgcactgatggggccacgctcctgtctgggttctgaggattgccagggaaacaggaggtgctataagagatgacaacacaaacgccagaattgttaatgttttcactgtccatgatgtatttctatttatcagagtcctggggtcgctttgcttgttgttagataaaagcagtatagtgttatcagtcataattaattatattttcaaactttaacttggttgcaactttacttcttttatctggaaccagtatatgctaggctggtagttttacgttgaggattcacttcacttatctatgcatttttattaatactctaatgtttagaatctacttcagatgtactgactctatttacttgataactttgatatatttttagtaaattctaatgaagtgctaggtatttgtggcatctaatgtctcaggatttttatgttatatatgaaaatgttttctttgtaaggttatatataagcatttttataaattggatgtaatatagcctctttgaaaatattgctaatacattgtgttgatagatattttctctaaaatgttttttggattgaatttattttgttttgtacaacagaaacagccagatgtgtttgtcaattgcattattcttataatgaactctattcagattattcacttttgaaaattatcaataatatgtacatgatagccatttttagacttttgtcatctactgatagttttgtttgttctgttttacactgatgtttccataaaatccttgcaatcaattataggctaaggtgttctatcttcagcaaaaaggaacaatcttagagtctggtggaaaaggatcatgccatatactctggggaacagatttctgatggcattgtttaaacaactatgaaatcataccattgg

SEQ ID NO: 1883198 - DNA, 4001 bp, Homo sapiens
agccccatcttctgagctgggttctgctaccccagggtgcttccaacagacatttaagtgggagtcaggagctacagacaaggggctgcgtctgtaagaagcttctaggcttttacacttccctatgctgtttctgtaaccccatattctgtaaaatcctatgccttgtggatttgtctttggagaatggagcaataaggtggagccaaagataaggaatccaaaggtgtagagtgggaagaggcagcaggcccaagagccaaggccccagggaagcagcaaaaaaattggaaggaaaccccaaaaacagcaggtctggacttgagaagcagaaaggcttatgaagcagaaagagagagagaaagggagttttacacctcattatacccatttacttacacaggcagcccctttatcacaatgcatttcatagctcagctctttcaacaacatcgaattatattgcctaattactatctctatatcacctaccaacatttaactcactctttcctcgtttcggcagaagaaccctacatggacaatggattttttttggcaatagggaaccaactcgagatatttaagatgtgatgatgaaaagcagggttgagaaagattttaccccagtaggttgtagaaatttctggatgcagagagaccagctggagagcaatccggtacagccatccaggccctatgaactcatgacttgggcagttgtaaaaaggaaaccaacctgaatgcaaagggaaggcaggtctgagagtctgttcttaattttccttttggtctttctacctggatctcagatactgctctgtgaatttaaagggacattttgtgtgcgtgtgtccaagttcatgaatgctgtgctcagcatgtgctattactctgtgaaagttatgaagtaattcttaaggaaagaaataggccatacactaactgggtgaacaaaaataggtcatggcatgaagatagaagggctgctggccaaggctggggagccagaaggcagccctctgctaggacacagggcagtgcccatcctcactgctcggtccctgccatgaacctgtgataggacaattgtgctgaacatggccactgcttcttacccccttgggaaaggaacatccttctgttgcttagccaccttaaaaggtagaattccatctcagtgttcaagtcttggcttactagctctgtaatatttggtaagtcacttaatttttttgaatcccagttttttcacttgtgaaaataggagatgatagtgcttacccagggtgttttgagagttcagtcacagaattaagagaatcaagcacgtaggtgctcgattaatgttcttttccatatagcagtgtggtgacatcatgggataccccagctctgccactctgtaaccacccagaaagcttgccacttgagagagctctgtaacacctgcatgcctcagtttccctaccaacaatatgggaacaatcacagtctaacccatgtcatggagttgttaggagaagtaaaggagttccacatgggaagtgctgagagcagggctggcacacagacaccctgaaggattagattttcttcttcttcttgttctcagactgctggacacacttcacaactgtgtttcaaaggatgaaatcacttgacaatgttcaggtagaaacaagccacgcagttccctttgtgtttgcacttttagtacagacggggttttgccatgttggtcaggctggtctcgaactcctgacctcaggtgatccactcgccttggcctcccaaagtgctgggattacagacatgagccaccgcacctggcctccatgtctttttcattaggtgcccaaataaggcaagcagcctctatctaaaatatgcagatctcatgacagtttccctaaccctaatgacagtttccagagagagggtggaaattggcaatagctcttcgaagcttccactggtcatgctgcatatgtcacttctgcttacatttcattggctggagcaagtcatatggtcaggcatgacatcagcagggcaaccttgggcagttaacagttaacagttggcagttaacagtcgggagggtaaaacacaatcatggtgccataaaagagtgaaggagccggcattacacacagacagcccgcagaagggcagcaacgttttggagctccttttagttctctttattgatatattttaattgaacccagattttttttttcctgtctagcccttggagacaagctctgccagagctcgtatagcagagagaaggtcttgagattagtgatactcagcgtttctgacactggagacctgcataagaatttaacaaactgggaagcagttttcatgacaacccttttcattgcatagatgttaccaagagtttgggggtgtttttaagaaaagccattaggctggaagtcagacacacctggatttgagatccgctctgctacttcgtacttgcgtggttttgaggaatcatttggcctcttttcaggttttagatccttcacctgtaaaatgaggatggttgtgagaaagggaaattgctctgtaaacagtgaagcactattcaaatgctcaggctttgtaaaaaattgatggaaaatgtcataagaagtgggcagttctggtttgcttccattgctataggaagctggcacacacaagaaagtttattgacagcagctgagatgtgctgaagctggtaattatcttcaagacaggctgagttttgattgtacgtaagggtgcctggtagacctatcaatcagacatatgccttgatgtaatgctgacagtctatttacacagaggcagctgtgatattataaaagaatgaaaggcatgctgaaggtctaagttgttgtaggatggtaaaaatctggtgtgaacatgagcgaaagagtttctgaattttcattatgatccagcattttagagatgtatgaaaacttagcaatgattgaattcaaccccttctccgcatggataaggacactgacacccattaatgtctgagtggttattaatgcagagagaaaaagtcactgttacctgtcttttatgaatgtgctaactcattaatctataaacaacacttcttctaatatttagcatttaacaattccaaatatttattcactatttacacataatcagcaaaagcacaaaacttcgcattaaatctccccagacatttaagcattcattacaaatttgtaatcaagctcttagataaacaaataattaaaactatgaatctaataaatcagatttgttggcatgctctaaacaccttaagaagtgacaatacatgcacagaatgtcactttgattaccgaaattattatactatggggaaatggcttgctgagaccctgaagagccagagagaagatactgctcacacatgtgaaggatacacactctgttttctcctccttctgtatgagagagcctgctgatgttttgtgactcaaaaagtacgaggaggtctatgagcatattttcaattaagcgcatgagttgtcggcataaattctttctgaaatgatgatacaattccatagcaaaaccaggttatagtatagtggaaatgagtaccttagctctgttagcctcctactccaaggactgtatttctgaagggagcacacttgttttgggaattctgggagccaagggctggctgcactgtgaatgtgttttgctgctccagcttcttatggccccagatttctgatcatattctgcatccttggctaattctctcaggaattttacagtgaaaaggagaacaagagtgagaacacaagaataagatcaagaaaggtctcttctcaccagtgctataatccacctgaaaagctgtagccacttgcactactaaaaccagtcataaaagtgctaatacagtacactatgaatttaaatttgtgtctttattctcttcattctaattgtta

SEQ ID NO: 1883199 - DNA, 4001 bp, Homo sapiens
gagtctcttatgtcttccccttctacatagacacagtgacagtctgatctctctttctttaccctacatccaagggcttgaacatttcttgacttgttggcaatccaaatcgttacgtctccgaaacagagttgactgaggggaccgcagggctgggcaggacctttgacttgctatacatccacaggagcaagaaaacctcagccccactctaccaacacgcacctagtaaaattccgccaaccgcatctcacgcacgctaacacgtggggagcgttgcttgcaccacgagtccccatttggctcaaccgccgatgccaagtgtgtggttccagttgcgacggccccccgtgaagtggcttccggatgtgcgaaggaaccaggcagagtttcactggccaaatagaccccagcaaagctgaagttaactcccacatttgggatgtacttcagaggtaaaacattcatcccgtcttctttccggatgtctgacaccatggttctccccctgatcctaagagtagctgaggtagagactcactgaaagatctaggcggggatatcccatcatgcacaggctctctccattctctgacctgggaacaactctcagcaggattccacatctaggaggcctcggaactcagtgggattttctgagacacaccaactggctgctccctctccgccgctgttgagggtcgttatcttgattatccagatcacctagaaagtatccgtatccagaatgaataagatcaactctctgctcctctgacaacagagggagcaggaccataaggaaccaaagagcgtggaaggaaacgatgtgacaggaaagctcagagaacggccacagggggtcgtcagcaggccttccaacctgaatcatgaataattaatgaagcgcaaatcaaaggggactggagtttcagcaggagcaattcatccaacgggagatcgccggagggccaacaagattgagagactgggagccgggtgcagtgtcaaaggggacgcgactggttccaaagctcgagaagaccatggggtcacttgggctacatgagaaaacgccccagtgtgctggttcatcattccgactcctgcctgtctcttcccgtccaaggaacatggaccctaagtcgtgcaggtgcggatgaccatgggcagaattaggggccgtggcacaaaagttcaccgacacgggagttccacagaaggtgcggtggatcttcgcaaatccagagacatggcaatgggacccagggaattagagcctcacaggcgtccgggagtcgcaagacgagctgaaaaaggagccaggcactgaaggacaaagcgttgttgactttcctcatctgtgtttcccagtgcggtccaattcacggtggtttccaagcgcctcctgggggagaaaacacatgagggtgcggtcagggttctctgctgacagacttaccttggggaagaaagagaagctctgaagatggatcatggccgtgactgcatgtcaaggagagtctccttgatgacattgaggcctacgtcgagagagacaaaatgtggtccaattaaaaggtgtctattttaccacattttttaaaacgaaacaaaacaaaacaacaaaaaagatggaaaagaagacagggatacaggcaccagtgttacatgtctgacggggaacatctattgttcaaagcttgcagctgtacaagtaggttttagaatgtctgtcagcagtggacaggatcttagagtgggctgtgcagatagacctttccaggtcatgtaactggattaagttaattgcaattaaggtacaggtaactgattaggttagggtacgttccatgtcaggtgaccagaggcagtataaaaggcagcctggaaagcagaggtccctctccgccccttcctccgtcgttctggatgctgcatcgcttccagcggggctgctgcagcacctgcccatctcagcgccagcctgggaaagaaagtagacgtgtaatttcaggttagtttcgctgaacaattgtttgtttcacgcaatccctgaggggtatttgcggggggtgtgggggaggaagagacaaaggaggccgaaagaaaccgatcacactggggcttgctggtggggtaggatgtgttctcgttactagtaattcttggaacagaaaacgagaaaacatatccgtctccacgtgtgggagaagaccaagatgggaatgcgaaaagaaatgtactgcagcatgctgaattggtgggtaaatggaaaaaggactttggaaaaaaggggggtttgaccttcagccgtgtaagacgtcgatacgatatggcacttcttccccgtttgttcagatgaattcgtgtggtatgcgtaaaataccaggaaaataaataaagaggggctggagctaaagccaaaagatagaacaggaaagaccatcacctgctagtgcggtagagaggaaggtaacttctctgtatgaatttgtgtttggaagttgcctaatgaaatggcaagagtagcgattcaagttgtcacaggaagcatcccttatccctgacttcaagcagacctgccaaagggtggcacacgccatgccctgtgtcttcgatcattctgtccgtcaagggagatagaatcaccgtgtcttctaccggagtgaatcgtgagagacctaagtccagtctccagaatcagttgtttgtttggggttgaaagctcaaccccccatacctaggccacgggccctgtggcaggtggggtttactcttggactaggtagtcatggcagaggaacacacaatatccgaggatgcgcgcagcacattgtgttctacagatttgaccgactggtggtgaggtctcctcatgaccacacaggcagggagttagcaggtggcttcctgtgggtgtgtgaatatccaacgtgcttaaccatcgacatgtgtgtgtttgtgtgtgtttcaggtggcccaacagtccacccctgaaaaaggcggtcataaaacccccaggagacgaagatgatggcacgtcgggaccccacatcttgggccaagagactggtgagagcccagaccctccagaagcagcggagggccccagttgggccaagggctcccccgcccgatgaagaagatcccagggtaagtctagccctggatctcttgggtatcggggtgggggtggggacggggggagggggtgtcccacggtcctcagagactgggttggattccaaagagttctgtcaccaccagccaggttgcttttcccatccaaggtgggcgtggcttgggaccttctccccggcccgataggtcccttgagagactcttgggggcaacctccctttctacttagagtcctgtgtagccacgtttggctgcgttgttgacatcggcttcaccatcgtgccccttggaaccttgagtccttcctttcagagttcctccgtcacacgggctttgcgagggaacatcgtatccgaactctcccagcacttaacggcccccatgccggtgtcccctctttggaatccttattcagctctgaattcacaatccgtcccaatgttgacgtgggatcgctgcctgtggcttcagctcactcactgacatcacttcctttccacccacagctcaagtgcaaaaactgcggggcctttggccacacggccagaagtaccaggtgccccatgaagtgctggaaggcagccctggttccagcgaccttggggaaaaaggaagggaaggaaaacctgaaaccatggaagccccgggttgaagccaacccggggcccttgaacaaggataagggagagaaggaagagagaccaaggtgagcagtgggaggggttttcaccactcttggggtactgcctcctaaggacatggtgtctctgcacctgcacaccgtgtgcctttccgtctccgggccagggaaggaacgctgcagagaaataggccggagctccgtgtcctccggggtt

SEQ ID NO: 1883200 - DNA, 4001 bp, Homo sapiens
gagtctcttatgtcttccccttctacatagacacagtgacagtctgatctctctttctttaccctacatccaagggcttgaacatttcttgacttgttggcaatccaaatcgttacgtctccgaaacagagttgactgaggggaccgcagggctgggcaggacctttgacttgctatacatccacaggagcaagaaaacctcagccccactctaccaacacgcacctagtaaaattccgccaaccgcatctcacgcacgctaacacgtggggagcgttgcttgcaccacgagtccccatttggctcaaccgccgatgccaagtgtgtggttccagttgcgacggccccccgtgaagtggcttccggatgtgcgaaggaaccaggcagagtttcactggccaaatagaccccagcaaagctgaagttaactcccacatttgggatgtacttcagaggtaaaacattcatcccgtcttctttccggatgtctgacaccatggttctccccctgatcctaagagtagctgaggtagagactcactgaaagatctaggcggggatatcccatcatgcacaggctctctccattctctgacctgggaacaactctcagcaggattccacatctaggaggcctcggaactcagtgggattttctgagacacaccaactggctgctccctctccgccgctgttgagggtcgttatcttgattatccagatcacctagaaagtatccgtatccagaatgaataagatcaactctctgctcctctgacagcagagggagcaggaccataaggaaccaaagagcgtggaaggaaacgatgtgacaggaaagctcagagaacggccacagggggtcgtcagcaggccttccaacctgaatcatgaataattaatgaagcgtaaatcaaaggggactggagtttcagcaggagcaattcatccaacgggagatcgccggagggccaacaagattgagagactgggagccgggtgcagtgtcaaaggggacgcgactggttccaaagctcgagaagaccatggggtcacttgggctacatgagaaaacgccccagtgtgctggttcatcattccgactcctgcctgtctcttcccgtccaaggaacatggaccctaagtcgtgcaggtgcggatgaccatgggcagaattaggggccgtggcacaaaagttcaccgacacgggagttccacagaaggtgcggtggatcttcgcaaatccagagacatggcaatgggacccagggaattagagcctcacaggcgtccgggagtcgcaagacgagctgaaaaaggagccaggcactgaaggacaaagcgttgttgactttcctcatctgtgtttcccagtgcggtccaattcacggtggtttccaagcgcctcctgggggagaaaacacatgagggtgcggtcagggttctctgctgacagacttaccttggggaagaaagagaagctctgaagatggatcatggccgtgactgcatgtcaaggagagtctccttgatgacactgaggcctacgtcgagagagacaaaatgtggtccaattaaaaggtgtctattttaccacattttttaaaacgaaacaaaacaaaacaacaaaaaagatggaaaagaagacagggatacaggcaccagtgttacatgtctgacggggaacatctattgttcaaagcttgcagctgtacaagtaggttttagaatgtctgtcagcagtggacaggatcttagagtgggctgtgcagatagacctttccaggtcatgtaactggattaagttaattgcaattaaggtacaggtaactgattaggttagggtacgttccatgtcaggtgaccagaggcagtataaaaggcagcctggaaagcagaggtccctctccgccccttcctccgtcgttctggatgctgcatcgcttccagcggggctgctgcagcacctgcccatctcagcgccagcctgggaaagaaagtagatgtgtaatttcaggttggtttcgctgaacaattgtttgtttcacgcaatccctgggggggttttgcggggggtgtgggggaggaagagacaaaggaggccgaaagaaaccgatcacactggggcttgctggtggggtaggatgtgttctcgttactagtaattcttggaacagaaaacgagaaaacatatccgtctccacgtgtgggagaagaccaagatgggaatgcgaaaagaaatgtactgcagcatgctgaattggtgggtaaatggaaaaaggactttggaaaaaaggggggtttgaccttcagccgtgtaagacgtcgatacgatatggcacttcttccccgtttgttcagatgaattcgtgtggtatgcgtaaaataccaggaaaataaataaagaggggctggagctaaagccaaaagatagaacaggaaagaccatcacctgctagtgcggtagagaggaaggtaacttctctgtatgaatttgtgtttggaagttgcctaatgaaatggcaagagtagcgattcaagttgtcacaggaagcatcccttatccctgacttcaagcagacctgccaaagggtggcacacgccatgccctgtgtcttcgatcattctgtccgtcaagggagatagaatcaccgtgtcttctaccggagtgaatcgtgagagacctaagtccagtctccagaatcagttgtttgtttggggttgaaagctcaaccccccatacctaggccacgggccctgtggcaggtggggtttactcttggactaggtagtcatggcagaggaacacacaatatccgaggatgcgcgcagcacattgtgttctacagatttgaccgactggtggtgaggtctcctcatgaccacacaggcagggagttagcaggtggcttcctgtgggtgtgtgaatatccaacgtgcttaaccatcgacatgtgtgtgtttgtgtgtgtttcaggtggcccaacagtccacccctgaaaaaggcggtcataaaacccccaggagacgaagatgatggcacgtcgggaccccacatcttgggccaagagactggtgagagcccagaccctccagaagcagcggagggccccagttgggccaagggctcccccgcccgatgaagaagatcccagggtaagtctagccctggatctcttgggtatcggggtgggggtggggacggggggagggggtgtcccacggtcctcagagactgggttggattccaaagagttctgtcaccaccagccaggttgcttttcccatccaaggtgggcgtggcttgggaccttctccccggcccgataggtcccttgagagactcttgggggcaacctccctttctacttagagtcctgtgtagccacgtttggctgcgttgttgacatcggcttcaccatcgtgccccttggaaccttgagtccttcctttcagagttcctccgtcacacgggctttgcgagggaacatcgtatccgaactctcccagcacttaacggcccccatgccggtgtcccctctttggaatccttattcagctctgaattcacaatccgtcccaatgttgacgtgggatcgctgcctgtggcttcagctcactcactgacatcacttcctttccacccacagctcaagtgcaaaaactgcggggcctttggccacacggccagaagtaccaggtgccccatgaagtgctggaaggcagccctggttccagcgaccttggggaaaaaggaagggaaggaaaacctgaaaccatggaagccccgggttgaagccaacccggggcccttgaacaaggataagggagagtaggaagagagaccaaggtgagcagtgggaggggttttcaccactcttggggtactgcctcctaaggacatggtgtctctgcacctgcacaccgtgtgcctttccgtctccgggccagggaaggaacgctgcagagaaataggccggagctccgtgtcctccggggtt

SEQ ID NO: 1883201 - DNA, 4001 bp, Homo sapiens
gagtctcttatgtcttccccttctacatagacacagtgacagtctgatctctctttctttaccctacatccaagggcttgaacatttcttgacttgttggcaatccaaatcgttacgtctccgaaacagagttgactgaggggaccgcagggctgggcaggacctttgacttgctatacatccacaggagcaagaaaacctcagccccactctaccaacacgcacctagtaaaattccgccaaccgcatctcacgcacgctaacacgtggggagcgttgcttgcaccacgagtccccatttggctcaaccgccgatgccaagtgtgtggttccagttgcgacggccccccgtgaagtggcttccggatgtgcgaaggaaccaggcagagtttcactggccaaatagaccccagcaaagctgaagttaactcccacatttgggatgtacttcagaggtaaaacattcatcccgtcttctttccggatgtctgacaccatggttctccccctgatcctaagagtagctgaggtagagactcactgaaagatctaggcggggatgtcccatcatgcacaggctctctccattctctgacctgggaacaactctcagcaggattccacatctaggaggcctcggaactcagtgggattttctgagacacaccaactggctgctccctctccgccgctgttgagggtcgttatcttgattatccagatcacctagaaagtatccgtatccagaatgaataagatcaactctctgctcctctgacagcagagggagcaggaccataaggaaccaaagagcgtggaaggaaacgatgtgacaggaaagctcagagaacggccacagggggtcgtcagcaggccttccaacctgaatcatgaataattaatgaagcgcaaatcaaaggggactggagtttcagcaggagcaattcatccaacgggagatcgccggagggccaacaagattgagagactgggagccgggtgcagtgtcaaaggggacgcgactggttccaaagctcgagaagaccatggggtcacttgggctacatgagaaaacgccccagtgtgctggttcatcattccgactcctgcctgtctcttcccgtccaaggaacatggaccctaagtcgtgcaggtgcggatgaccatgggcagaattaggggccgtggcacaaaagttcaccgacacgggagttccacagaaggtgcggtggatcttcgcaaatccagagacatggcaatgggacccagggaattagagcctcacaggcgtccgggagtcgcaagacgagctgaaaaaggaggcaggcactgaaggacaaagcgttgttgactttcctcatctgtgtttcccagtgcggtccaattcacggtggtttccaagcgcctcctgggggagaaaacacatgagggtgcggtcagggttctctgctgacagacttaccttggggaagaaagagaagctctgaagatggatcatggccgtgactgcatgtcaaggagagtctccttgatgacactgaggcctacgtcgagagagacaaaatgtggtccaattaaaaggtgtctattttaccacattttttaaaacgaaacaaaacaaaacaacaaaaaagatggaaaagaagacagggatacaggcaccagtgttacatgtctgacggggaacatctattgttcaaagcttgcagctgtacaagtaggttttagaatgtctgtcagcagtggacaggatcttagagtgggctgtgcagatagacctttccaggtcatgtaactggattaagttaattgcaattaaggtacaggtaactgattaggttagggtacgttccatgtcaggtgaccagaggcagtataaaaggcagcctggaaagcagaggtccctctccgccccttcctccgtcgttctggatgctgcatcgcttccagcggggctgctgcagcacctgcccatctcagcgccagcctgggaaagaaagtagacgtgtaatttcaggttagtttcgctgaacaattgtttgtttcacgcaatccctgaggggtttttgcggggggtgtgggggaggaagagacaaaggaggccgaaagaaaccgatcacactggggcttgctggtggggtaggatgtgttctcgttactagtaattcttggaacagaaaacgagaaaacatatccgtctccacgtgtgggagaagaccaagatgggaatgcgaaaagaaatgtactgcagcctgctgaattggtgggtaaacggcaaaaggactttggaaaaaagggtggttggcccttgagccgtgtaagacgtcgatacgatatggcacttcttccccgtttgttcagatgaattcgtgtggtatgcgtaaaataccaggaaaataaataaagaggggctggagctaaagccaaaagatagaacaggaaagaccatcacctgctagtgcggtagagaggaaggtaacttctctgtatgaatttgtgtttggaagttgcctaatgaaatggcaagagtagcgattcaagttgtcacaggaagcatcccttatccctgacttcaagcagacctgccaaagggtggcacacgccatgccctgtgtcttcgatcattctgtccgtcaagggagatagaatcaccgtgtcttctaccggagtgaatcgtgagagacctaagtccagtctccagaatcagttgtttgtttggggttgaaagctcaaccccccatacctaggccacgggccctgtggcaggtggggtttactcttggactaggtagtcatggcagaggaacacacaatatccgaggatgcgcgcagcacattgtgttctacagatttgaccgactggtggtgaggtctcctcatgaccacacaggcagggagttagcaggtggcttcctgtgggtgtgtgaatatccaacgtgcttaaccatcgacatgtgtgtgtttgtgtgtgtttcaggtggcccaacagtccacccctgaaaaaggcggtcataaaacccccaggagacgaagatgatggcacgtcgggaccccacatcttgggccaagagactggtgagagcccagaccctccagaagcagcggagggccccagttgggccaagggctcccccgcccgatgaagaagatcccagggtaagtctagccctggatctcttgggtatcggggtgggggtggggacggggggagggggtgtcccacggtcctcagagactgggttggattccaaagagttctgtcaccaccagccaggttgcttttcccatccaaggtgggcgtggcttgggaccttctccccggcccgataggtcccttgagagactcttgggggcaacctccctttctacttagagtcctgtgtagccacgtttggctgcgttgttgacatcggcttcaccatcgtgccccttggaaccttgagtccttcctttcagagttcctccgtcacacgggctttgcgagggaacatcgtatccgaactctcccagcacttaacggcccccatgccggtgtcccctctttggaatccttattcagctctgaattcacaatccgtcccaatgttgacgtgggatcgctgcctgtggcttcagctcactcactgacatcacttcctttccacccacagctcaagtgcaaaaactgcggggcctttggccacacggccagaagtaccaggtgccccatgaagtgctggaaggcagccctggttccagcgaccttggggaaaaaggaagggaaggaaaacctgaaaccatggaagccccgggttgaagccaacccggggcccttgaacaaggataagggagagaaggaagagagaccaaggtgagcagtgggaggggttttcaccactcttggggtactgcctcctaaggacatggtgtctctgcacctgcacaccgtgtgcctttccgtctccgggccagggaaggaacgctgcagagaaataggccggagctccgtgtcctccggggtt

SEQ ID NO: 1883202 - DNA, 4001 bp, Homo sapiens
ctcacagcaaaggcagaatgctaatcagctccctgtgtcttgtcttgtgttggaagaaaaagaatcatgcaaatgttgcctaattgtttacttcattatgtgagcttgttcctcacctcattatgcacagaatttgcaagttgctttctaccttcctcccatttcaaatagctgatctgaaacttcatcaaagattcatattaattagcaaggctccatatagcaaatattaatttggaaactgatgtgaggcatcaacatcaacttataacatccattatagaacgagaaagtgcaaatctttcccaggccctaagatgtggggaggtttggctctattttgaggatctgcataagcacatttgttagtaggttgtaaccattgctcctgggaatggccccactaaggatggacagaatggatgttgagcatggtttttacagaagaggtgtaaggattaaaattgatgaaggaaacccagcagcaaacagaagaattactatggataatgctcaggtaagtttccagggatgctctggctgagcctgctggtttagtcttctcttgaacaatatgagcataaacggtgaatattcctcatgatcacaccttgtagtcagtgctgagggaagaggcaagctggtagcatggcatacatatggggttctcccttcacaaccatgtgatactgtcccacccctccccagattgagaaggaggagagaaagggaaaggaggggctctttgggaaccccaacacccctccacatatcagctgggagacatcagccaagttacttacccattctgagctccgcttcttcttctatggaatgtggataatcacttctacttcctagcagagttccaagagagaggatgagagaaaaaaaaaaaaagaaagaaagaaaagacataaaacttctagaagaatcataaacaagagaagccatgattgcactttttttgaccaaaagagaaggagctgtagtgccccagagttcccagaggaaaagtctcagtggttagttctgagaactgcttagccccttttagttcctgtattggtcagggttctctagaggcacagaactaataggacagatgtgtacatgaaggggagtttatgaaggagtattgactcacatgatcacaaggtgaagtcccacaataggccgtctgcaagctgagcagcaaggaagccagtctgagtccaaaaacctcaaaagtagggaagctgacagtgcagccttcagtctgtggccgaagatctaagagcccctggcaaaacactggtgtaagtccaagagtccaaaagctgaagaacttggagtctgatattcaagggcagaaggcatccagcacaggggaaaagtgaaggccggcagactcaacacgtgttcttatcttattttccaacttcggccagcttttattctagccacactggcagctgattagatggtgcccaaccagattgagggtaggttagcctctcccagtgcactgactcaaatgttacctcctttggcaacaccctcacaaacacactcaggaacaatactttgcatccttcaatccaatcaagttgacactcaatattaaccatcacagttcccctggaagatttctgataaaaccccagcagatacaaatgtgattggcatttttgtatttcgtaaaaaacctaaaacctcaattttcagccattgttaatgtttattcttcatcttcttcttggttcttagtcaactactttgctcaaagaacctaggggcttagtattggagagttgatgtggcttcaggggcttgacactgctttggggatgtgaatgaaacttgcatggacacaagggccctacattgagctatctctttcttggtgcccccaaccccattctgaccaggctcacctcactcactcagcaccagggggtcagcccatatgtgggagaatgagtgcctcaccagtacaatgctctttgatcaggagctgcctccatgattagatgcagaaatgacagcaggaaggaaacaacagctcttttaaagaaatccaaaccacccagcctcaggcagtttggtgaagaaacttctctttcccccgtccatgaagagttcaagggcccaggaaggtggctttttaaaaagcactccaaaagccaagtaaatatatctgtgcattttctaaactaagaccagtggagtgacatactgtttgtaagtgcttgaagggtataaactttaaaaagctgagagggaaggctgaagggctgcagaagaaactgtatcttagagtatctagtggaacaagatgaacacaaaattatcaaggaaattaagtctggaagaggcctgctcatctggggctggcctcctgggaaggcatgaagacagctgtatctgtgctgtccccatctccttgttgcaggaagtcagggaccctgaatggagggaccagctggagccacagcagaggaacataaattgtgaagatttcatggacatttatcagttcctaaataatacttttataatttcttatgcctgtctttattttaatctcttaatcctgttatcttcgtaagctaaggatgtacgtcatctcaggaccactgtgataattgtgttaactgtataaattgattgtaaaacatgagtgtttgaatatgaaatcagtgcaccttgaaaaagaacagaataacagtgacttttagggaacaagggaagacaaccatgaggtctgactgcctgcggggttgggcaaaaacagccatatttttcttcttgcagagagcctataaatggatgtgcaagtaggagaggtatcactaaattcttttcctagcaaggaatattaatattaataccctgggaaaggaatgcattcctggggggcagtctataaatggccgctctgggagtgtctgtcttatgctgttgagataaggactgaggtatatcctggtctcctgcagtaccctcaggcttattagggtggggaaaatctctgccctggtaaatttgtggtcagaccagttctctgctctctaaccctgttttctgttgtttaagatgtttatcaaggcaacacgtgcatagctgaacatagacccttatcagtagttctgctttgcctttgtcctgttccctcagaagcatgtgatctttgttttgctttttgacctttgaagcacatgatctttgtgcctactcactgttttacaccctctccccttttgaaatccttaacaaaaacttgctggtttgagcctcaggcaggcatcatggtcctaccgatatgtgatgtcacccctggcagcccagctgtaaaattcctctctttgtactctttctctttatttctcagctgactgacacttatgcaaaatagaaagaacctacgttgaaatactgggggtgggttccccccatatctcaagctggagaaaaagaggatcctccagagatccaatcagggagacagacaagattagtaaaaggggagttttaaaacttatgatgaataattcttttctattaccctgaccttagaaagagagaccaagaatggagtgatagtaaggtcatccagaagcaattaagttatagataattgtaataataaaaaaagaatttccagccagtttgctatgagtaataactcatgttaccttaggagaatctgacaggtccctaacagcctgtggtataatcaaggctcccaccaggaagtgatgatggacttattaatcatgaaaggaaaaaggtatacatatactcttgaattttacttttaattagcagttcattaccaattactaattacttaattactaatcatttttaatcattgtttttaacctctccttaagatgcaaaattcccctttaagtgtacctgttttcagttaaattaatgaattagactaagaataggggtttcaacaaggaactagttcttaagtgagcatttactaagaagagaaacattagcca

SEQ ID NO: 1883203 - DNA, 4001 bp, Homo sapiens
gttgctactgttaacagccttctctttttttcctggggtcagagccaattaagagacgtatagaagactgagagttagagatcaaaataccggctttatggcttatcaaagccagataggagaatagggttttatgtgtgggccaaaggggatactaatttctcccctatgaactgaagtcaattccgtacactgcgcgggactgcacctagggcagtgagggtggggtgctgccccctagcggagggctccggtgcacacaggcgacaacagccacagacccaccgccctcctgctctatctcctttggtaattcatgagacagtttcctgggaagtcccatgtttaattttcatcttaattgactttgaaacagtattctctgtgtagccatgagaaaatgagaatttgtttcttatagatctccactgaactactttatcatttctgattgagtcaattccttattttcctctcgtaaataacacccactcgcctccaggttaaagttttccttacttgacaaaatcagatactaaacaaaatatgattaaaataagtcgaaactcttgctcatccttaccagagttgcacaaattctatcttgaatataacaggcacagtctcgggattttcttactctgattcaaatacaaagtgagcagctggtttatggcccagcaggagccaagggcgacccacctacctcctaatctagagctcttcccacttcgcagcacttgccacataagtaagatggaggtctcacagagcagttgcgagtgcactgtggaggcaggtggctttgagtttggatttcagctgtgctctgactagccctgtgactttgagagaggttatgaccttcctgggtctccagtgtttcatgggcaaaatgcagaccacaacgtttctgttgcaatattgctgtatttaaatgagattatgtgtttgaaatgcatcttactgtgcctgtggtagcttagcactaataagtgctggcatgacccattgttaagctgcacttacccatagtatgaataaaaaatagtttaattttacacaagttgtaaatgaaaagggaatgagtatgtaaataaaccatttgaaaagatacatcagttacatggcttcttcctagaaaccagtcgtcggcagaagcgatctatcgacaccttctttcttttctcatttctggtttggtttctggctgctcttcctcattttttccttttgtggctgccttgtgtctctgtgagaccactggggctttgttcctccaatcttgtctccctctgtccaaccacagctacctttcttcgtcctcacagcctgatgtcatgataaggggagtaacttcccccttccacatataacagaaagtaacacttcagcaacccccaactctggagttaataactcagttttcttttggttctggaacagttcaaagctctctctctcttttttcttcttttaaaaatgtatttgacaaacactatgtagtacttgctatgtgccagacactgttctaagcactttacaagtattaagtcattttatcttcctatatctaatccaattttatataaaacagaaaccaaagcagagaagggcttagtaacttacctgaagttacccagctggtacttagtggaagcaggatttcaggctgaggagtctggccccggtctctgtgcttttagcagctcagcccagctgcttctcggccacccttgcgacatcatcttccatctcacactgccaagggcaggaatgccagacttattagaaaagccttgaaaaacttaagaatgtaagtattaaaaagttcagcatctcaaatatttatcattgctttgtagtgagaacacttaaaatcttttcttttagatgttttgaaatacatagtacattaactatagtcaccatgttttgcaataaaccaccagaactgattcctcccatgtaactgaaactttgcactctttggcaaacatctcccctttccccgacttccccaccataaacacatacaacttttatttgccaattaaaaataaaataaaaacaaaaagaggtgcaacgaacagttgtgctttcatcatccaaaacactaagggtaatgctggtccaagagaatgacagatttttgaggatggttttgttgtttttattttgttggtagcacagaggagttgggagagttctgaacacagaaaatgaaagaggaactggagcaggggacaggaaatttacaaatgtcagagctgaagtagtagagcaaaagagggactattggttgggcttacgggatcattgtggagtttaccattgtcatcctgagcaaagcacagggctgagaacaaggagggagagggaggaaagagcctcggataaggcagtgctggggccagagggaaggctgctgtcatctctcaactgggattagctaccccatgcctcccgggctttttgcctttctgaatttgggggtggctatgcctcagagatgtgctcttggaggaaactgaagcacactgaaagtgaaatgtcacctcagttatgaatgatcctgatgaagacggtaaccaggaagtgtctgaagcctgaagccaccactctataaacaccaaatgtattgctgagctcgagaataaaaatgatatgtgttaactgtaggcaagggacacataagcaaggcaaagtattaccaagaggcacaatttttttttaattgttatatatttttgtttaaaaattttaagaatacaatacattgttgttagttatattaccatgttgtataatagctctcttgaatttactactcctgtctaacagatattttatattctttgaccaacatcctcctaactctcccatccctgtccctggtaagcaccattctattctctacttcttggagttagactttcttagattccacacataagtgaggtcatgcagtatttgtgtttctgtcctggctgatttcagttggcataatgtcctccaggctcatccatgttgtcacaagtgacaggatttccctctttttaaggttaaataataatccattgtgtatatatgccacattttctctattcattcatctgttgagagatacttaggttgatttcacattttagctattgtgaataatactgcattgaacataggagtgcgggtgtctctttgatacactgattttaatttttttggatagatacccagtaaagggattgctggatcacatggtagttctatttctatttttttcagtaacttctgtatagttttccatgctggctgtatgaatttacattcctaccaactgtatacaatggttccctttccactacatcctcaccaacacttgttatcattcatctttttgatacaaccattctaacaggtgtgagagggtatctcattgtggttttaatgtacatttctctgatgattagtgatgttaagcatttctcatgtactcattgatcatttgtatctcttatgttaagaaatgtcttttctcatcctttgcccacttaaaaatcaggttgttttcttgctattgagttgtttgtgtttcttacgtattttcaatgttaaccctttatctgatacatggttttcaaatattttctcccattctataggttgtttcttaattatgttgattgtttcctttactttgctgaatctttttagtttgatgtgatcctgtttgtctagttttgcttttttattgcctgtgctttcttggtcattcccaaaaatcattgcccagaccagtatcatagagctttgcccttctgatttcttctaggtagttttacagattctggtcttaggtttaagtctttaatccattttgatttgaggtttgtgtatgatggaagataaggatccagttttattcttttgcatgtgggtatccagctttcccattgtcatttgttgaagaggctctcctttccccatttagtattcttggg

SEQ ID NO: 1883204 - DNA, 4001 bp, Homo sapiens
agtttactgtggatcaggattacactgacaaaaagtcaagacacttcccacatccatgacatcctgctaaaagaaattcagttgaggaggctctaaagatcccacagaaatattcattagagaaagagttagctgaactcattggccaggctcaaataagaagcatttcacaactggccaaatcagaattctcacatctatccaaattctcttcctgcattcagcccaggacaggctgtcaattcaagcttaagaaaataggtgaacatgcaataaagaagggaaggaaggtgagtggaaagaagggactaatcataccccatcctcccaaacatagactggcctacttaggttgcctaacttaataaatgggttaggggaagatgtctaatctttgaatgaagactaaaatattaatttctagattaccatgttgaatttgacatttactggacatttctgactcatctgattttgatatacagagtgattggataattttctatcatctattatctattatctaagaatgtccaaaaattgatgcaatctgccgacattttcaaccagtggcctcgataactgagtaactaaataacaaagttaaagttgaagatcaaagtgaagctgtgttttgatgccactttatgattcatgattgttcaacacaccagttacaaattttaccagtgacaggtactttaaatgagctcatttaatgtttaagatggtcctgaaagtttgatattaatataatcacctttaagaaatgattcagaaaagttgagtaattaacctaattaaatgcaatactccatgagtaactagaactcttcttctcacgaaaaaactagagcatctgtatagctctaaaagccatttgccttctgctgggtcctggtgtcagataatgatacagcagaatgaaataaactaagtatcgcaacattttataggtgcaacctgaatgaaatgtctcatatgaatatcaaatccaaaagataaaacatgtcctctccaaaaaaaatcttggaaagacatgtacatcttaactaaaatcacctgaaaaggcaccagaaagaaattgcatttgtgatggcaaaatgtcttaaaattttcttctcttttttctagcttattatacaatcagctaccttcaatctctcatctttgctctcaatatatccaaaactctcttcccaaattcagggagtctactgagttttctctctaaattccttcactagcctatcaggtctgtgatttccaccaaggacaagttcttcaccctgcataataacaataaagcaaacactttgcccttacccacatcatcacaatcaaaatgctgagaagggtaaaaggtgacagtaaagagagaaaggccattaatattatatgttagtacattctatcgctaccacatatgagttcatagaatgggaacttctatttgcacttcagtaattgaacgacttcaagcaagaatagcaattatatatcaagacttaaagtagaggatgagcttggacgtgcattatattagcatatcaatattttgcctactctcctagtccagatgctaaaaagttgaaaggatggtgaagccaaatctaagatcctcatttggaagacattttctcctacctttcaaaggtagttcctgaggagagcagccatccccaagtataagctctatgagacctataatcagtttctctctaattgagcattttctttccttagattttggaagaagcacgaaaatgatttactgatttaggaactgggtggagtagaccacaaaaagacaaatcaaaaacatctggaatgaactagttgagagagaaaaagagagagcaagaaaaaagtaaggctttcaaatgaaacaaagtacagatgatttggccaaatttaagccaagccaaacactcacattgaacattgcacttgggtgtgtttcaagagcaggagccggcaagagggagcctcagccaacactacatcagaggcacattgtggatggaggaaatgagtttagtcaagccagctgtgacttcaaaggggctgctctcccagagaacagtgagaaagggttcccccttcagtgaagactgcaaagttcagccagcgccaacccaaagggaatggactccaggaaggggcaaattacattcaacatacaagaaagaatattttccttcatgaagtggctgtgacagtctgaagaggaaggaaaatgacaaaaaagaaaggtgagaagaaaatattctgatgcccctttggggactgtagtcctgtgtgcatacttataaaatggggtatttgtatacacatttgtacttgcataaggttgcttttaatctaagacacctccaagcatgaatcatgtttccaaacatgtgggaggagagaacataggattcttccctgctgactgccatagtttctttccctctttgtgcttctagaaaactacacatttctttcaaattacttacttcacacaaatttactgaggaacaatagggtggaccctgcatattcgaagacaagatcgtctgtgttccagttcaaaagaagaagctagacacataaactgaagattatggtattgagtgataagccttggagcaggaatcccaaagtgtgatcacatgaccagcagcagcaacatcacctgggaacttgttagaaatgcaaatttgcaggccctaatccaaatctactgaataagaaagttgaggttgatttaacaagcccttcaagtgattcaatgcttgctaaaactggagaaccaccttgatagtgaagggacaaaaggacttttgtgcagagagctaacacatctgaactaaccttgagatcctctgccatctataaatcacttctcaatctcttcccgataagattctaaataggtggctctctggcaattcaagggatgatacacgcgtgtgtgtcttctctctttatgtaagttataagatctgaatgacagaggcacattcttcttttatgttttctttcctttctcctcctatttttagggccagtacgtggaaaatgcggaaattggaacttactataagtaactaattcagaaatcaggctggcagaagtgttatacattcactggaagaaattggtgaatatatggaaaacataaatgttatgtatcctggaacttaaaataaaaattaataataaaaaatgttatctctcccaagcactcatttgatgcttgaatcctctctatgacatccttaccaaggatttgttcttcttatgcttgggtacttcaactgatgagaatctcactagctcaggatgcagtttgctttcttttagatagctctgttagagctgccttcttccagggctgaacacttccataatttaaattccatttattagttttagtcctgccccttgggaactcgtagcaaagatacttacatattaatgtgacatttttcaggtacttgaggttagtaattatgtagcatatgacatagattaaactcatagactctggaaacaaactacttgccttcccttcaaattcttattctgccacttacttactatgtgacctccagagagttatttactatctctgtaactttatttctttatctatataaaaagatataataatagcagtacatcaaagggcttttataaggagtccatgaattaatatatgtagatgtgcctggaacacggtaagtgctctaaaagttttcactattactaatcatcatcattattatacagatcttgtcagatatcggacctaggccatctttctaagtctttactcattcattaagtgagctcattcactcccatggcttcaatcaccatctatatgattatgaaaaatctattttcctcctgagccaagagctaaatgtaagtgaccagttatggatacaggaattgctctggccaccataatttgggtggaaatggtgcataccacttccagttcttgc

SEQ ID NO: 1883205 - DNA, 4001 bp, Homo sapiens
tctcgctctatcacccaggctggagtgcagtggcgcgatcttggttcactgcaacctccgcctcctgggttcaagtgattctcctgcctcagcctcccgagtagctgggactacaggcgcgtgacaccacacccgacttattttttgtatttatagtagagatggagtttcaccgtgttagccagaataatcttgatctcctgacctcgagatctgcccgcctcggcctcccaaagtgctggcattacaggcgtgagccactgtgcccagcccagcttaatacttttaaagaattcagctttaatcaaattgtatgtagtttaagtagttgtggagtaaaactttcaataaattaggaagttctaaaggtgctctggagcctcccgtatcaccaaggcaacacaggctggatgctgttctgtcactgcttctgctggcctcctgttgccattgagttgactagcatggaaagcacagaatgggacaaggaaatactgaaatgctttgccactaactttctctcaccctaggaaatacccttttttcaacatgaaaaatctgaactagataatcttcattactttcaggtttaaaacatgtttttctaaaattaaactaattttaaaataaatttcactggaataaaaatgctgacggtagagaacacagaatgagttttctctaagccctgcagttctccaaggagggtatcagatgtgtttcatcacatgaatcttttgattttttttttaggaaattaaagaaaaaatgttaaagcatcctaagattgattagagttggaattatatttaaccccggggacaaatcagttacctgttctagagagccatgattctgctaaaaaggtggttgaaaactaaaacaaatttagactgaaatggaccttaggtaaaggatctcagcctccacactgtatacatgtggaatttttttttttttttttttttttttttttttttttttttttgagatggagtctcgctctgtcgcccaggctggagtgcagtggcacagtctcggcttactgcaagctccgtctcccgggttcacgccattctcctgcctcagccttccaagtagctgggactacaggcacccgccaccacgcccagctaattttttgtatttttagtagagatggagtttcaccatgttagccaggatggtctcggtttcctgatctcgtgatccacccacctcggcctcccaaaatgctgggattacaggcgtgagccaccgcccccggcccatgtggaaatcatttacttgcacaaaattatgtagctaactggcaagagtgagaattaaaatgcattatgtttcttaactcccagaccaatgctgcatttacttgtataataccagtatcttgtgatataggctaaaggtatctctaatcaatgagttacaacacactaatataaattatagaaggtttatctctctcagtatttaagtaggcttcactcactcctatcttaactgaaaagcccttcctctgcggttttccagtctcaccctcttactaggcatcagaattagctggagctcttacatagaagtcaacgcccaagccttacctggaaagattatgattaattgatggtaatggccaggtataggctatttttttttttttaaagttctccaggtgactttaatatgagagaactacagtcttaccgtgtctggaattgctgggttcttggtctcgctgacttcaagaatgaagccacagaccctcgcggcgagtgttacagttcttaaagatggtgtgtccgcagttggacgtgcccggagtttcttccttctggtgggtttgtggtctcactgacttcacgagtgaagctgcagaccttcgcagtgagtgttacagctctcatacgcagcacggaccccaaaagtcagcagcagcaagatttactgagaagactgagagaacaaagcttccacagctgagtaagataacctaccgggttgcagctgttgactggggcggcctgatttattcccttatctggccccacccacatcctgctgattggtccattttacagagagttgattggtccactttacagagagcggattggtccgttttgacagagtacggattggtgcgtttacaatcctttagctagacacaaaagttctccaagtccccacccgtcccagaagcccggccggcttcacctctcactggcacttaccatggggactgtgcggcacctagcctgggcactctggcagcccagagggagcttgaccactgatcaagctcaggaggcgccagccagccgtgcggagtgcaggcccgctgagcccgcgcccacctggaacccgcgctggcccgccagcgccttgcgcagccccggctcccgcccgcgcctcccgctccacacctccctgagcagaaggagcagagggagccggctccggcctaggccagccccagagagagggcccccacagcgcagcggcgggctgaagggctcctcgagcgcggacagagcggacgctgaggccgaggaggctccgagagcgagggagggctgctggcatgttgtcacctctcattacctctttcatcttttcccattcctgagctactgctttctcgttaactcagtctgactttctaacacttacaatgacataataactatattaaaaacttcaaaagaggtgaaatttacagtaaagggtaaagaaattcaagtctctgaaaagcaggcccttttctaacaagcctcaatgtttatattgtattcttccactgccgctgctaagcttatctagagtggtctacattttcccatctcccattcgcaactcagcactgtggcaagacttctgtgttcccaagttgtgtgtaattactgccggcaagctaccaatgactgcttaaattgtcaaactcaatcagtgtttttaagttaacacgtttggcctctctgtagtatttaacagcgtcctgtttctcaacactttctcttagctgtttttttatctgactcctttgtgggactctcatgcctggccctagtcttggtcaccatttcttctcacttggtaccaaatccacaccaaacgcttgatgtatcacctatggatgttgataaattttcaaacctctatctccagcctctatctcttcttgagtttcagctccgtaagtccacttacccagtgtctcttgatttccatggcacataggcatttcaaataaaatattgtctcctctgcctccaaattgctcatgcttacatcccatctgctatagtttaaatgtgtgtcccatccaaaactcatgttgaaatttcattgccattgtaacagtattaagaggtgggacatttaacatgtgattgggtagaattaatgctgttataaaaggacaggttcaacccctttttgtctcttggttcttctgccttttgctgagtaaccagcctttctccactccagagtctgcaaagcatagttttggaagaagagaatggcctcaccagacaccaaatctgccagccttgaccttagaccccaaccttcagaaccatgagccaataaatttctgatctttataaattacccagtctcaggtattctgatatggcagcacaaaacagactaagacaccatccattccaaaaattgaggagccatcacagcttcttccctcttttgacaccattcatcctatccttgccaaatttattttctttatgctaatggctctcaaatataaccactccctatatttgttgtcatgtcctatttctggccttcattatttcttctgtagtcagtcttcagactggtacttttgaccctcttcaatttctccaaacttctatgagtgtgatttaaaaatgtagacacaattgtcactttaatatcacctcatccatacatataaaacccacacttgtccacgtgcggtggctcatgcctgtaatcccagcactttgggaggctga

SEQ ID NO: 1883206 - DNA, 4001 bp, Homo sapiens
ctattcaaagatatgtacatgtgtattcttataggtctagaaatttcccgttcgttatttgggtagaagaaaatgaagaaaatgtaatcaaaacagtgctgttgatgatttccttcttaataaaagtgaaaatattaaactgactttaaaagtcaagtcatgaatgtgtgtgtgttctaaatgttgtggcctaagtcttacaattctgagtgctttataaacacagcaaagccctcagctaccctactaaaaagaccaacaaaacatgttaatgttaaattcagcaaggctcaagttctcagtttaacacacatggggctccactgctctaatctatacaggacaaggacttactggccctggaatgctcggccctgttttctgggccttgttcctctggctaacaaccttactagttagtataacagtggctacataagttatggtgggaaaaatgtaacaataatgtgcattttgaccagttagtaaaaaatcctctaatataaacagaaagataacacagagaaattgccctgaactcatgtcatcttactattttcctatgcaaggggcacaaataggcttgctcccttctcaaacttggatgagacacttcagttttaagttggcattttagtttgtttttggttttggttttgattttctggtttaaaatatgtacccagttgtattcctacacagaaggaagagataatagccaataaatatgaaccatatctacaaaacactgataagaaatcgtacatgcttttctgtgtggatgttaaaacagtatcattaatattattttggatagaattttcactcctgctgcttagaaagcaaatgagctaatgatataatttctcttcttgatagagattcatcagtgtgttgattcccaaaactgcatggtaagtacatgcacaaacgtaatcaaccaaatcattagcatttattaaagaagacagtttcaaattgatgggcagttctgaagaaacgtataaatataaatcttttcctttctaaatcttatttgaattacaaccaaaatatattctttgaatataaccaaatgtattcttacttttttaaataaaatggtcaacaccatctattagaaaaaatatcattttgaagcctaataaattgaatttcagactcatgtgaaatagcaaatatgtgttaaaaatgatgcagtcatgtctttgtttaacatggataaataacattgtttcaaactaatatatcagtctccaatctttgcttgcattgtgttatgaagttgatggttatactctgtcatcagatgttatcattaggaccccagaaaaagagttccatttaaatattgtttctaactctgatagtaatcagattactgttattactagatcaaggcaactttatgttagttatcattcttccatcttttcacataaaagagtaaatatacaagtacagtattgccagttagtggtaatactcttgtttttcattagtagagatacttagcaccaaactatcaaatagtttattttccttaaaagttagattgtggaatacaagcatatagtttcccaaaaagttataatttacatttttcttctcagatttaaaactcagttactaagaaaaatagctaaaaccccactttaaaatgtgctacattgtgatttgttaatatcataccagtatacactatggaaagattattatacatatttttacaagtttatggaaacttataaaatatttctccttattctacatacttgctggtatgcttttcaaaaaaaggtatagcatctttcatgaaacattctcccattttttccatatgcaattaaactttacctcaatctagagtaagacttacctgtcagttgcttatagtagttactaaaagttcatagttccttgcagtataccaaaagaaaatgtctttatgataaattcagtctacattttatcatttactccatttacattttaaaaaatagaatagaaaggaaaaccactattaaatgtccattgtaagtttgttagttctaatatgttttgttgctccccactagtgaaaagttctagagagaaaaagggatggcaagaagtgagagtttgttaataggtcatagatttaggctctgtttacagaaatctgaaacactggggtaatgcatgaaaaattaagttatgcacaaatgtttccaattactcacttgtttggcatcacatagggtggaccaagcatggaaattaaagtctacatttttcaccccattgttggctgtgttgtagaaatgaccttataggtcatactgctgaatttataagtttgctagcagtaagtataactgttcctattttaccatttcagaatcaagcaaaactaaggattaagtcagtcaatccatggaggcttaatagaatgaggcatttaaaatatttcaagaatgggcatgagtagatcagtgacgatgactcagaatggtgtaactgaattattttgtgagtaaagagctaccttggtcctcctccaacctttagaagctttaaaaaatgagtgtgaactttcatgaggttaatgcgttttgaacataccagaaagatcaaaccttagcccacacatgagaattaattttcttacagcttcaactacttaaagacacctcttgtgatatatggactctagaattaatgctacagtcacatgtcattttgtaccttcaactagcacacctactaccggctttgcccctcttctgcttgaaactggcatcatataatgaaagatgaaggagccaatacgcttcttaagaagcaagtagtcatgagacttcacctgccaccacagatagagagaaaaaaaaggggagggggtagttagcaatttcaagagccacaatttaccatggaagcctctacttaatattccgcttgatctgccaagtttatagcctggcaaatctgaatacaaatgtcgatgcaaatgaggattcattattcttacaaggtctttgtgttgaagcttaatgtaacttggttcctatggttgctcagggaacgtagattgcaagacagaaaaaaatgatgaaaagaacaaaaatagaaaggaaaataatagaaatagaaggaaatgcttaaaatgcactttagcttgaaataggaggatgcataggaacaaagcattgtccttacaatctctgcttattgccagtcctggtatttacttctcatcagcaacagaggagttaaccactcaagaacattctacacagagagaaaacataacaagtctccttttgctgattataacacattgttcccattataaaaccagtacttcaaattgtcaaattttttaccattcttttataattatagagctcatgggctggtgggacctacacattccgatctctaagaagactgaaaatgcattaaaaaaaaaaccccacccaacaattccctttctttcatatggatttattgcaaatacttcagaatcaatatgttaagaaagctaaaattaacaaactacacattgaaaaatcacaacactttagcatcattcatttattgtttaccataacccattgcacacaaaggttgcaaaacctccaagttagaggaaatcctgagaggctgcaaaattatgattatatctcatataccacagtatattgttccgatgaatcttttgcatggttagttgttgtttacatacaaataccttctccggaaataaaaaatgtactgaaggtaacaggagctgcaaagcttagcagatccgatgatcccaagatcatgcagtaaggcttgcttcttcatccataaataaagcacatttgcatccattcagtcaaattagctccattaaaaaggtggttataattagctcctttttctggttcacgggtaaaattcttgcatgcctgctgttttgattaaatccaccattgtcttccaatagctagtgctaattcttccaaggaaat

SEQ ID NO: 1883207 - DNA, 4001 bp, Homo sapiens
tgaaagaaacagaaatagagaggttatagagaaagaaacaggatcaaggtaagatatttttggttgtaaagtgtttgaattagcaggtgggaaggaagcctgaaaataaagaaaagggagttactttttaatttttttattatttatttaattttttagagacagggtcttgctctgtcacccaggctggagtgcagtgatgcaatcaaagctcactacagccccaacttcccaggctcaagcaatcctctacctcagcctctaaagtagctgggaccacaggtgtgcactaccacacccagctaatttttttttttaagagatgaggtctcactatgttgcccaagctggtctcaaattcctgggctcaagtgatcctcctgcctcagcctcccaaagtgctgggactacgtgagccaccacacttggtcaactatttaaaaagaaagattgaattacaaataaatataactactagaagcatcaagtcaagatacatggcagttgaaaatttctgaggattgtctaaattcccgtttatgatgtctttcacctttatggtgatggaagaaataggaagccctgctagcatctgctacagctgttcattcattcattcattgattcactcaacaaatgattatgaagccaccacctggccaggcaccagtccaggtgttagtgatccagcagtgaacaaaattgacaaaaacctgcttccatgggtaataaatgccccctgacactcgattcctggctctcccaccttcctacagacctgatccatgcacttggcttccagctctttctgggccctacaggcagatgtacccaggataccaggtgccatctctggcagctgaaagtttggttctctggattgttccaaacttcattgcttttgcaagctgcttactcaccacccgacaaagggtgaatagtgaatacagtcacatctttctacgctcaccatctttcttcccttttagaacctagaggaggatagaaaataacaaaattttccccacctgaagctgccagtagaattcccaaaataagattaacttctctagatgactcacctaaaaatctcgccacacttctcttgtgctgctgagaaaacaaccaaaagtagctattatgctggaatgtaggtgaagatcaaaagtggacatcaaacttgccagaagcagagagcaggaagacttgaaaatagagattctggactcagactacccaggttccaatcctggtgtcctcacttaccagctttcaacaccgaaaaggagacgcagatggaaatccaccctgcccaagaagcagcttcccactggaaaatggtaataagagtaataatagcaggtgcatcaaatagctgtgaaaatgagatgcagtcattcattaaagtgctcagcaaggggaccacgtgggcggagggctgaggtgagggtgcattgccatgtggaagttgggtactacagccagaatgcaaaaggataaatccagtgttcactaaataatactgataaattttcttacctaatacactctccttctgacccactcagcctgaacatagagaggcaggaaggtaagatttccctgtccacttcagaaactgaggttagtacaattagttcttcattcttcatgtctgaggcccattggcttcaagaaaatctatctttctcttaaaaacaactcactgtaaccattaggtcaaaattacagctaaagatcgagtttctgcaaaatgtcaaataaaatgtcttaccatttgtgacaaacagctgttgccttcttctccacgatggaatcaaaggatcttatcaccttaaaggaaaacgactaaagcagaattattttccttttaatcttttttcccctccatggaaatttacataagaaggagctgtaatccattcctttctgtgtgtcagaaaatctccactcttgtggtctccatggcagcaactcccaacctgagacagaggctgtttcaccccacagagtgcattggacttttatctggtgagtgcaatcaatgtagacaagcacattggatgactcaaacttgggattatttctgattttgaattccgtgtgtgttttggctctctgtgttggtcaacagtgccagatgaattcaagtctgcctgttactttatgttgtggtgaaatggcctgataagccccctggcgttttgaatgctggctctcgctctacaccgatgatgaagcattttccaggtttctaagggggtgatgcaactgactcactttccgggtcagtggggacttgccctcaagctgttctggcagcggtgggccactctttctcagcttatctttttgtgatgtcctgaaacacactcacctgtggccactgaatagcgttaagcccatggtgggtgagctattgtgaagctgaattagcacacccaaatgggatttaaacccatgatctgccctcgtgagtgggaaccggtggagtgaccgtgtccgacgctctcaaggctaggtcaggcttttctgaaatggccatttaaagcctccatttgtttcatgctgtgaaagactctgtttagagggtgaaaagacaacctgcagactgggagaaaatatttgcaagccaatatctgacaaacattttgcatcttctagaatatataaagaactttcaaaactcaacagtaaaaaaaaattaaacatggctgaaagacatgaactgatatttcaccaaaaaggataggcagatggcaaataagcaagaaaagttgttcaatatcattagtcattaggaaactgcaaattaaaaccacaaaaatatatgcctacacaccacttagaatagctaaaattttaaatagtgataatatcaaatgctggtaaggatgcagagaaactagatctcttatacattgcctgtggacatgtaaaatggtacagccaccatggaaaacagtttggcagtttcttacaaaattaaacacttaccatatgacccaacggtcatactcctggcatttatcccagagaaatcaaaacttatatttacacaaaaacctgcatataaatattcgtagtggctgtattcataatggcaaaatactcgagggaaaaaaaagcaaatgtccaataggcaaaggatggaacaaactgtggtacctccatacaatggaatactacttagcaacaaaagcaaatgaactcttggtacatgcaacaacctggatggacctcaggcattatgcttagtgaaaaaagccagtctcagaaggttacatacctttcggatctgtttccacttatccaacattctcgaaacgatgacagaaagagcacagattagtggttgccagggagcaggaggatgaggggggaggaatacaaacagatagaatggaattctttttttttttttttttaagacacagtctcactctgtcacccatgctggagtgtggtggcatagtctaggctcactgcaacttctgcctccccagttcaggcaattctcctacctcagtctctggagtagctgggatttacaggtgtgtgccaccacacctggctaatttttgtatttttagtagagacggggtctcaccatgttagccaagctggtctcaaactcctgacctcaaatggtccacccacctcggcctcccaaagtgctgggattttaggcatgagccaccgcgcccggcctgaatggaattcttttactgtgatggaacagttctgtatcttgattgggatggtggttacatgaatctatacatgggataacattacatacacacaaatgcaagcttaaaaaatgctgagaacagaataaaatctgcagtatagttcaacactaccagtgccaactccctggttttgctattttaccacagctttataagatgtcactgctcggggaggctgaggggagggtatatgtgaccctgtacttatggcctctttctgtgagtctataactatttaaaaataaa

SEQ ID NO: 1883208 - DNA, 4001 bp, Homo sapiens
ggggttatattaaagaaactaactcctttcattcaaatcaactgaaaaaaggcttggaacttaagaaattcatcttgagccaatgcataaaaactcactgggagagaccttgattcaagaaactgactcactggtacagaggtcagcaaattatcccaaggactaaaaaccaaacaccacatgttctcactcatatgtgggaattgatcaatgagaatacttggacacatgaaggggaacatcatacactggggcctgtcatggggtggccggatggggaggcaaagcattaggagatatacctaatgtaaatgacgagttaatgggtgcagcacaccaacatggcgcatgtatacatatgtaacaaacctgcacgttgtgcacatgtaccctagaacttaaagtataataaaaaaaaaaaaaagaaaggccgacagacgagaattcagactatgcttccctttgtaaccctaattgagtggctaagaggtttcctggtaacaaggatctgtagagtgacttaaaacaaacaaaatttttaaaagatcaggattatatttactttttattattctttctagataccatttttgaatgtgagattattaaccaaaaaagatcaactttatgcaatcatacagtaaagaatccctccagaaagaggagctagagacacattgcggcttaagaaaatatgtatttttaagaaggtggcagtatacatatggaaaaatgaaccaagctgcacatttaagatttgtatacttgacatcacttgagaataatgtgaaaacaagatcactctctctaggaattaaatatgtagctagtttggcttgttagaacatacctattacagtcaagattctggcgctcaggtaagttaaaccaagtaaaatagttctcgcctccggccggggcacggtggctcacgcctggaatctcagcactttgggaggccgagacgggcggatcacgaggtcagcagatcgagaccatcctggctaacgccgtgaaaccccgtctctactaaaaatacaaaaaattagccggcgtggtggcgggcgcctgtagtcccagctacgccagaggctgaggcaggagaaaggcgcgaacccgggaggcggagcttgcagtgagccgagatcgcgccactgcgctccagcctgggctacagagcgagactccgcctcaaaaaaaaaaaaaaaaaaaaaaaaaaaggccgggcgcggtggctcatgcttgtaatcccagcactttgggaggccaaggcgggtggatcacgaggtcaggagatggagagcatggtgaaaccccgtctctactaaaaatacaaaaaattagccgggcgtggtggagggcgcctgtagtcccagctactcggagaggctgaggtaggagaatggcgtgaacccgggaggcggagcttgcagtgacccgagattgcgccactgcactccagcctgggcgacagagcgagactccgtctcaaaaaacaacaacaacaacaaaaaaaatagttctcgcctccaacacccatgtcagcgttacagggttcctgctgtagaagcctatttctgtttgcatgtgcaacatattattccataaacatgagaaaaagccctgatatagccacaagagtaatttctttccatctggccctgccgaggctttcagcatttataaagagctgaaagcagtctgttttagcatctcataaagccccctcctttaaccaagggccagctttctacttctttgatgatcatggctcttattagagaatgcacacttgtgtttgtggctaagttgctactatacacaccttcaaatgccagaaagcacaggcagtctcttggatccttgcgtcttggtgcaaagtccttcacactctgttggtaggtggccctccctcctagaaattctttctctctcttcagctctgctgaggcttgctcaaggccagggcattgagtggtgtgtgctaatgacatattggatgtagtgtgaagacaagagggacgaatggcaaagattaactaagttccaaaatactaactttaattgcttttgcctgttgaaatagagttatgtagaaggacagctaggacagaaatatacaaagcattatgtgttactgagaccatcccagaggctgctaatagtgtaatccttcatgatttgaattatctttgattcttctataaactcttcaaattataactttacgttgcttaagtgtttcttggagttttatcatgataacggctagcatttatactctacctgtaacaccgataggtctgtgggtagttccagaatggtacataaattctaatacataaactaattatagaaaacccctctgtttcaatcagatctagagaaggaataaaaatgtacagtaaatgtgccaaatttaatacgcttggcaagagaaggcataaatatgatataatatcaatactcataatagagtgcttgaaaaaaatgtaatgccccttcctatggatgttaatggacttttcaggaattacctggtggcagatgcagaagtcactgcagaggaaacacatgaggtttagctgagttcagatgtaaggttctgagcttctttctgccaagcaggcactaagtgatcttgaagcagtgaattttgactgacacgggggcttttcttagccttgctgttggctagacaactgaatttaaaaatgtcaccagccccctaattctcggtgtccttaactctgaaatggattcaataatcgctgttgttaaaggtggtatgaaaattacacaggtggtcaataatcagtagttttatcttttctctgcttcctaacgtttatgccaagcccattgtatcctgaaaacacttctcttactgtacccttcacacgttcttctaattgattgtttatgtatttgtctttgtattatattttgagctccttgaggttgagggcttttttctgtgcatgtttgcatccttgtaggccagtgcagtgactgtcacatagtaagtaatataaaaatggtgaaccaaggaaattatttaatgcctaaattttattaaatgagttactcattcagttaattagtcatatttttcagaggcaaaggaattaaaataataggatacttaagccactgtgatttagtaaaagaattgatgggaatataaggttgattagaaagctgtccccatggaagctgaactagccgggcccgagggagaactggagcactctgaagagcaccacacagctctgatgaccagtcattctgtcattctctcaggagaccctgctcctcctgattctggacataaaaggaacttggagagtcctgatatagtttggacattcatacttgcccaaatctcatgtcgaaatgtaatccccagtgttggaggtggggcctggtgggagctgtttgggtcacaggggtggatccctcatgcctgggcaatgtccttgtggtagtgagtgagttctctccagatctggttgttaaaagtgtatggcacccccactccctcactctctcttgtttctgctatgtgatgtgcttgccctgcttcacctacagccatgagtaaaagctcccttgggcttcattagaagccaagcagatgccaacaccatgcttcccataaagcctgcagaaatgtgagcctgctaaacctctttataaattaccccatctcaaatagttctttgtagcaatgcaagagtggcttaatacagtctcattcagaatgggagatcatctgatgctgggacccagttattatcaggatccactcattcctgggctgagcctgtcctcacctgtgctaatggtttcaaaagcacaatgtatcacatatgacatatagagctatgggtttccatttacctcatctcagggtagcctctaacaaattccatgatatatgggtgttatttcaccacttttctgcatggaaaacaggcccagggatattcagtccattt

SEQ ID NO: 1883209 - DNA, 4001 bp, Homo sapiens
ctaaaatcaaattcagaaattcagacaaaaaatacacatgcaaaaaagtagaataatcctaaggatgaatatgatacttgaactgaagggtaagaactaaaactgagaaatcaccatctctggcaccatgtgttcattcaattcaacccaaatgacaaatataataagtcaactactgctaggtgcagaaaatgaagtagttccagactgcaagaaacacataatattctatgaatattagattaaaatgaaagtatggaattatatattttaagcaagctgtaatcactattatatggtgacaaattgtttttgcagtaattagtttatgttggtagttactagattattgttacgtgcttctaatatgttgttgatgttttctaatgattcagttgaaatagacaagttattactatagattgacaatgtcaagtagaaaaagtttatagctataccaaatagatatatttaatttgaaatatttaaataatagaaaacgtatatttgagcaaactaattattttgagaatcaaaagattaaataactgacacctttggaaaaaaataataggcttcgagtggcattctctcatgcccaatactctgctgtgctttttaagggaaattacagctgccagagttaatttaatttaacataatttaattgttgaatttgtattttgtacacatcactgaaggccctaaagcaacagtatgcttttctttaaatgaatcatgttttttacacagtttaaagaaatgattggttttgaggacagtagtgaactgcaaagaactacctaagtatgcaaaataccatccagcaacgtttccctgacaccaatccaccaatgaatgcgctaaaaaattaagaagtagatttcacttcttttacaaaacataatttagtcttaattcccactaaatacaaacaccacagtcacagagcttggattagaccttatatctccctcacaacttaccttccctggccccgctttctccagcattcacccctgtccacctgcatgctttaactctctgtgtacaagagcatcacattgtctacatatatgagtctcacatacaatgtatcattttataagttgttgttaatatcaacaaaagcacaatagtctctaatcccaaacaagctaatggatttacttaaggacactacaatgtaatgaaaagaagaatgaaatactataaaaaattatcttatatccagcttaggtgatgaacagttgtgtgtgtgacttctggattcatctgttttcaagtcacagcttctctcttcctgcctccttaaaagccctcatcctaacaggtttcctggtctgaatctctagggttccagaataaaaaagcagtgcctgcccttgaaaatacttgctcctcttcctttttgaaggcagaatgatatacctaaaagcaaatgattctgtaataagatagagttgcaagacatacttaagtccttttaaatacacgtataatgtatttttcaaatcttactgtcttttaggaactatgtacttaagcattccttcacactagtaaaagcagctaccattattacctgcattttactgatgtgttactttctgaaagttacagtcacactgtaagtaaagacaagaatttttttgatggttgtgatcaacacttagctggttttcagtgggacgttcagctgttatatcttgttctttgtgctgcctgacttctacgtggacattcatttagatagccatgaatatacttgattgccatatacaaaactcatgctgaattctgctctcatgtttcctcttgtgacagggaagttactttgatctcctggctttcgctttcagacaaatgctttgcctttctcaggaacataaggaaatcatagcctctcttctctgttctgtaggagacttggtgaaagttccttaggcctctctgacactgacacatacagtcatttttactttccatgccatgatcgtcataggatagaattcccagaagttctagaaacaagtttgattgtccattgtccagtagtagaacaggcttggtctatcttacccccaggtatccaaatttagtagaagttctactgacaattcctctagaagctgaacagtggaatgcggtgggcaggaagcctctttctcaaagaattttatcagttgctgtcacttgtggtggtgcaggggagctggcacagcctgacttgtgaaagccaattgttagcatctcttcccaacttcacaatgagtgctggcacattggtggcttgaaatcagccatgataagagtatttatactacagaattgaaaacattacaaattgcagctttccacccacccccgacccccctcccccaaatgctgatttttaaacatttgccagcattgctcaagcttctcttcaagttccttttgcttccccccaaccaggaagagttgtattttttttaaaatacttttctgtggttacgggtgaacatatcaagatccatatgtattctcaaatcttctagtcttataggtgctgcaatccttcttggactattagagaccttatatttagtgttcttaatgaggatgagtaaacagttttaaagaaagtaggggaaaactggtttatacttcacaaactatattcacgaaaataagatcatgcacttgcatgtgaaaaatgtcctagtgtgtcccaaagggcatggtgttgccagaagggagtagcagtctcctgggtttagaaactcattagagtggtcttctttacggcctccaggaactgacaccagtgcttcctgcttcaggatgcagaccctaattaaaatcctggtgataaaatatcattgaaaagtccactcccagaaacatgaaataggtgtacatttcctattcatcctgctaaatgcaacgacaaaccatggacattatatgttaagtaaaacaagactctggaaggtggggacaaaaggacaggctagctagggatctcaggacatgggactgacacaataatgagttccctgggatttctcagacacggagctgaaatagtcagcaatccagaaacctaagacccagacaaaagaagccccagcaggatcccactctgtctagtcaaaggacaaagaaaggtgtggcctctagaaggaaaacttttagataatcattattctactccagccaaacatcatggaaaagcaaacaacaaataaacaaaaccaaataaacaaaaactgaggcctcagcaccacccgtgatagtaaaggctaaatgagaagctcagacttccaccctcctgtggctgtgacaaatggtccaaaacccccactgcgttggtgtcagagaaggcaaaggaagtagctggaactttcatgctcactagctgatgaaggactcctttcttccttcatggtattagtggcaaatgtacagacaataggggatcccgaacttctacaccctgcattgcaattgctcccaacatggtgtcagtggagaacagttggaaagtcaaaccttctgctcctgttcagcagcccagcaggaccagaaatcatctccccaccacacacacacactcaggggtaaatggaggccagtgaagaacctgggcttctacctccacctggtagtaacaaggtagccttctccttcccctgctggagtgtattaagaagctaaaaatgaataaaataagatccagagtctcataagataaatacaaaaacattcagttttccaaaaaattactcataatactaataaccaaagggttctcaaaatgaatgaaaagcatttgaataatctgacaaaattttaaagcagccagggtaataacgattcaatgagaaactacaaacacacttaaaacaaagcctggcagagacacaacaaaaaaagagaattttagaccaatatccctgatgaacatcgatgcaaaaatcctcaataaaatactggcaaactgaatccatcagcac

SEQ ID NO: 1883210 - DNA, 4001 bp, Homo sapiens
aaggggcctggagccttggcctgtgtgggtgtggggcatggccatatcacctctggagcatgaacagtgcctgccagtctctggacatctgctcaggccacccagcctcagctcagcagctgggctttctccagcttttgggctgtccagctgcagctcagcagacagcagcataggacttgtaacttattcacctcgaggtgaataagttacccacagagatttaggcagagaaaactaccgtttgagccaataggttaaagaaaacgcaccagtgcctggattttgcctttaaatccagggacagcctggatttaaaggtctatggaattcctgaggtgaatgcttcctgaagccatggagaaggatggcacagagcaagtgtgacatgggaggtgtcacatgcttctcttaaaggagaagcaaaactatccggatatggggaaaaggacaaaatatcatacaggatgcagcctcccctgccctcaaagaggggtgcttatcctgatggcggggggcggtttcctcactcaggacttcctctttcttttcttcggcgcagtcccctccaattgcttgcctcagaatcactggctataattatacaaaagtggattcccgaactgcctcccagacagactgagtttgaatctctgtggctaggacctagatatctgcatttttaataagatcccagatgatgctgatgtatcatcagctaagaattactggcctaaaggtgtttccaacacagcccaccatgccagtacaaagcagctgtgcacacttttggaaggatccccattttctcctggggaactggccttgggatatgaccaatagcgccccatagctctcagaacaaccctgtccccatgggccctcgcgggcaggctgagcacagcaatgtggcactcagcggctggcctgggatttgttggaaataggtttgctgcttctcagccaagtggcctgaagcaaacgatttaacctgtcttgatttcctcatctggaaaatggggacaccaatagaaccaacaaaaagtgttgagaggactgaatgccagcatgtgcatgaaatgcctcatcggtgcatagtacagcatttgataactcagagctttttcaaaaaggtatgatgatgaaaaccttattcagaagaaagaaaacttcacagaaatcattattacaaagcccagctgaagctctcctgcacatcagaccccttctgggaagtgtttggaaaacatcagtctagtggcccctccccagtcttatgccttccccatccttccctcccatctgtgaaaacagaggaatctctagtggggggtgtctgagttttttgaaaaagagaaagctttcctctggtaagaatcacctgggggcacttgaagacacggcctggcctctctgggaaattctgcttttggtgttggagatgggttcttggaatttacatttttaatcaggtacttcttaacttttcagcagttaaggaagcactggtttaaagtgggtttaaccttctgtggttgagagaggttttggcgccaccctgaccagccaaggctgtctcccctgttatccacaattccttgtggcaacaccacctctatctaggagggaagtgtcacttatggtgtggagcctgctagttgtgtttggagattgcaaagcacagtctttgtcggtctgtgtatgtgttcatgtaagtgtgcacacaccctcacacttctgaaaactacctcgatgatggcaggaaaaaagaactggctaaaattgtagaagttgagagccaacacagtgctcagaggaactttaacgctaaataaaaacaaaggatgaggaggggtcccatggacagacggggggaacgggagactcagttgagagtggaggcccctgactgaaagccagcagtccccacgtggagctctcaccttctggatggctcagcctggcaggctgcttctgtttgagaatcctgggaggctcgcccttccacatgtactttaagcctagagaagtgttgggagctgtcctgccactcgtggggcaaggggaggactgcttagccaaccctggtgagatgtgagctagggagaggctgccgttcttgcccctgccctcccatgtctttctaaggatgattctagaaccttctctctgtctcctccatggagctggctgccaaggggaagctttgcttacccagtccggtgctgctggtggtgccttagtcttctgacatgatctctgtaacagggacttgaaaataacactcggagcagtgccctgttcaaatggtcacagttcacatcctgaggaaccatctattttgggcatgttgaagtttggagcaggtcagtgctggataaacagcatttttctaggactagaccaggaacaccaaatatagtagaaatgtaacaagccctcagaatatgatttatgaaaacaaaacaaaatgtgtaattctgtgaatatactaaaaaccattgaattatactctttaaatgagtgaattatatctcaataaaacttttacaaaaaaaaaattaaatgctgaaaagtagatgatttcctggaaaggtagtttctcattttaagatataattatcagcctgagtgggacctacttttctctctgaccctgtcctgtttagaaataccaacatgcatttcccatcagcaccatagaacctgactcctccccaccccacaaatcactcaactttgcaaaagggtgacatttgacaaatcccaaaacagccaaacaggcgagccatcactattcaggtttgcatttgcaaactgaatccttaactaccacaaatgacagcagcttgcacttgctgaagagctcttctgagccagggcctgcctaagcacattcaatgctcatatgagcctgtcgcccaggctggagtgcaatggcacgatcttggctcactgcaacctccgcctcccgggttcaagtgattctcctgcctcagcctcctgagtagctgggattacaggcgcacaccaccacaccaggctaatttttgtaatttttgtatttttagtagagatggggtgtcacaatgttggtcaggctggtcttgaactcctgaccttgtgacccactcgcctgggattacagacatgagccgaaattagctcataataacaaaaattagcctggtgtggtggtgcgcacctgtaatcccagctactcaggaggctgaggcaggagaatcacttgaacccaggaggcggaggttgcggtgagccgagatcatgccattgcactccagcctgggcgaccagctcatgagccactgtgcccggcccacctggagagcttttaaagccactgctgccttgttcccatccctggagagtctgattttattgctttggggtgcagccagagcacaagctttggttttgttttttttcatagcacaccaggcattctaataagaaccctggctctagagtccatgtttacattaaagaggctatttacttcttgcctggtaccacgcctgtgacttgggtagctgtccctggcagcatggctaaattcctccatctggggttcacagagagaaggggaatgagtttcaggacaatggctgtggctgcaggctcctgcacaatctatctggccctgtctgatccttggcctctgccggccttttcttccccacagctggaaacctaatctcagccccattccagttccaccccacctcacccattctgccccaagcccacagcccaattctcaccctgggtggggggaatcaaggcagccgtagctcaagagtgtgtgccaacagcaagaattcctgattattaatccacccacactgacattgggttcctataagcaggttgtggtctgcactgtgaaactggttagggtaactgcaggcctgcccagctcctccaggcttaggacctcttcaggaacctggctcccttttcacatgtggcccctgcgtttc

SEQ ID NO: 1883211 - DNA, 4001 bp, Homo sapiens
acaggtgtgtgaagaccgcagcggagggccaagctctggggaagccgtggccacggagtgcctggtgcaagcctagagcgggcgcgcgctgccgctgttcacacacaggcttcctcctagtgctcttaaaaagaagagagcttcaccaacatgttcccacgtgtaatgtaccagctctgcccatatgggtgtcatcataggattttattactaatttcaattgtggtgttccacttctgaaaatgctatttggtcaaaagtttagattttaaatactcacagagaaacacaaaattgctccgtgcagcattgtaattatagcaacaaaaaacatggaaaacaatatccatcaatagagttagtttaaaacattatgtcacgaacatgtaatggaataatctgtggcttataaaaaccaaacatggaaagatgtccattatagagtaaatttgaaacctaagttgcaacgcagtatcagtgctgtatgatctcatttgttaaaatatgtaaatgtgttcatctttccttagagaaatatctgcaagaatattcacaaactacctcaagggattgtgggactcttcattttctatttcatatattcctgtatgatttaaaagtttgcaacaagcatgtcctatttatataaacaaaaagcacattcaagcgtgcgtatgtgttgtgtgtgtgtgtgtgcttgtgtgtgtgcgcgtgtgtgtgtgtaattaagtttccaagcttcaggcataatgaaatccaaagtaataaatgatacagagtagtggtaattaatttgttattaattatatctatagaacagacttatattgtgccttttatcacttcataagaaatacatgacactaaaattagaaaattgaggtcatttataggaaaacaatttttcttctgaataaaaagcacctgcaactatctattgttaactccaattactccctctaacaaataagtgaaaacgtagctggtaatgtaaatataatacaaatttaggtgaaaactgcagtctctatggaaatatcctttttccccacacactccctctcttcttaccccactcaccacccactcccccacctaaactcaggctccaatacctgaaaaccatctcttttcactttcttgtttgttcctaaaggatggtggcatcaggttgtaaatcaccacaaagaacactcttagtgatgtcccaaaatttattgttcccagcttttccaagattacttatgagaatgctcactgtgaaagaaaaacatagcccggcaagtacatttccaagcatttagacctggttcttgctgcaaaatgtagtgagcaaggaaaacaactttaagaccaataaaaattaaaataaaataaaactctcattacgtctcttataaaagacatgagaaatgacttaaaaattctaactggttactctatgtttagaaaggaccaaattacaaaggttagtctattttttgttaaagtgcacttgtagcaacctctccatagatgataaatttaaatgaacatttctctgctgccatctcgtggattatttaggtaatgtactcaaaggcaaaggcaaatcccactaaaattttaccggatgtgaaaagtcatattgattacttagtcatttatttgacagaacacaacataacttaatgtatatagcatgctacatataacatattaaacctcatcctaagaacaaggtttaagatcctttcacttttaaatgctgttaaccttgatagagaaaacaaaatgcttttgccattgcataagcaataattactacaaaagacattatatctctatgtaataatcactaaaagtatcgagatcacaccattgcactccagcctgggagatgagcgaaactccgtctcaaaaaaaaaaaaaaaagataggaaacagggcactgctttacctttggttgtaatttagatggttctgtgggaagagaagggtgttcacaatgcacaatacacaatggtggcattatctcgacttcacagatgctctcctctgcaaaggctgggaccagagaaggatgggaaaggggccatccctggtcagattctgaacatggtcccagtagcaaatgctactgtgatgagaggggatatgtttaataagtggctgtcacacccactatcaagcagtgttaatgattcatgcagcactttccaaaccgttcctggatcttcaggtactccttggagtaaccaagttttagagtcagcaataaacccagaaaggaataaagggggggaaaagtagaaatccttgtcagtcataatgcatgcattagagaatcaaggaaaaaaactggaaaaaaattttgtctacctatcccctcaattatttccgtaataaatcagaaatgtataaaaattttccatttgggaagaattttcaattctatatgagaaattttaaatctttttgagacacttcaagtttgttcttcagaagcccatgaacaagatctaagacttgtatttctttttttatatatactttaagttctagggtacatctgcacaacgtgcaggtttgttacaacatgtgccatgttggtgtgctgcacccattaactcgtcatttacattaggtatatctcctaatgctatccctcccccatccccccaccccacaacaggcccccatgtgtgatgttccccttcctgtgtccatgtgttctcattgttcaattcccacctatgagtgagaacatgaggtgtgtggttttctgtccttgcgatagtttgctgagaatgatggtttccagcttcatccatgtccctacaaaggacatgaactcatcactttttatggctgcacagtattccatggtgtatatgcgccacattttcctaatccagtctatcattgttggatatttgggttggttccaagtctttgctattgtgaatagtgccgcaataaacatacgtgtgcatgtgtctttatagcagcatgatttataatcctttgggtatatacccagtaatgggatggctgggtcaaatggtatctctagttctagatccctgaggaatcgccacactgtctcccacaatggttgatctagtttacagtcccaccaacagtgtaaaagtgttcctatttctccacatcctctccagcacctgttggttcctgactttttaatgattgcaattctaactggtgtgagatggtatctcattgtggttttgatttgcatttctctgacggccagtgatgatgagcattttttgatgtgtctgttgactgcataaatgtcttcttttgagaagtgtctgttcatattcttcgcccactttttgatggggttttttcttgtaaatttgtttgagttctttgtagattctggatattagccctttgtcaaatgagtagattgcaaaaattttctcccattctgtaggttgcctgttcactctgacggtagtttattttgctgtgcagaagctctttagtttaattagatcccatttgtcaattttggcttttgttgccattgtttttggtgttttagacatgaagtccttgcccatgcctatgtcctaaatggtattgcctaggttttcttctagggtttttatggttttaggtctagcatttaagtctttgatccatcttgaattaatttttgtataaggtgtaaggaagggatccagtttcagctttctacatatggctagccagttttcccagcaccatttattaaatagggaatcctttccccatttcttgtttttgtcaggtttgtcaaagatcagatagttgtagatgtgtggtattatttctgatggctctgttctgttccattggtctatatctatgttttggtaccagtaccatgctgttttggttactgtagtcttgtagtatagtttgaagtcaggtagcatgaagcctccagctttgttcttttggcttaggattgtcttggcaatgtgggctcttttttggttccatat

SEQ ID NO: 1883212 - DNA, 4001 bp, Homo sapiens
cccccgctccagcccaaatggcccgggcagtgccctcactcgtctgcttcagcagcctcacccgactactcacgatggctgcaggtggaaactgcccacgcatctctcagcagctgaaaggatgactccacagtggacgattactcaggtgtaaaaaggagcaaagcactggcacatgcgataatgcggagggacctgaagccaccgtgctaagtgaaagaagccagacacgaaaggccacatggtgctcacacctccagagatgtccagaacaggcaaagccagagacagagcacagacgtgctagccagggctggcttccttggaggctcccaaggagaatctgtttccctgcctttccagcccctgggggcccccctggactccatggctatggcggcgggtgccaaggccctgcagcagggcacgaccaccaggacccattgggaattggcatctgactcccttccaccaccccgggtgcccccacttaggaagagccgactctcagcaactgtgcccagagtggcctggcccatcaaccatgtgccccctcagccttcctgcagccattcagagacagcagtaaacactcctccatcccagtgtgtgggcccaaagctgagatcccagcccaggtctcccagctcacagccctgcccagggccatcctcctgctagacgtcaccacatcaatgagcatctaccccgtgcaaggaagaggccggcgatggggtccaggtgaggggacagccaagcccaccaggcggtggccttccctcacctgcccattctgggctaggtcagctctacctggagcctgagcccaggcccctccagtgccctctgctgactgcagcagactgaccaccctggagaccctcctgcccctgccccgagaccctccatgccaccctgcctccaacctctgtcttctgcccccattgccccttcatggtcctgcaggccgcccatgctctgtaaatccagcccacctgggcaccccgtgagacctcggacccgtcacatcctggtccctcctcttcccccacccccacatccgactggcactccctttgggcagctccatccggtggtgtcctctctgagtcccagggcctgcatcgggtggtgtcctctctgagtcccagggcctggcactcagcaggccctggggacatcaaccaggggcccttgaagctgtgtccctggacacagtttccctgccccaagccctggcacattcggcccaggcttggcaaaaactccttgtcctccaaggactcggctgcaccagccactcaaataaattgatgttcccatctctgctgactcatggatgagaacatcggggctcctgccaatggccacacacacccccagccccaccagggaatagccctgcaccctgcagggacaatgtcatgagcctgagaagccaccagcttcccctactccgtgagcaccaaactccagcctgcttgagctgttgggggccccctgccttggcactgttcctaatagagcctgggatcttgtttgagccctacaaggaagcaaggaccccaggcatcatcttacaaacaaggaaactgaggcttggggaggggaggagcttgtgggtccaagttccctgccggctgtaacactgtaggagtcagaacctggccaatgcctggagggggcttccttggccagggctgagcctcaggctgcccccaccccatctctcccccactcccattgcatatggaaaccagaaaatcaatcctaagacccccagccaaacgaacggaccctcgtcttggctaaggacattccaaagtgaacctgaaaagcgagttcaggccacggtgggaagcgggagacggacataccttgttatcccccctcccttttggaatgactggcagaacagtctttcagtctgataataaacatctcccatccattctctctgcagtctgctgcctggaggcttcatctgcatgatgaaacctcggtctgcacaacccattatcttaacccagacattcctatctaccgacaataactctttcaaccaacggccaatcagaaaatcttcgaatccacctatgacctggaagcatccccgcttccggtggttccgcctttctaggcgtaaccaatgtacagcttatgtgtattgattgatgccttgtgtccccctaaaatgtatgaaacctagctgtggcccgaccaccttgaacacatggtctgagggtctcctggggctgtcatgggcccccggccattcatctttggctcagaataaatgtctcaaacactttacggagtttgactttttgttgatatatacgtccagggaggcctcactgcagacttactgggccgcaggggcctcaaggaccaatatggcccctcctcttggaacagacggccccaagccaagaggacttggggaccctgtggcccaaacgggtcatttcacagaatgggagacggaggcccacacggggaatggaggagagcgaggtggagcaaggcccttcccagccctgggcggccccttgacccttttgttccccctcgctgccaggcctgtgactgggtgggcctgggtctgcagccctacggggactggagggacagctgagtgagcagaaggtgccttgtggccaaggcacagaggcgtcagggcccagctgtgttcagcaggaagaaggtctgtgagtggaatatgggggtgcagcggggtggggggcggccagcctgcagctcagatgctgcgctggggctccggccgtgaccacgctcagcctctgtgtcctccccggtaaagtgggaggaatcgccttccacacaggactcggggctgggtgagggctgggcggccaccaccacctgccctggggcagcaggagctgcaaagccaggctcaaggcctgggggaaggaacccggcgctgggtgcccagagtccagatgagatgggtttggggggaaggaacccggtgctgggcgcccagggcccacatgagttgggtgtcggaggaaggcaaccccacccaggccaccccagccagggctcagggactttgcccacatgttaccctctggatctttcggaacattctgctgaataaaaactggatttaaaaaagaggccaggcacggtggctcatgcttgtaatcctagcactttgggaggccaaggtgggcagatcacttgaggtcaggagttcaagaccagcctgaccaacatggtgaaaacatgtctttactaaaaatacaaaaattagccaggtgtggtggcacatgcgtgtaattccagctacttgggaggctgaggcaggagaatcacttgaaatctggaggcagaggttgcagtgagctgagattgcgccactgcactccagcttgggcaacagagtgagactccatctcaaaaaataatgaaaaataaaaaaggtatattctatgaaactctatttggggtgtgatctcgtttttaacaagtatttaagaagtaggctggtgcaaggtgtttctaaatgcttcacagtgttatctctagcaaacatttcatctgacggtcttttgaatgaggagctcctgaacgttcggcagaggaggtggaacagaagagagagggcaggcaggggcgtctcccttcttatcaaggtatgactaagggcacaaccttatttccaaacagaacagtggacaaaccgggaaagggagagtctggagagatgaagcgatactattagtgcggctgacatgtcaatcacggggctggcaccgttcacagctctgaggctgctggatctttcctgcctctcacctctgctctgctcaggcaagcctagccaggcagggactggagttgggggctgttttccagttcacagaggaagtcacaaggccctaggacactcagggccttgggaaagccagccaaggaccagaacagatgtttcggcctgacagcacctactcttgggttaagcatcaccc

SEQ ID NO: 1883213 - DNA, 4001 bp, Homo sapiens
aagtccactgtacatcccttgacatccccacccagctgaccctgcgccaccatcttctagggaatttccagtatccaggaatacaagattcttgtgcttaatatgttggcatcattgctgcattcaacgctcaaccaatatggctaagcaacttggaaataatccatcctcttaatagctgatataatttttgtactttatttactacaaacattgaatttttccttcaggcctcatagagaacagcactgacaacttccagaaacatatttgaaatgcctgacatagtgtacacagctgatgagaaatgttccgagtgtgctgtgacaaaaacgaggaaaagtcgacaggaaatcactaatccaaaatgaaagctctccaaagctccctgccacacatcccgcttctgattgagggacccgtggtctgcacacctgcgtgggccactaatcctccaagggaccgcaggcctctgtgtccatgtcagttacacaggagtcaaaaatagactgttctctactccccaaactatgtaaggagggaaaaatgagatggaactgtaagaaaaacttgggtaaaagtcaaaatagtttaaataaatttaattttaattcctcactgtcgaaaccgacttaaatacattgaatttgttgtttttattctggcattgtttaccaggttataaagatgagatggctcccacagtcaaacgtctgtcttcaactccatgaaaagatttagagctgcgattttattgcccttatccgatccttaccgaatttccgtggctctggacttcctcctacacgacagaagataaccgggccactgaagagaaactcattttacttgtgggccgcgtgtagtaaaatctgtgaccaccagggggaagcacagacctggtgctgctgtagacctggtcgctgggtgttcgcggcgggatttctccagccacagggtcctcccttccctcccggaaaacctctctgcgctgcaggaatctgaaagtgctcaggggctgcgggctctggctctggtctgctgatggcagaccttgccctgaggatgccctcctcctgcccagtgctgggcaagggactccgccctgggagctgagtcaaagccggactgggctgcctttggtgctcaaggtggtccctgaacaccggcctggggacagagaccagacccaggattcacaggccacgcaaggcatctgaacctgaactcacagtctccaggcccggggatctttctgaagactcggggcaggaaccaggcagcccagggcaggggcatcaaagcctctggtcaggagggaagaggaagcccatcggccttgggaagattctaaaagcaaaccaggctccatattgaccttccgctgcactcgcagagcgttttctccttctaattcactgttagcgcgtaagcctggaccagcacctcacaccacagacgaacgaaggcactgcaagacgccagcgacccaagcagaaagcgctgagggaaggggcagccccgcagggtggtctccctggctccctgtttgttgtgaaacacacgcagctccccgacagcaggcaacgctcgtggtaaacacaaaaccccagccgggaaccaagacaccatcagaaccaggcgacaagatcctgtcacaaggaaaacagaagctcagcctgggttgcgttggtggggtgttggggctgatgcttccacagccctctcttaacttacctggtaactggcccaactcgtcctgtcacccaaaacggggtagatagggatccaaggaagcatggcagagacacgcgcagggtgacagggctgaggtggctctgcacccagctccccctgcagttcccacacacgggcttcccattcatcccggtgattgatgctcctggaagcgcctggaaactctgcctgtgagctaattattatggggaatgacctgcgtcctggtcaggagtgagtagggagatcattaggtgagagctggctattcacaagagggcagcctttgatgcgagccgagcagaaagtttggccgaaactcaacacctcttagaagtacagattagtggagaggaagaaaggagaacgcattgtggaagttttcaagaaggagacaaagatgcctgtgttttgtatagctcagctgcctcaggaaaatgtccatttgttttctttacactccttttacattttaagtggaatctagtgaatgtgtcttttcagcgttcccaatttcaccattttcactacacctcgtgttgccattttaatgaagcatcatttttccagagggtgtgggaacaaaacctatttaatgacctctctgagcaaacactgagttcttcaaatatttccctgaattaaaatccccacctcacaattcacttccttttttaaatgtcagtttgccaactgctgcaaaccaataaacagggctttcctttacccgcaagccagagggctcctgtggagccttatggcccgggggtgcctgagaaacccctgctctccgtgtctggctgctgccctcggagagctcagtggaggcagcaatccccctggaagcacaatatgtgccttgcatctctgcagcacacgtgtttaggggactcagccaaaacctgggaggacctgggagattctctggtccagcccctcactctacagacagggaaactgaggccagcaaggcgaggcatgcaccagccacacagggcatcaccggtagaacaggaaggccataaagaataagcagggttggggccaggtgcggtggctcacacctgtaatcccagcactttgggaggctgagatgggcggatcatgaggtcaggagatcaagaccatcctggctaacacggtgaaaccccgtctctactaaaaatacaaaaaaaattagccgggcacggtggcgggtgcctgtaatccctactcgggaggctgaggcaggagaatggcatgaacccgggaggtggagcttgcagtgagccgagatcgcaccactgcactccagcctgggtgacagagcaagactctgtatcaaaaaaaaaaaaaaaaaagaataagcagggttggccccatgtggcctcagcatcacttagggcagttgtgcaaaatgcatattatacccttcccaaatctaccgaattggagcttctggagtgggaactgggaatgtacatttcaactacattccacatagtgataaacattaacttttgggaagaactactagtagtagaaagaataggtttgggccaggtgcggtgcctcatgcctgtaatcccagcaccgtttaggcagaggcccaagcaggcaggtcaacagaggccaggcattggagaccagcctggccaacatgtgaaaccccgtctctactaaaaatacaatcattagctgggcatggtggcgcgtgcctgtaatcccagctactcaggaggctgaggtacgagaatctctagaacctaggaggcagagcttgcagtgagcctagactgaggcactgcactccagcctgggcgacagagtaagactccatctgaaaaaaaaaaaaaaagaaaaaaaaaataggtttgaatcccacctctgctgcctaccaactcacctactttggcaaggtaatgtctctgagctccatttcctcatcggtcactggggagattgctgtggagacatcgtgagatggtgcatgtaggcccactcaggtcctggggcctggcacaaggaagcactctctcagtgtcacctgtcctctagaggcaagcacaacacacaatttctggagtcccagagcccccacttatagactgtatgagcttgggcacattatttgtctctttcaagcctcagcttccttatccgtaaatggagataatattacctcctcccaggaatgctgtgaaggtaaaaagtaatatcaagttgtagcggcacagtctagtcatgaaacgaaaccactgtaggtctttcaacagacagatttc

SEQ ID NO: 1883214 - DNA, 4001 bp, Homo sapiens
tataggttttggcactaaaagtcctacatcccaagagaacttcttagtttgttttcttagctccagacaaattcacaggcggagtgaagaattgagaattgtctttcatacaccagtaccttagcagacttgcagagcttacggctgcatggaacacagctttctgcaactacaaatgtttcatgcatagcttctcaaaatggcaaaatttaacacctttgtttacatggcccaaagatataacttatttgtagcatgtaaaaaataggaggcaaattcatgtagcttaaaattgtacataatagtcaatgatgtttcatcatttcatcttcttaggaagattgccgtataatctattaattagcttggtatcagtcaaaggttctgaattatctgaatatcttggaaattaatttcaagtggacttactgcaaaatatagtttctgctgaaattttttaaaatgtcagaatattcaatttagttaaaaatgaatttgcatttttcataactttgaatattaaatatgaatgttaacttatttggctattcaacttgaatacatttatggaaacatccccaaattgaataaaaatgtacatttgtattgtacttaacattgataaatcagagtagacatggctatttttattaaactaaaattattaaattagccttgtttgtcaaagttttacctaatttctgtaaacaaagactcatatttctgaattagtttttataagaattgtaaactacatgtaaaacacattaaaagtgttaaacattaaattttattttattcctgtgaattttaggattattcaatttctataaggatttattattttccataagtcaatccagtagttttaatttaagagcctttggaatctaagttattaataatactgtggaggaattaaaaatgttccacaaccggacaacaaagggcaaatgcctttctgaataacagacacttagaaaaataaacacacaaagagattatagctttaattccataatttccatcatgggtcacgacttagtacaaaaccataaaaatgtcattggttcttgtatcaaaaaactattgtccttcccaaggggcataggattcttaactgagttgagcttaaatggagaaacaaacaaaaaacactagctgagcagagatatttcattacctctcatccaacagaacgttgctatctctaaattattaatccatttaacaaatattcagaggataaaattggaaaattagatttttttttttttttttaatttgagacagggttgcccaggctgaactgcagtggcgctatctcagctcactgcaacctctgcctcctgggttcaagagattctcctaattcagcctcctgagtagctggaactacaggcatgcgccactacacctggctaatttttgtatttttattagagacagagtttcgccatgttgtccagtccggtctggaactcctgacctcaaatgatctgcccgccttggcttcccaaggtgctgggattacaggcgtcagccatgttaaaatcagatttcaatcattgctgccaccaatggggaatagcttaacaaatgtaagttaataaaccaaaaccaaaatatattataggaaagaaaactgaaattagaaaaaagtagattatatttccatgtggggcttaccactgagagccaagaaattgtgtccggaattggtgggttcttggtctcactgacttcaagaatgaagccgtggaccctcgcggtgagtgttacagctcttaaggtggcgtgtctggagtctgcccttctgatgttcagatgtgttcggagtttcttccttctggtgggttcgtggtctcgctggctcgggagtgaagctgcagatcttcgcggtgagtgttacagctcataaaagcagcgtggacccaaagagtgagcagtagcaagatttattgcaaagagcgaaagaacaaagcttccacgatgtggaaggggacccgagcgggttgccaatgctggcccaggcagcctgcttttattctcttatctggcctcacccacatcctgctgattggtagagcggcgtggtctgttttgtcagggcgccgattggtgccctttacaatccctgagctacatacaaaggttctccacctccccatcagattagttagatacagagtttccacacacaggttctccaaggccccaccagagcagctagatacagagtgtcgattggtgcactcacaaaccttgagctaagcacagggtgctgattggtgtatttacaattcctgagctagatataaagactctccacgtccccaccagactcaggagaccagctggcttcacctagtggatcccacaccggggctgcaggtggagctgcctgccagtcctgcgccatgcgctcgcattcctcagtccttgggtggtcgatgggactgggcgccgtggagcagggggtggcgctcgtcggggaggctcgggccgcacaggagcccatggagtgggtgggtgggaggctcaggcatggcgggctgcaggtcccgagccctgccccgtgggaaggcagccaaggcccggcgagaaatcgagcgcagcgccggtgggccagcactgctgggggactcagtacaccctccgcagccactggcccgggtgctaagtcccccactgcccggggccagcagggctggctggctggctgctccgagtgcggggcccaccaagcccacgcccacccagaactccagctggcccgcaagtgccgcacacagccccggttcccgctcgtgtctctccctccacacctccctgcaagctgagggagtgggctccggccttggccagcccagaaagggctcccacagtgcagtgggggactgaagggctcctcaaatgccaccaaagtgggagcccaggcaggggaggtgccgcgagcaagcgagggctctgaggactgccagcacgctgtcacctctcaaaatgacacaactaggcttaaaagctcaaataaacagcactgctctggaaaaaaagtccaccatctctctcaggtgaattcattgggcatcttgttggaagacctccaaacaggtaaaagtcataaaattatataaaattattatatgatactttcttacagcttttctaatgagtaaaagtttttatgagtaaaattgtgactcacgtggataaaaaaacctgtggaatatttaattaacttcttattaatgaggaaatgaggtagatgttataaacaaagccagaacatcttattagttcaaatttattgatataaaaatatattgtaaaacatgccatcatgctattttatagttaaggaaacttacaaactagtgcttttccatttttagaatgaaattttaatttagttttatgttttagtcccagagagatatttgggctttcttaaattttgaatatctttgtattttggcagttttatacatgtcccatattctttgatcatcactgattttaatattcatgctagtgatcaatttaaaattgactttaaagttatcagcttccttaatttagagaatatttatctactttccacttaagacaaattgtcaatatgaccaaaatttgaacctgaccattaggcgaaaatactgtattaccaagatttcaaattttagttttttaactgataccatggttttgctactgtatatgttgatcaagattgataaaatgaattctggttcatgcttgcaactttaccatggttacctaggacatgccacatatgaatctcaaatactccttttcctgtgtggactgaaatcaaacctaaatattgacttttttctcttagtaccatattactaatgttggccttctcagtgttaccacactaatggtcagaagagtcacagaaaactacaaggaaagacatcaaggagaagagaatactttttatttttaaataatatcaacatgtaacttgactc

SEQ ID NO: 1883215 - DNA, 4001 bp, Homo sapiens
ttccatatctgagttttccaactttttatcattatacatttcttttttttctttaagttctgggatacatgtgcagaatgtgcaggtttgttacataggtatacatgtgtcatggtggtttgctgcacccatcagcccgtcatctaggttttaagcccagcatgcattaggtatttgtcctaacgttctccttccccttggcccccaccccgccgagaggccctggtgtgtgatgtaaacatatggaacgcttcacgaatgtgcgtgccatccttgcgcaggagccatgctaatcttctctgtgttgttccggttttaggatatgtgctggcgaagtgagcactatacattactttttaatagaagtttttgaaaggtccaaaggatttggggaaaccttgaaaaccatgagagttaccatattcctcaattttcacattaattacgtctgctccatttatttgtgctatttggtcatctttttcagcatgttttagaatctgtaagttttttgtaattcaatgttttgtgccacaagataacattttgatacaatatttgtaatttttgcattggcatatgtcagtttgtgtatctactgtattcgtccagagacctattatgaggtgcaacgggtttttgttggtgttttttcctttttgttattgtgaacaacacaggaagagaaaaatgggttggctgaaaatggatttggggtgaaaaggcagggggaaaatgtgaagaattttgaaaaaaacatacaaaagtgcttagaggtaaaatagattataaaaccagcccttgttgtattaaaactaatgcacgagctgggcgcggtggctcacgcctgtaatcccagcactttgggaggccgaggtgggtagattacctgcagtcaggagttcgagaccagcctggccaatatggtgaaactccatctctactaaaaatacaaaaattagccaggcatggtggcatttgcatgtagtcccagctagtcgggagggtgaggcaggagaatcgcttgaacccaggaggtggaggttgcagtgagctgagattgcaccactgcactccagcctgggtgacagagtgagactctgtctcaaaaataataataaaactaatgcatgagactagatggtgatgattgagagtccttgttgaccaaattgtttgttttcttctccagaagtcccagagcatagctatgtggttggagagcctaatcaaaactactgtcccaaaggctgtagtcccagccctttcagaggccaagtcaggaaaattgcttgagcccagaagttcaaaattgcagtgagctatgattgcaccactgcacttcagcctgggcaacagagcaagaccctgactcttaaaaaaaagaagtctgttcatcaaaaggtgccataagtgctttttgcctagtgccagcgggctgcacctcagtaggctataggagtaacttgttcctgccccttcccctcccaaacaacctttctttcctagggtgacagtaggggggcctctggtttgccagaaaaagaacaaaagcacatggtaccagctgggtattatcagctggggtgtgggctgtggccagaagaacatgcctggagtgtacaccgagttgtccaattatctgctttggatcgagaggaagactgtgctggcagggaagccgtataagtatgagccagactctgtgtacgctttgcttctctcaccctgggccatcctgttactgtattttgtgatgcttctattatcctggtgattaaacaccacgttgtctcaaaagccaagcgtccttctcagtttgtgcactaaggtagagagcaactccacgttgcaatgagtggctctcagatgatgagttgtgcctgaactaatcatagaactatagtactacttaaaagatagctaagactcacatcacagcctatgggtcacctggaacttggaagtagcttgccacttttagcctgagtcctctccaagagtttggagggagtgcctttccaccagggggagcatgccagggacctgggaagcaggaagctcgctctttcctccttgcaaacaggcatccttccacagcagcttttatcctacaaaagggcagacagttcacgagataggaaacatgttgaactccctcccccttcattggtagttcatcccggacacctgcagatttggtttccagaaagatccttgtccttcaccctgcttgctccctcagccaccacctggtcctgagtccccagtaaaagttgcttttggctctcagagatgagcaacaacgctaagattcaggatgagaagtcattgaagcagaaatgtcctagtgttggggtgggaaaaaaacacacagctaatgagatgtagcagtcaacgtacctttgctcgcacgcatcaggagctccaatcgaagctgaaaaggatgtcggtggtgcagactcaaaagaagagcagagaccctgggagctgccccagtaaacagcagtctgacagtctgatggacaccaagggcaccattcgggccatctggatgagagggtggactgtccattcttcatgcaatcatcgttgagcagaattttttcaatcaggcatgatacacaaaacagcattctttactgaggcaacttggcatgtttttaaagagagagaatgaaaaaactgcagaatatttttttaaaatgagagcattttatatgagtttacctgaagtggcattcgatgagctgtgaacaacaacaacaacaacaacaacaacaacaacaaaggaaaagcatcaacctttgtgcatatacatttgagaagaaagaaaaaatgatgtaaagacagttcctttagcctgcccttcattagctttctcagaacaggatagcttgtccaccatctgagtctagaaagcatttaggtgaggaagcacctaaacgctttagcaggaagaatcagtatatacctgcagtctgtttttatctaaagctgtagtggccataagaattttggcaactgggaagcaaagaatggtggctacacacagatggggtagtgtccccaagaaagctgggtttaaaaaagatttcctcttgtctatgaagtaagagcagtgacaattccctgggcttaaagttcagaaggctgaggctaggagaggttgcagtcttgtgccttcacctcaggccagtaggcagatagagaagctgaaatgagcagaccactccaccaagctcctgtgagagggtgtgtgtgtacatgtatgtgtatgtgtgtgcatgtacatgtgtatgtgtgcagatgtagtatgtgcatgtacatgtgtgcacatgcactgtttgcatgtatgtgtgcacctgtgtgtgtactgtgtggttgggtgtgtacttgtgtgtgcgtgtatgtgtgtgtgtacgtgtgtgtgatgtgtgtttagtgggggtgcttctctgcctccatcacaaagtagttgtcagactttcagatttttgctaattctataagaaagaaatgataactcaaagtcggttttttaaaaaattgaaatttgcgcaaagagaaatactctgatcttaagtatacaatgtgaggagttcttaaaaatggttttaatttttattaaacccattttatcaattatttcatcgttagtacatgctgaatcctaaaaaattttcacctattccaatattgagaagatattgtattattttcttttaaaagctttatcattttagctctaacatttaggtccatcatctatcttgaaattacttctgtgtatggtgtgatatgggtcaggattcatttgtttcatatacacagccaattgaattgaaaaggccttactttttccattggattgccttggcatcttggtctaaataagttggtctgaattagtataagtacaggtctatttctggagttatgtcatttttttgctgacctgggtattctaggactgggtatctggtttggtttttatttga

SEQ ID NO: 1883216 - DNA, 4001 bp, Homo sapiens
caaccttggcttcccgggttcaagtgattctcatgcctcagcctcccgagtacctgggattacaggggtgcatcaccatgcccagccaatttttttttttttttaagtagagatggggtttcaccatgttggccaggctggtcttgaactcctggcctcaggtcatccacctgcctcggcctcccaaagtgctggcattacaggcatgagccactgcacctggtcttgtgtggcaaatttaataattggaatgtgagtcatcttatatttggacacttttgccttaaagatttagctttaaggttacatttggaagatttcacgtttggatttgtcaccaaactccagaaattttgctcttaattatccattatggggaacaatagactctacccctttccgtgtttctgtttgattgttctgcataacaaacttacgatgaaatgattttaaaatataaggtctactacacatacagagccagggaatttggccctgtagtttgtttacctccttgtctgtatagattctttcaataaatcaggcatttgtttgaaagctccagtgtcaacagcactgttctaagtattttagagcgttagggagaacagagatatgctctctctcttagagcaaatttttgaacaataaactttataaagcaagaatatacttaaatagacgctttttgcttactggagaacccactaactaccaaatttacggttcgtaacttcatatgcactagagaaccccatgagaattcaggcttcccaaagtttaaaaagcttcttactcacttatgattttgctttcttttgtttttttttatcagtcacaacaagcctcagacttttactaatggatattgctattttctaacaaggagggaatcgcttctcattaccacagttgcaatttgtatttatgaggacataatgacaagaaccatctaaatatgtctagtaatctgacgagcccaaacccgaagattcttaagaaaatgcttactttaattctaacataaaagttagaaacacgtcttttctgaattatttgaatgcctgctaaaagaatcaatggattaaaaaaaatcatttgctgctttctttgattaatacagttaaaataatcagtgattaaaaaaaaaccatgctgtaattgagcttctatttgaaagttttggagaattgttaactctcagatatcacacagtgggatatgctttagtttatggggaagttatatccaagagtgatcgttacttatttctgatttctaaacaacaatgtttgctactatttttttgaattatgatgcaataattgacttatgaaatacatttttatcaacctttgtataatatcaaggctgttaacattctgaaaaagaaaatgatattaacagtaatgatgcttcttaatttcctccttgtgtccaaagaagttgctaacaggacatcctcctgagaaggaaggaaggacttctcattctgactcaattattattcgcttctttctctaagcaatccggagtcagctttgaaaggggagaattcctctctggccacagccctgtggagctgggatgttagcctgttaaattcatagctcatttgtccgtacctttccccaccttccagctgcaggaattcaatctccaggcctggcaataactcggaggaactagttccagggcagaagaatctcagctggcactaaaagaagttacgtggctcccaaccacatggcggcagtcttcgtggtcacaaagagaatggggctgtcctcttttcctccactcttttctaggactgcttttctctttcaggattgcctcaggtgatgatttaaatccaatttatttcactagtatgtgtctgtcttggggagaggagttggttcaccaggacttgaggcagaatctgttaatccttccttgcccctgactcatcccctccaatcttcaggggaagctctgctggttgccattggcaaaagaacttgcttgcatcacaattagtactctatagccaagtctttgccaatagggttaaggcaacaaaaaagtgaactccagaaacatcaaggagagtactagtgggttttttgacaaatgggatataactagcttagtgaccttgtcccacctcatttattttatgttctctattattagaacaattgtccttcgtaagtggttttccctacctgttttccaaaaactatcagtggatcatatttgctatgacattaaatgtaactgtgacttggcttttaaagcctttcaaaatccagctccaccatgcctttctgaattcactccctaaagctccataatcctgagtaaattctcatttcaattggaatcatttccataaatattcattgagcacctagttaatcccagacactgtgctatgtactaggaataaataagataaagtccctgccctataggagttcaggacatatcaggagaattaacacgaatgtagctataatataatcataataataacaatcattaactttattgagcccattcgtatagtccaggcaccgttctaagcatttcatatcaatgtctttaatcctcacaacaaacctatgaggtggtatcatcagtatcctcattttatagctgaacctcagagaggttgttttccaagatcacacagttaataaatgagtaactgaatccagacaatctggctacagaacctacttccttaactactattattatatagatattgtgaagagagctgtactggaaatggaacaaaggctacaggaacagaaaggatgcaattcattcagcttggggatatgggaaatggtgtcacagagacaatcttgctctattccttatttatgtatacccctacctcctggaaaggaatcaggacagctcacactgggaaaggtatgcattaaagtaatgataaaatttagaaataaggagtcagaaccagggacaatgtaaatattgtaagaaaatcaaggccagaggaaaagtaaatttcttcttaaaggcatagcttagttggccaggcgcggtggcttatgtctgtaatcccagcattttgggaggctgaagtgggtggatcataaggtcaggagttcaagatcagcttggacaagatggtgaaatccccctctctactaaaaatacaaaaattacctgggtgtagtggcgggcgcctgtaatcccagctactcgggaggctgaggcagagaactgcatgaacccaggaggcagaggttgcagggagttgagatcacgccattgcactccagcctgggcaaaaaaaaagaatagcttagttacaccatgctttagcatctaattttgctatgaagtttctggtagtcaaagagaaaagcaagtcaagctcaattgcatgtttactgtcataaaggaaaaagcaagccagtttatcacaggagaaaacaagccttccttagaagtatgttctaaaataaaattttcaagagggattactgagaactgtagtagaaaccatgtcccctacgatgctcctgtaacaaaataatagaaaaatttatatggcagtttcttaaaacatttgttgataaaagccaaggatatagcattaatgtaatttagcaaagatgattccattaaggatactactgtctgaattcagaattttctggtggtaggatttggagctaagtttagaaaaatgaggatttttctaggtttagaagcagggtgaagtcatgcaaggaggaaaaacaatatgatgtccagtttagtgtgatttccctggtacctatgtgtgtggagggaggaatggagagaaagtcggtcggtgaacaaacctttattgagtgcctcctctgtgtcaggtcctgtgcaagcttctggtatatgagaatgactaggacaaagtccctaccctcaaagagattacattctagtgtgtaggtctagtgaaggggtggaaactagaataataaagttgggaacaa

SEQ ID NO: 1883217 - DNA, 4001 bp, Homo sapiens
tgcatggcatttttatttaccatttatgaaactgcgggttcagatgtgtgtgattttgtttttttgttttttgtttttatttttgagacagagtctcttgtcactcaggctggagtgcaatggcatgatctcggctcactgcaacctctgcctcccaggttcaagccatcctcctgcctcagcctccaaagtaactgggattacaggtacccaccaccatgcctggctaagttttgtatttttagtagagatggggttttgccacgttggccaggctggtctccaactcctgacctcaggtgatccgcctgcctcagcctcccaaagtgctgggattacaggtgtgagccactgcgcctggccccagtgttcttaattaatctcttttatttctctttccctctttctttcttcttctaaggtagaggacctttggagatgtgaatgaaaacagctgtctgaacaagtggtaccctaactagcgcggctgtgagtctgaagcttgaaatggggaagttggtcagcatgggtgagctatgcagcccaggtgaagggatcctcaagcagcagcctctgcctttttgtcttctccttttcacggagatgacaagaatcaccccaggacttatcttctgaggtgctcagctgtggtcccagtgctgctttggtcactgctatggcgggtggaagcaggatgggtgaagtcattctggagaacaaggtaaattatagccaaattatatatttgcatatgccatgacccagcatcccaatatatgccagagaaactcttgcacagattcatgtggaaataaacatagtaaagatgtcctacatatctttctgggtcccagggagttggagggaacttaggtacccatcatttggggaatagagaaaatgtggtgggagcttatgctggaataccatgcagcagctgaagtaatgaatgaacacaaatctttagcaagactgttgaatgaacatgtaagaaataggacagtatttatagcatggtgtcattttaataatgttaacagaagcatacacatacacacaatattgtatttttacgtttccaggcacaaatttcttatacatgacattgggtggagagagaggaaggagacatgccatggggatcaaggttagagggaaaaaattcaaataaaattaaagaatagagggggtttaaaatgcccagttatgataattaacatgccatgaactgaagaaacaactcagttttgcactaaattcctatctatggaaatggaaattctctttgtctctttctcatctatctacatatctataacataccatagtttctgtgataaaaagtatcacagaaatgcataaatgcatatgaaatctcactgtcaataatcaaccatcaaatactctttaaacctatactatggatgtagtcctgcgctaggtctgatggaacatgcaagagcatagggtattgtccttgttaccatgcagattggaacttacatatgaaacaagagcatgcaatttaaaatagcatataatgaatgcccaaactgtgtaagacatacacaaagaggtgcatgagaattaaaaacaaagatggctggtgaggacaggagtggtcagagaaaactcactggagaaagaagctctgcactgggcggtgaaggatggtggtactggcttggcagagggaaggggaacggaagccgcatagagacataaatcgtgaagctaccaaggggaccacgagtgcagtagccagaccccagcagaaggggacggcttgaggtgtgggtgaagcagggtgcagtgcatacttaccctgtcgtctgcgcagcattcagcttctgggaaccatgtgtggctgcctctggctcctttatctccagggcttctcggaagccatttgtacagacgttttcaggcctctcctgcccactgctcagggtgtgggtgctgagggtgggatttgggatttggccaggaggaagcatctgccaccaccggcatcccttttgctttctttttcctcttatgagtactcagggctgcctcctagctttgcctaattgctctatccacggaccaatgagagcgggtgacgttttaaagtgacaatcctacattgatagtattttctagaaaattctccacacacccgtggactaatcttccagagatcatttaatttaatttatttatttagagacagggtcttgttctgtcgcccaggctggagtgcagtggtgtgatctctgcttactgcagcatcaaattctcgggcccaagcgattctcccacctcagtcccccaagtcgctgggaccacaggcctgcccctggcgaattgttacgtatttttttgtgggatggtgtctcactatgttgctcaggctggtctcaaactcctggggtcaagtgacctcccaccttgacctcccaaattgcggggctgataggtgtgacccactgtgcaaggccgggcgcagtggctcacgcccgtaatcgcagcactttgggaggccgaggccgaggccggcggatcacctgaggtcgggagttcgagaccagcctgaccaacatggtgaaaccctgtctctactaaaatacaaaaaattagcttggcatggtggtgtgcgcctgtagtcccagctactagggaggctgaggcaggagaatcgcttgaacccgggaggcagaggttgcagtgagctgacattgccccactgcactccagcctggccacagaacaagactccgtttcaaaaaaaaaaaaaaaatcaaatttataacctgtatgagtttaatcaatattattaacaataactaatattgttatgtttgttaggaaaactggggctggtatggtggtgcacacctataatcccagcactttgggaggctgaggtgggcagatcacttgaggccaggggttcgagaccagcctgggcaacatggcaaaaccccatctctacaaaaaatacaaaaattagctgagtgtgggggcatgtgcctgtagtcccagctacttgggaggctgaggtgggagaatcacttgagcctggcaggttaaggctgcagtgagctgcagtcatgccactgcactccagcctaggtaataggacaagaccctgtttcaaaaaaaataaataaataaaataaaaaaaaataaaagaaaaagaaaactaggaggccaggcatggtgctatggatgttcacaaagggggtcctaatgcatgtgttctgaacaaacatgtatattacatacaagccatgttcaccttgtggtggagacaacaatgaagtgtatcacaatcaagctctatacgtcaaaaggtgaagcagggacaccaaggcactcagtgtacagcctctgtaatccagccagaaccagtctatagtcagtggtctcttatcaggagaaagttactgaaataaggctcttgtccaatcaaagctgtagttatggctgtggaacaggggttgggggttagtcaggcagtgtctggtggctggtgagctgcagttgtttcaatattgcttatctcagggccactgcttgtttggctgccagagaaaaataaaaaccctgtagcccttaggacatagtatactctttaagtgtaggggtgcatgacttaacccttgcctagcatagccttaggttctgtttccaattcggtatcttactgccacaaagcgtctgttatgtcagccttacgatctctgttttaatattaatgcttgtcagtggttgtgtctaaaccgtaaaagaaaggggttatacgtgtttgacgtcctatcccatcatggccaggaactcagtttttaaggtttctctgggatccccttggccaagagggggtcagttcagtcagttggcaggggcgggggctgttaggattttatttttagttcttattggttttatgttgacatattttggatatattgaattaaatataacacacagtcagccctccctgtccatggattcag

SEQ ID NO: 1883218 - DNA, 4001 bp, Homo sapiens
attgatgaacatcaaggaatcacaattgtcaaggaataaaatacttaggaatatagctagctagtgagatgaaagatctctacaaggagaattacaaaccgctgctcaaataaatcagatgtgacacaaacaaatggaaaaacattccatgctcatgaataggaagaatcaatattgcaaaaatggccatactgcccaaagcaatttccaaattcaatgttattcctattaaactaccatcgagactcttcacagaactagaaaaaaaactattttaaaattcatatgaaaccaaaaaagagcccaaacatccaaggcaatcctaagcaaaaagaacaaagctggaagcatcacactacctgaattcaaactatactacagagctatagtaaccaaaacagcatagtactggtacaaaaacggacacatagaccaagggacaacatggagaattcaggaataagactgcacacctacaactatacaccatggaatactatgaagccataaaaaagaacaatgccatctcctttgcagggacaaataccacatgttctcacttataagtgggagcaaatgatgagactacatggacacataaaggggaaaaatacgtagtggggcctattggaggatggagggttggagaagggagaggatcaggaaaaataactaatgtgtactaggcttaatacctggggatgaaataatctatgtaacaaaccccaaagacacaagtttacctatgttaacaaacttgtgcatgcaaccttgaacttaaaaggtgaaaaaaaaaaaaacagaaaaagaaaacaatcagtggcagaattgggaacccagaaataggcttatgaaaaaattaagtaacaaagtaaattaaaattaaataataaagaataagaaaagaaactctaagtaataggatatataagtaatttaggagaaaattctgatctaagacatgcagataggtcacttttttctgaatatatacatataaatatatatacatatataaatatgaaatacctatataaatatgaaatgcaagtatggaagaagacactggtcccaaagtgcaagccaaatgcattctgaagaactcaattattagttatcaaataaattcaaattaacaattgatttagcatgtttagaacgtatttaacagactgataaattagtctggccagaatatattgaagtgtatatttctgtatatgatacgtggcaaaaaaaaaaaaacagtcatgatatttcttgaagataatgatacttatgaatatttaagtggtgcatatatttggatcatcacatttcattgctaataacttaaactatcagataaatgtgcaaaggtcattgtacaacaatgtatcttgtactactatttgcaatagttacattaaaatttaacattatccaaaagaccaacagtaaatgatttttcagattcattgacttttcaagatccatacagggaaataaagtctttaaagggtttaacagatgaacaggaaaccctactcccacaaaaaaacttagattataagcaatgtgtataagataaatacattaagtgtatgagtgtttataaatatatttgtatacacatacactcaattatgagtaatgtgtatgtgtatatataaatatatgtgtgtaatccttattaaatccattttcaaaattctaaagctaacattatagtaatctgactctaacattataataaagaattatgtttacttttgtatttttgtacaaggttcaaaccttatttgcttctcaggcctgtaacagtttgattgtaaatataaatcacatatatatgttaaaatagtagaatatgttacctttatttagctgcaattttctaaaagaaatttttacatcagaaaattctctagcttattattttccttgaaaatgttattgataaggattaaaataactttatttgaaaatagggtaactgttacataccccatgtccaccgcatttttcttcccagttaccttgtcttctatctgcatatgtgctcacaagttggcaaactccattatcacataactaaaatgttaaagtaaccaataacaagaaaaaattttaaacgcaaagtcaagagttgagcaactgtattttgtacaagaactatattcataagatataaacacaaacataaatttggatttgatgacttttgttcattgtagtaatagaacctgaagtcactatcaaaatgatatgttattactttataactttatagaaaaattaagcaatgaagtaaattaaaattaaattactttataaaatattaaatatatttataaaatattgaatatcatatttacttatagtcctgtgtataagaatgagtaaaagaaaggcagttaatgttattttttaaattcactggctagcttattagtttgaaaaactctctgttgatgatctcatcaatatgcccgaagcatattccttttcagttatcaaatgattatacttagatgttcttatctctcctagctaatatacatggactaggatcagtttgataacctcttctcctgtttaagttttataaataacaaattcaaaggcactttgtatcacaaccagtattaagcaaatttgccttgctggaaatgcctatttccatgtagtatactgttgacttagtatattactatgttaaatctatgagtgttttatttataatctttattcaaattaataagatatatgtatattgatactgacaaataagaaataaagtacatctgtctaaagtcatataggtatagatagatgtagatgtggatatatgttaaagtgcatctatcttttcatataggtatgtatggatagaggtaaatataaatatatgttaaatttaatttttacaaaggacccacatttcatgaaggtgaggtaaagaagtctctactttcttatctctctgaaatcgtttgaacaatgttgaacaacaaatgaaaacaaagcacacctttgatgaatttttaaaatagccagagaattccaatttgaattgacagagctggtgaacacaaaagccctctttttccaataaaagagaataaaggagaatcaaaaagacgcaattggaagaagagagatgtaagaacttcctggaataccgaaataaaaaggaagatcaacaatggataaaatgaagtgggaaagcaaccatatcaaagacagtggcaaagaggagcctggttgattagcctggcaatgctttgaagagctgcagcctcaagattataaggaaaaactgagggagaagagctgaaaggacaggaaggggagggatggctaagatgtggacttatccacagaagtctgtacacaaaacttactttgctctcaacatccaatactcacttttccctctccctctcaatgactgaatgcagttcacacagcacttttatcccaaagatttagaagggtattttgtttcctaaagcaactagactcataagactgtggaattcaggcttctagagtgttctgtcctctagaataagcactacccaattaaatcagtggttagtatagtatcttgtttagcgatcatggcctaaactcagcttccaagatgaaggctgtcatttgataaaccctagtcacatagagaaagcacccaattagattttcaatatctctaatcatcagagaaatgcaagttacaaccacatgaagcatcacatcaaacctgtcggattagctattatcaaaagtattaaaaataacaagtgttggttaggatgtggagaaaagggaatgcttatacattgttggtggcattgtaaattgatacagtgattttggaaaaccagtacagtgattcctcaaaaaactaaaaagagaactatcatatgatccagcagtcccactgttgtgtatttatctaatggaaataaaattagtatgccaaagagatatctgactcccgtgtttattgtagtatt

SEQ ID NO: 1883219 - DNA, 4001 bp, Homo sapiens
ttcaaaacgcggattttgaatctttttttctacttagcctaataagtttgggtcttttacttaacgtctatctaggcggctcagcttcaagttctgcaaattggagataatatcattaagttacagatgttatttgaaaaggcaacgaaccattgtaaccatttttgtaaaccatgaaggtatattataagaaaaggaggaggaaaatgagaggtaacttgtgcattgttggatgttgtttgcctgttctgctttttctcttgtccagcaaggcttgggtagacaatcatacatcatgaatggttaacttgaaaactgagttctactggaaagactggcaggcaagcagaggtcggaatcccgtcgtttctaagtgtctggtaatctttgccactgctaagattacctgggggtagaagcaccgtcggtaggaacaagatgtgccccttcactccccgaaagctcacttatcctgcgcagacatgttgaagggccgtcgggcttcagagcccaaatctcggctctgcagagacgtccccttcccccgcctccaccaaccgctcttcggcatgcagaaaagcggtccccaccccttccacgcccctgccccacctcttggccccctttacaaccccctcttctttgcccggggtggtttgttccaaggagtacagatagccttttcaaaaggcgcagcttaccgcggtgcgcgcggattctggacttgggcgccaactcgtagtccacgctccccggggtcagcagaggggcgctcacgctctcgccacccacctcgctttctcaccccgcgcttcccggcctgggtttttagtcttccttggagcgctctctggcctccgcctccgccagggagcggaaggcggagacagcgagactggccaggggggaggaaagaggacgcgtgtgggcaagggggacaacgggatgtccacgggctcggtgagtgatccggaggagatggagcttcgggggctgcagcgggagtacccggtccccgcctccaagaggccgcccctccgcggcgtagagcgcagctacgcctcgcccagtgacaactcgtcggcagaggaggaggaccccgacggcgaggaggagcgctgcgctctgggcacagccggcagcgcggaaggctgcaagaggaagcggccccgtgtggctgggggcggcggcgcaggtggtagcgcgggcggtggtggcaagaagcccctcccggccaagggctcagccgcagagtgcaagcagtcgcagcggaacgcggccaacgcccgtgagcgtgcccggatgcgcgtgctgagcaaagccttctccaggctcaagaccagcctgccctgggtgccccccgacactaagctctccaagctggacacgctccggctggcttccagttacatcgctcacctgcggcagctgttgcaggaggaccgctatgagaacggctacgtgcacccagtgaacctggtaggggcgcggcgcgcaaggattcgggagagcagccaggagatacccagggcgctcctgggcgccgggcagggtcagcccgttgggaagaattcgaaaggggtggaggttctgggactgggaacgagaaggccagtttagtttctcccaaatcaagggagtggccagccatttccctgaagaagaatcaaccctccgtgtctgtttgcatcgttctgaacattgtaccccagtgacagccattgactaatatcctacttccagggtaaatcttggttccatctccatctgccaccaggttgcagactgacggcaaatctcccttgcccaacttaatccagctgagtcgggcaggtttgaatcggcaagccctttcttaaaggagggaaggccgagctctataaaagagcatttgcatttttagaaaaattgcttgtggaagatagtaacgtttccccagatgggatttatctggaaagtccctctctgatctgccagctctcccggcttgggaaaaatcctgtccaagcccagttcctacttggagcttggagtggatgactgtgtgtgtgtgtgtgtgtgtgtgtgtgtgtgcgtgtgtgtgtgtgtgtgttggggaagggaactaaacgacagaacctcaaagtcagatgagtttcaccaaattatcctgcgggcaaagtccaggaagaagcgtgaacggatatggcaagtctcggattatcaacctccagtaaaatgaaaatcttagttcagagagaggacatgcaaattcccagaatgctgataaaatcttagctactccaagtcaggaatatctggggttcgcgtaggagagctgtttcggtttgagacaatcgtttctctctaatatctcacgttctttttgatttacagacatggccattcgtggtctcgggaagaccggactctgacaccaaagaagtttccgcagccaacagactatgtggaaccaccgcttaaatcggactggaactcacttgatgggattattcgttaaatgcgagtgtttgggggccacggagagaagggagagctcgtgagatgggaagaagtttccgctggattctccttgacccttcccctttccctggaactgtgatcgtgacaggtggcgggtgtggctgtcactgcacagcgcccacggctacagctgcgccggatctgggcgaccacgttttgcctctccaaaaagagcttcctttcgtgacgagacgcggacgcaggtccaccctcgggccctagctctgtagactaactctcggctgctgccccagcccgcgccagacagcccacggatccgttctcagcggagccagattcatcgcacacgtgcgggacggttccacacagccccggcctttcgcggtgacacaatggttagggaacggttagaacgcgctctacatccgctttaaagacagaggtctagacgtgagatccgcgtcgggacagggttttaagtgacaaagaagggcgagtggcttctctgggccgggttcgtactccagcacagcgcccttctaacgggcgggaggaaggccgctgctcgcagggctaggtggagacacacttcccagatcaccgcaggcgggttttacccggagagctctgggccgttcggcctccctgccgggtggcttcttcaatcccgtctccttcccaagctcccggctttttctaatcaggcaggcgtctgtcaaccctctccacttctgggctgaagcctccccaagccccgctgcgccaacctgtgtggggtcttcttcgggcctccctctccgccccgctcctgctcctacctgcagcacccccagctccgactccagactctctgcatcaggtctccccactccacgctccgggcgccccaactccaacaccacgtcctgccgcgcaggttcttccccgcgcggaggagcgcgcagggtgggcggcttaccatagcaagtgatcctgcgatagggaacgcgcccttgccccgaggctgcactaccacaggaaataacatatgtaaataaatttatttttttatgaataataaaacgcgctgtaaaaaccgtgtgccccttggaggtgtcaggatgtggtctttgttgccctttactaagagggtttggctgtagaagttaacttttaagggctgatctcctctggtcagggcggtgggtcattgcgggaggaatggtggcgatcacttttggatcactccatttccaaacgtcattctttattaatctctatgattctgctgcttctccgcgccgggcttcctggaaggccataactggaggcctaataaaagtcctgagtcttgaggcccctgctgtcctgacagacatacactcctcaggctaacataggtgcacgtctctcatacacacacacacacacacacacaacacacacagcagctactccagctaaaagcacactccaatccttaccattgcaagtagttcaaaaaaaaaccctaaggcccacccacaagtctccagtgt

SEQ ID NO: 1883220 - DNA, 4001 bp, Homo sapiens
gagagagctgagggcaaatgatctttttattcacattgtcccagaaccagcccaccccctgcccccaaccaaaagacaacttgtacagggagaaaacctttgcaaatgtgggtgagccggaggggttatgtgaaacattcccccggccccaaaacgcccctgctaagggtagcgtggcctgggagactaaggtggaatgatgcctgagtgatgaagtcagcctctgccagccacctgttgcagcacttcagccatcgagctggacgcatttgttctgctgtacgaactggcgggagccaggctggcccagctatctctgccagctctgtcctggactgactccacataggtccccttgcaccttgctcagcttgggagcctgtggactttcaggaaaagaacaagtgaacacctaagcctgtgtgacgactcagtttcatcattgtaaaatggggtaaccatatgccaaactcatacgggttttattactcagtgagctgctcacaagccgcgagtacagtgacgggcacacagcgggcactcagtctctgaccactggggcccgtatccacagacgtacttatcccctgaccaggaactgcgatgaccttcgagttaggaaataatgagactgcaaaattgttgtgttttcttgtgtggaagagcaggatgttttagtcttgtttggaatggaacatgatcattcagggtgctcctttgtcgtttttactttgaatggacgattgtgctaacttagcattctgcttccaggagctcgctcttcaatacacaatctattaaatacaatagcaaggattccctacattataatgcaaagctttagggccggatcctccaacacacgcattgtggtattaaaacaaaatcacatcacgcatggaactctcaagatagtggaaaataccagctacaacatccagtgatgtgtgacccggaggcacggagctgactagaataccgacgggccagaatttcaaaacgcggattttgaatctttttttctacttagcctaataagtttgggtcttttacttaacgtctatctaggcggctcagcttcaagttctgcaaattggagataatatcattaagttacagatgttatttgaaaaggcaacgaaccattgtaaccatttttgtaaaccatgaaggtatattataagaaaaggaggaggaaaatgagaggtaacttgtgcattgttggatgttgtttgcctgttctgctttttctcttgtccagcaaggcttgggtagacaatcatacatcatgaatggttaacttgaaaactgagttctactggaaagactggcaggcaagcagaggtcggaatcccgtcgtttctaagtgtctggtaatctttgccactgctaagattacctgggggtagaagcaccgtcggtaggaacaagatgtgccccttcactccccgaaagctcacttatcctgcgcagacatgttgaagggccgtcgggcttcagagcccaaatctcggctctgcagagacgtccccttcccccgcctccaccaaccgctcttcggcatgcagaaaagcggtccccaccccttccacgcccctgccccacctcttggccccctttacaaccccctcttctttgcccggggtggtttgttccaaggagtacagatagccttttcaaaaggcgcagcttaccgcggtgcgcgcggattctggacttgggcgccaactcgtagtccacgctccccggggtcagcagaggggcgctcacgctctcgccacccacctcgctttctcaccccgcgcttcccggcctgggtttttagtcttccttggagcgctctctggcctccgcctccgccagggagcggaaggcggagacagcgagactggccaggggggaggaaagaggacgcgtgtgggcaagggggacaacgggatgtccacgggctcggtgagtgatccggaggagatggagcttcgggggctgcagcgggagtacccggtccccgcctccaagaggccgcccctccgcggcgtagagcgcagctacgcctcgcccagtgacaactcgtcggcagaggaggaggaccccgacggcgaggaggagcgctgcgctctgggcacagccggcagcgcggaaggctgcaagaggaagcggccccgtgtggctgggggcggcggcgcaggtggtagcgcgggcggtggtggcaagaagcccctcccggccaagggctcagccgcagagtgcaagcagtcgcagcggaacgcggccaacgcccgtgagcgtgcccggatgcgcgtgctgagcaaagccttctccaggctcaagaccagcctgccctgggtgccccccgacactaagctctccaagctggacacgctccggctggcttccagttacatcgctcacctgcggcagctgttgcaggaggaccgctatgagaacggctacgtgcacccagtgaacctggtaggggcgcggcgcgcaaggattcgggagagcagccaggagatacccagggcgctcctgggcgccgggcagggtcagcccgttgggaagaattcgaaaggggtggaggttctgggactgggaacgagaaggccagtttagtttctcccaaatcaagggagtggccagccatttccctgaagaagaatcaaccctccgtgtctgtttgcatcgttctgaacattgtaccccagtgacagccattgactaatatcctacttccagggtaaatcttggttccatctccatctgccaccaggttgcagactgacggcaaatctcccttgcccaacttaatccagctgagtcgggcaggtttgaatcggcaagccctttcttaaaggagggaaggccgagctctataaaagagcatttgcatttttagaaaaattgcttgtggaagatagtaacgtttccccagatgggatttatctggaaagtccctctctgatctgccagctctcccggcttgggaaaaatcctgtccaagcccagttcctacttggagcttggagtggatgactgtgtgtgtgtgtgtgtgtgtgtgtgtgtgtgcgtgtgtgtgtgtgtgtgttggggaagggaactaaacgacagaacctcaaagtcagatgagtttcaccaaattatcctgcgggcaaagtccaggaagaagcgtgaacggatatggcaagtctcggattatcaacctccagtaaaatgaaaatcttagttcagagagaggacatgcaaattcccagaatgctgataaaatcttagctactccaagtcaggaatatctggggttcgcgtaggagagctgtttcggtttgagacaatcgtttctctctaatatctcacgttctttttgatttacagacatggccattcgtggtctcgggaagaccggactctgacaccaaagaagtttccgcagccaacagactatgtggaaccaccgcttaaatcggactggaactcacttgatgggattattcgttaaatgcgagtgtttgggggccacggagagaagggagagctcgtgagatgggaagaagtttccgctggattctccttgacccttcccctttccctggaactgtgatcgtgacaggtggcgggtgtggctgtcactgcacagcgcccacggctacagctgcgccggatctgggcgaccacgttttgcctctccaaaaagagcttcctttcgtgacgagacgcggacgcaggtccaccctcgggccctagctctgtagactaactctcggctgctgccccagcccgcgccagacagcccacggatccgttctcagcggagccagattcatcgcacacgtgcgggacggttccacacagccccggcctttcgcggtgacacaatggttagggaacggttagaacgcgctctacatccgctttaaagacagaggtctagacgtgagatccgcgtcgggacagggttttaagtgacaaagaagggcgagtggcttctctgggccgggttcgtactc

SEQ ID NO: 1883221 - DNA, 4001 bp, Homo sapiens
tttggggtgagccacagagcacagtgagagaagcaggtttatttgaaatggctccgttccagagtggggcgtgctcagaaagcaggaggaggagggcctgtcctctgttagtgcctctgcttacaagaaactgtaaggagctacaattacacctggaatgggcagatgcacccactaaggataggggctgtgggtgccatcagtgcccgttcatcctccaacctcaggctgctcattgaaattatctctgagtaaagtggcctgcactcttgggttatctggacagtctgcgggcttgctgggagatgccccatatggccacaaatattctgtaattataattggtgtccagcttgagacatggctatttttagaccataagcattaaccttataggtgccttgtgagtgcctcctactcacttcaagatggagtcactctggtcatgtttcattaaaccagaggcctggtgagcaagcgttcctctaacagtgggaacctcaacgtcgggccagtcggtaagaagttccagaggctggccctcgcagctcatgtgtgtgcatatgtgtgtgtgtgtgtgtgtgtgtgtgtgtgtgtaggtgtctggatctgacgctatctgcaggtaccggaatggtgttggaggacactcggctggtgtccgctgcagaactgatggcttgctcggtggcggggagacgtccacctgccacatttggccccagcagtcttgggagtctcctgtgttgatgtcttctgtgttgagtgagagacaggataaatggtttgagagttttttccaaacagccctcctcctaatgcagcttgttttctgaatcagagggtcctgtcttgaagggggcaaacccacccgtgctttcgtcccacagttcttactgagcccctgccatggcagggatggccccaggtgccggctgcagagacagaaccccctgccctcaccgccaacattccagaggggaagatgccctgcctgtgccccacgtaagacccagaggcagggactcccccgggccacagcctactggaggctcctgtccccagagacagctgggccatcgcccccaaagctgtggaagccccacccacgatgccatcataccacggccaggacatctcgtgacacacacagccccagcctcagcctccatacacacacacacacgcaccacacacactcactcatgcaaaacacacacacagccacattgactgcacccctagatttgagacaggggtgttacaggtgtctgtcagccccagccccctcctgaccacatggccacctgcccaccctcacatttccgcacaccctccccctactcccgtgtggggttcagaagacccctccctggtgctcgccctgtcacccagaaaggaaacgcactgtcaactggagaacaggccggtggcagagccccagcgcccacagcccctcggagagggcctggcgggaggagaggcacccaccgatggcagagcctcagtgccctcgcagaagccagcacccacaacctcccacctcccaacccttgccggtctccccacccccgcctgagggatggccaaggaacagcccagcctggagcgggaagcagggacaagatgacctcaggaatcccaggctgcgggggtgcctgcgtcctcccctcccgagctccactccgcaggcgagacccccaacactgctccccgacactctccgaggcacccctcctccgtgctcacacccaaacacgtctgctcacccgtgggcttcccaccccgaacacaacgaggactgtccaggtgtcagtgacggtcaccccgacctggtcccctgtccggcctcgccaggtcagcacccgccgcgcgcacagcagggccgggtggaaggaggccgggcctggccgtggctcaggcgccacctcactggggaaactgggaggtggtctcagcccccttctgggcctcagcttccccatctatcccaaggagccggggtaggcctgggcggcgcggggacccccaccgcgggctcgccgactccgcccgccggaggcccctcccgcgtcccgcccctgcccccgccccggggccgcgcggctgcctgggaggctccgggccagccgcggtccagagcgcgcgaggttcggggagctcggccaggctgctggtacctgcgtccgcccggcggtgagtccgcgggcccccggccgggacgcccccgccacctgcgcgcacgcgctcagacccggcggcctcggctgcggtgcacgcggccccggctcagccacgcgcggcggaaggcgccctgcgggggccggggcgggagagggtgggagagagcaagaggggcgcacggggaggcgcaggagaggggctggggctgccggtgggttggtccccagagagctgagcttctcctcccatcccccgcaggcctccccgaatgtttccaaagatctggggcgggagcgggcggagactgccgccaggagcctcccggccgccccagggctgcgcagccactggagcccatcacccaactccagacgctcctggctcctctacgtgggccgggagggacagccttgaggactaggggagggggcacgggaccttgcagagctcctggccggaaagggaggattgaccgcccccggcatatcaccccggagcactggaacccgcccccgcttcttgttttggcactggtggtgcttgcggtgaggtccaaggagcccagcctccctgagtggaccgccgggcccctccccgttccgggacacaggagaggctcccgccccttgctggctgggcagcccctagatacctggctcccaggggccagcttccctgagcctggggatgagccatgagcctgcagcctgggccccaggggcgccccccacggcctgccggctggctccctccgggctccatggcccacccggccttcctaattgccttcggctcccaccggtgccttagctcagcctggtggcccagcgggttgggtgccacccagtgagcaggtggcggcaccagctggacctgtttgtggccctgtatgctaggacttcctcagagacagctcagggacccccccacaccagaacctcactttaggggggtggggggaaaaggaattggagatccttcctcctcgggctactccctggaggcggggataggccccagccggacttggcactgtttttggccacctggggctcccactcccaaccccaggatgtcagcccaggtctcactgtcctggcctgctgctctccccttagggcctctgcgggcccctctccagatctgttctctgaggcatcctccttacccccagtgcccagcactagctccccaggcccgggatgtccctcccactcctctgcccacggctgtccctgacagaaggcagcagcctccccctccaacaccatgcactcacaaaacagagaatcacgaccccagctgggtgtgttccagattctttctccagcagtgcagagggtcctgtgcagaggccgaggagcagtacagcgacccatctggccctttcctgctggtgggaccagtggcacgcagccttgtctctcggagcccatttcccagccacagaatggggagtagcagatactgagtggggtgctttcctcggaactgagtaacatcaggaatggggagtgctttccccctcagccatgccccacctggccccaggtctccatgtgaggggagctgcctgggctcaaaacactgagccatcccaaggaaaattctagatacagattagctaatatacactgacagatacacatatagatgtgtatatagatttctcttttttttgagacagggtctcactctgttgcccaggctgcagtgcagtggcatgatcatagttcacttcagtcttgaactccctggctcaagagatcctcccacctcagcctcccaagtagctgaccacaggcacgtaccacgcc

SEQ ID NO: 1883222 - DNA, 4001 bp, Homo sapiens
gacctaaatgttaatgggtcagaagattcaatatggttaaaatgtcaattctccccaaattcatctgtagagtcaacacaatctcaatcaaaatcccagcagtatttttttgtgcaaaatgagaagtcgactctaagatttaaaaggaaatctgaagaatctagaagatacaaaataaccttgaaaaataaagttgtaggacataaactatctgatttcatcacttatttatatagctacaataatcaaaacagcatggtgctggcagcaaaaagacaaatagctcaatggaacacaataggaagcctaaaatgaaacacatacatatgcaacacagattttgatgtaagcacaaaggaaatgcagtagagacaaaaataactttttaataaatgatgctggaacatttggatatgtatacatgcaaaaaaatgaactttggtccctatcccataccgtatacaaaaattaattaaaagcagatcttatcctttgagtccagtaggttgaggctgcagtgagctgtgattacaccactgcattccagcctgggcaacggagtgagaaactgcctggagaaaaaaaaaaaaaaaagtagaacctagacctgatatacaacctaaagcagtaatatttctagaagaaatcctaggagaaaatatttgtgatcgtggagatgaagaatctatcaaatactaaactttttttaccaccttgaccaaaagtaattggtttatatacttcatcatatcatttaattcaaaatctacagagatcaatgtcactttctcagtaaaagtacgtgagtcttcaatgatgccctgaactcacactcccaagtaaaccataacaccatatttccagagtagagtttattagaacaataactggtgataatgataaatattgatcaaagactgagcctaggaagtgggttttttgaggctgcatatactcaaggcaattcttcagaaccacagagggctcattggatcctattaaaagctgagagtgaatgaataaacagataaaacagagacctgagtagacggtagtcgatattcttttacatgtattctacctctagattccatagaaagaactaaaagtacatgaatttcactaccaacatctccatcagttaccagctgtatcaccttggatcagtcaggtaacctcccgcgaatctggttgcttccggggcaggggatccgcgggctgcaggtttgagcctggttgccggcagggtggagcagctggagggccaagcctttgagctccagggggggtggccgggacagtgggtagtgccagccgatcggcgtcctggggattgcctgaatgtgaggtctgggttcaccccgcggtgacctgagtcctgggatgcccctacagggatttgctgcctcagggatccgaagtctctttcattcccttactggggatttgaggtctggaggtactcctgcgggggtctgagatctcggggtcaccctgtgggggtctgaagcctcggggtccccgcgtggggtctgaggtatcagagtcccctccgttgggtctgaggtctcggggtcccccatccccgggatcggaggtccggctccccggagcaggcagggcggtgcgtctggccctgaacagtaacgtggcgcgccagccccaggtggtgtcgggctaggggggcataacggtgccgaaagtccgcacaaagccgtccgctggggtcccgccgcgtccgcgagggaatgactgtgccccctccccttcctgatcctcagctcaggtgagcccagatgaggcgccgggtagcttctaagtcactaatggaaatagaaggctaattcaggggttaggggccgtcgtcctccttactcccaggagaagagaaaaacccacggcccagcagccagaggcgcggcgaggcggaatcgggccccctccccgggggctcagctccctccagcctcccgcctcacctacagagaaatcccggaaacgcggattcagcggagcgcggtgacggcggcgcgctcaccccgcgcatgcccagtgcccgcgcgcgccgccaggctcgcaagcaccgcgtaggccagctggccggatcccgccgtctgtcatggcggcccccatcctgaaaggtgaggtacttcctgctgcctgctccagcagcgggagtttgaggaccggcacccctcgtcgcgggcgcactcgggggatcccgtgggaggagccccgctcgcccctccctcgctgcctgtctcccccagaccccctgccgcctccttcctcccccgctgcctgtcccaccaaaaccccctgctcctgctctctcccccgctgcctgtccccccaaaacccccggctgcctgcttcgtctcccgtgctccctgtccccccaaacccccgactgcctgcttcctcccccgtactgcttgtgccccaacccccgtgctgctagttcccctcaatcccccgctgcctgctccctcccccatgctgcctgtcccccaaatcccgcctttccccctacctgctttcacccctgctgccttagtccctggatctggggctcactggcaggcagagtcctgccctccggaagttggtgtggggccctcctgggtctggtcctgttcgaccccctctgaggcccacctggaggagcggcagttgagtttctatgctaattgttccaataataggagccgccttttactgcggagtctttgtgtgccaggcgctgtgcttaggctagtatggtattgtctgatttttttaaccgctctatcaactctcttatatcattttacaggcagaaactaaggcatcggacgtttaggtgactctccctgtgtgtggctagtcagtgctgacagggccttagaccggagctgctgtcctaaccagtatatgataccgcacgcagtcccaccctctgtgcacctggaagagcccaggagaggggaatagcggacacgtgtcttgtagagtttgaccgtgagaaaaaaggggcctgtattgtggggcctggagtcataaaacctcatagccaaaagtaaagactagaggctttatacaaagtctgtaatcagatgtggctatttttctaatgttagtattttgttaaattaacctggttttcttttagcgttacccccaatcattgaccaacggcacacctggaaaatgcttttaaacatcaggttttgagaagaggatatccactagaacaggggtccactcactatgccccccaggccatatctagcctgctgcctgtttttgtaagggtctacgagctaagaatgtcttttacatttttaagtgattttaaaaaaaggtcaaatgaaaaattatatcacattcacatttccttctccataaataaagttttattggaacacaggccggcccgttaatatattacctatggttatgtttgtgccacaaccgtgaagttgagtagttgtggcaaatactgtattggccacaaagcctgaaatatttaccatctgtctctttacagaaaataggtttctgcactggaaaaattaagcgtaagaatttggggaaagcaactaattttacaaatgtaaactctcatgtattgtatgggtacagttgttctttgcttaaaattttaataaattccactgaagctattttgaaaaggctttcagtagaaatttatttatgagacagagtcttactctcttgcccaggctggagcgcagtgatgtgatcacataatagctcaagcaattctgcttcagcctcctgagtaacttgggactacaggcactaccacgcccggttatttttatttttattttttaatttattatttttttgtagagccagggtctcactatgttgcctaggctggtcttgaattcctagcctcaagcaatcctcccgcctccaccttgcaaaatgctgggattacaggcatgagctactttgttcagccagtagaagaaacttcatttacttttctt

SEQ ID NO: 1883223 - DNA, 4001 bp, Homo sapiens
agagctcacggggctggggccaggctgtgaggtacacagggccaggctccttcctgtccttggtcacagggccacccccttaaccctcgggactactgtggctggacacctctgcacgaggcctgcaactacgggcatctaggtgagcaagggacagaaggagcctggcgcaccttggtggacacgtggggcgaagagtcagtcctggcggggcatcgggagctgggcttacgtctcctggtctgcagaaattgtccgcttcctgctggaccacggggccgcagtggacgacccaggtggccagggctgcgaaggcatcacccccctccacgatgccctcaactgtggccacttcgaggtggctgagctgctgcttgaacggggggcgtccgtcaccctccgcactcgaaaggtgagcctggtggggcagagggcaagggcgaggttatgggggctgctgtgcccctgctcaactgatgccacacagggcctcagcccgctggagacgctgcagcagtgggtgaagctgtaccgcagggacctggacctggagacgcggcagaaggccagggccatggagatgctgctccaggcggctgcctcgggccaaggcaagcagggcgtcccttgtccctggggttgctgtgcctacgctgagagtccccgggccctgatttcgggagatgctccatcacaggtggagcgggaggtgccgggcccctgcctcaacacgcattctctctcccacagatccccacagctcccaggccttccacaccccaagcagccttctgtttgaccccgagacctctcctcctttgagcccctgcccagaacccccctctaatagcactagactcccagaggcctctcaggcccatgtcagggtctccccagggcaggcggcaccagccatggccaggcctcggaggagcaggcatgggccagccagcagcagcagcagctcagaaggcgaggacagcgcaggccccgcacggccgtcccagaagaggcctcggtgctcggccacagcacaacgggtggcagcctggacgcctggccccgccagcaacagggaagcagccacagccagcaccagccgggcagcctaccaggcagccatccggggtgtgggcagtgctcagagccggctggggcctggcccaccgcggggccacagcaaagcccttgccccccaggcagcgctcatcccggaggaggagtgcctggccggggactggctggagctggacatgcccctgacccgcagccgccggccccgcccccggggcactggagacaaccgcaggcccagtagtacctctgggtcggacagtgaggagagcaggccccgtgcccgagccaagcaggtccgcctgacctgcatgcagagttgcagtgcgccagttaacgcagggcccagcagcctggcttcagaacctccagggagccccagcacccccagggtctcagagcccagtggggacagctctgcggcaggccagcccttggtgggtatgcagacctggagcagagccctctccccactccgggcaggcaggtgtagggtggagcccactgtggctcctgactcagccctgctgccttcacctgccagggtccggccccgccccctcccatccgggttcgagttcaagttcaggatcatctcttcctcatccctgtcccacacaggtgaggcatcgcctgccctaccccgcagcccacctgtgcagctccatgccagggtgctcgtgtttgcatgtcagggtggggcgtgtgacgagggctccctggtgtgttccaggaggatcctgtggcccccaggaatagcagaggggctggtggtgtgctgggctgcagggagaggaggggccggctacctgggaatgggagaagcagctgagggggcttctggccctgggcagggatggcgggtccctggggcattaccccggctgtgtgcaggcagcagcagcagcgcctctgtccctgcagcagtgacacccactctgtggcctggctggccgagcaggcggcccagcgctactaccagacctgcgggctgctgcccaggctcaccctacggaaagagggggccctgctggccccacaggacctcatccctgatgtgctgcagagcaatgacgaggtgagccgcagagcggagggggagccagggcctcaggcaccgggagcccccgggtggctcatggctgcagagcaatgatgaggtgagccgggggagcccccaggtggctcatgacggtgccttccaggtgttggctgaggtgacttcgtgggacctgcccccgttgactgaccgctaccgcagggcctgccagagcctggggcaaggtgagggccaggagagctgcagtttctgggtgaggtcgtacaagggggttgggcacacaggctccaccagcccggttcattcctgggcctcgggtgttttggggtgcacctcccccagcctggtgggtgctgtgtcctgcacttggatgtgtgggtggaagggagaggacagccctcagcccccatgatctgctgacagggagatggcaaaaagcagccgaaagcctggaaagtcaaacccaaggaggagggcctggcatgggctgggagctgctggggaagcttcccagaaagcttgtcccggggggtgtggaatctggcagtgactggtggagctcagggtgctgcagacccaccccggcccccagggcctcacagtgctagacccacaggcatgtgcgagtgggctctacagcaagtctggtgggtgacccctggggctgttgaaaaggggctgcctggtttgccctctgggattcagagggcagaaagggccggccttaccctggtgacatcacatccctcccgcaggggagcaccaacaggtgctgcaggccgtggagctccagggcttgggcctctcgttcagcgcctgctccctggccctggaccaggcccagcttacacccctgctgcgggccctcaagctgcacacagcactccgggagctgcgcctggcagggaaccggctgggggacaagtgtgtggctgagctggtggctgccctgggcaccatgcccagcctggccctccttgacctctcctccaatcacctgggtcccgaaggcctgcgccagcttgccatggggctcccaggccaagccaccttgcaggtataggcacagagagcagcaggccctcaacagcggggagttggggttcccattctgcaggtccctgggtggtctagggtagttgggagagccagccagtgcccggctgtaataggctatgccaggcaaggtggggaagagactgccaagccaagccccaagggggaccctgtccgtgggactgctgggggctcactgccagcctgtgtcttccacagagtttggaggagctggacttaagcatgaaccccctgggggacggctgtggccagtccctggcctccctcctgcacgcctgccccttactcagcaccctgcgcctgcaggcgtgtggcttcggccccagcttctttctgagccaccagacagcactgggtagtgctttccaaggtgagctgaccaggcactccctgtccactccctagccctggggcattgagggtttccaggactttcagagggggcccaggctgggcacacaggggcaacacctgtggtcccagctacttgagaggctgaggcgggagtatcgcttgagccaagagttccaggaaagcctggcccacatagtgagaccccatcccttaagaaaaaagcgtctaggccgggcgcagtggctcacgcctgtaatcccagcactttgggaggccaaggcgggcagatcacgaggtcaggatatcgagaccatcctggctaacacggtgaaacgccgtctctattaaaaatacaattagctgggcgtggtggccggtgcctgtagtcccagctacgcaggaggctgaggcaggagaatggcatgaacccgggaag

SEQ ID NO: 1883224 - DNA, 4001 bp, Homo sapiens
atggcccatccaaggcttaccgcttggcatgttacccaattctttaacatccacgatgatgaacaggtgttagttctgcaccctgaggtttcaatatccatcatgatgatccgtgagaaggaacttatttcctctgcagcacaagttgaggtgtctggatgacaaccaacgatattaagcgatgctgtggacatgatgccagtctggcttttcctgggcccgttgaaaggattaggcagatgtttagggccagccctcacccagcacaaagcaataaaagatccttatgcttcttctagcctgactaggtcagagcctgctaagggttacagacactgaggggaaacaaaacaagcaataaaaacaaatcacagtacagtacactgagaaatcacacgtgttcacatgcgcagccactcgagaaccacacacaactacaactagagaagataccgggattaacgtcctttgctcatatctgttcattaaacaaaaaacgttatgatgcataacatgattgaaagttaacagtaacatttcgggtggggggctgggggagggatagcattgggagaaatacctaatgtaaaggacgagttgatgggtgcagcaaaccaatatggcacatgtatacctatgtaacaaaactgcacgttgtgcacatgtaccctagaacttaaagtataataataatataaaaaataaaaagaaaaaagaaaaaagaaaaaaaaaaaccagtaacatttcatactaccacagggttgtgatatgcaaatttaaaatatttaaacagaaagctttacaaaataatcctattacataagcaacattcacatagaattatacaagtaaattatacaatatattttattttattttattttattatttttcttgagacggagtcttgctctttcacccaggctggagtgcggtggcgcaatctcggctcactgcaagctccacctcccaggttaacggccattctcctgcctcagcctcccgagtagctgggactactggcgcccaccaccacgcccagctaattttttgaaattataaaatatttaagcagcagcaacatatgctgacattcaagacgaagtgaagcttggttgtggcacagagaccaatgcaaaaataaggagaggccccactgcagcctccacaatctggggcaggagtggagaagccccagatcatactactttacatccttccttcctatattacacatgtgtacacctcttaaatctttatggaaatgtttaacaaaataatacaaccagctacagcaacaatgtactgctatcctggctcaaggcatctttaccgtaactacgagcagttcttaccaagcagttcttgaaaggtgtaggggcaggggtttccgatctttgacctctttactttagattttttttttttttttttttttctgagatggagtttcgctcttgttgcccaggctggagtgcaatggtccaatctcaggtgactgcaacctccccctcccaggttcaagcgattctcgtgcctcagcctccctagtagctgggattacaggcgctcgccatcatgcctggctaactttgtatttttagcagagacggggtttcaccatgttgcccaggctggtctcgaactcctgacgtcaggtgatccacctgcctcggcctccaaaagtgctgggattacagatgtgagccactgcgcccggcctgcttcagattttaatcaccctcagttggagctgcttccccggggccactcctcgcactccacatcctgcaactctgtgacttctaccttcaaattcgtcctctcaccctggacctggaaaagcaggtgaggacccatgaacaacccgtggtcagtccctgggtagccctcctggcctgtgcagagccccgcttgggggtcctgcgtgggcccaggacaggcggagggtgcacagtgacagtcacggaagcggatgccatcacagtggtgatggagaacactgcaggcctcaggcggctcggctctggccggggttgacagatcagctgctgcggcggccgcggccggggtcagaccctgcgccttccactgccacattgcgcgggtcccaaggtctctgacagagggctagagtcgacacccagcgagcctgtcctgcgcgttccctgcggctccagctttccccacccgacctccgccccgcgccgcgacccctcagcgcagaaagagccagcaaatccctgcggtcccgccggcggcgtgggctccctcggcccctcccgggtgtagggcacctgcagagccgctgggtgcgagggggcccggcgggtcccagtgctgccgctgctcctgaggtggcagctcccagcggtggtggctccaggagatggaggttccctgcggtgacggctcccggtggccgtggcggctcctggaggtggcggctcccagcgatggcggctcccgggagatggaggcttctggcggtggcggctcccggctgtggcagctcccagcggtggcggctcctggaaatggaggctcccgccggtgactgctccaggcagtggcggctcccgggggtggctgcttggtccgctgggcttgggctgctgggttcgcggtgctgtgtggcccggcctccgctttcctgtgctcctacacaacccacggaaccatcccgtctccgagtggcgctgctctggctcccggacccagggactgtgccgtgtgtgtgcagcgtgcagcggctgcagcggctccgttattgagtagatgagatggaagaagaaaaaaagaactccctccatttggagaaagaaggaggggaaggggagacagcaagcgaaagaggaaaaggctatattgctttttatgtaactccttaaaatttcagactgtttattattctactctcattaaaatgataaacttccaatgtatctaaaagaaaacaaccacaaaactcagcaaataatacaggaggtaatttgaacaaatggtgaaatattttctttttttttcttttttttttattatactttaagttttagggtacatgtgcacattgtgcaggttagcaaatggtgaaatattttctaacctgaggaaagtaataaaaatttcaacaacgagtagataggttctgtgggccatttcattattttattattgtgtgtttgtatgtgttttcccttgagatggtgcgcaggtgggtgtcagcagaggagacagcacaggaccctcagatgccagaagcagggattggtaaatgtgaaacaccagtcactgtcaccatgcaggggtggctgcgccctccctgtgtcagcctctgtgctggcagaggtggccctggtgcccttttagggtcctgcccgcactctgcactcactcagccagccccatcttctagaactgagggtcatctccttctgcactggagcaagcagcagagtcctgtggacactgtggcctgggtccccagctcctaggagaagccccatacagtgacgcctgctgtttcccacagcgctcaggggtctctgtgggagctcttgttccaggtctggcctggtggcctcccttactactctggcctcctgtctgaggctgagggtgagcattcccattcaggaggtgaacagagcccagtgcagcccagggcccctacccccagggaaacgaggcccaagcctcttgtctgatctcctctaggacccctagatcccttctctcctcttgtcactaaggccagaataagggaaacgcaggcacttctccttgctggagcaacgatctgagaccttcactgaattggtaaccttttatccccccgatatttatgcttaactattaagataaatcatctcagcccagtcattgccacaaaggcaggaagctcaggtggaaaatactctggtcatcccatgtgtctgggcatgtgaccttgatgtgtgtttgtgcccatgtctcaggacaagttttgggttaggggagta

SEQ ID NO: 1883225 - DNA, 4001 bp, Homo sapiens
ctctttaagtctgatgagaaacatttacaatctattctctctgaagcctgctacctggaggcttcatctgatcatgaaacactggtctccacgaccccttatcttaaccagacattcctttctattaatgctaagtctttaaaaaataactttttttttttttttttttttggagaagtgaggtctctctatgttgcccaagctggtatctaactcctgggctcaaatggtcctcagcctccccatggcaaggattatagaaatggcccaccatgcccggtcaacttaactctttcaatcaattgccaatcagaaaatctttgaatctgcctatgacctagaagtccctctgtcacttccagttgtccccacctttctggaccaaaccaatgtccatcctgcaagtattcattgatgtcttatgtctccctaaaatttgtaaaacccagttgcaggctgaccactctgggtacaagttctcaggatcttctgaggccgtgtgacaggccacagtcacttagatttggctcagaataaatctcttcaaacattgcacagtgtttcactctttttgttggcaaggggacaacatgggtgaccaggaggctgcattctttgagcaatggccaacaggctcaacggctatgtcctcagtcccttcagcccaaaaggccacccctccctggggcagagggctcagagcccagctacgacaaggtgacacttcagggacaagtgtgagcaatgctagggtgttgggaataggcccccaaaatctggccataaacaaaatctctgcagcactgtaacatgttcatgatggccatgatgcccacgctgggaggttgtgggtttaccggaataagggcaaggaacacctggcccacccagggcagaaaaccgcttaaaggcgttcttaaaccacaaacaatagcatgagccatctgtgacttaaggacatgcccctgctgcagataactagccaaacccacccctttattttggcccatccctttgtttccctaaggggtacttttaatctataatctgtagaaactgtgcttatcactggcttgctgtgaataaacacgtgggtaaatctctgttggaggctctcagctctgaaggctgtgagacgcctgatttcccactccacacctctatatttctgtgtgtatctttaattcctctagcaccgctgggttagggtctccaggaccgagctggtctcggcactgggggagctgccctgataggtagtgagctccctgtccctggggctatcaagcagagccaggtgccgccccagggagctccttctttgagggcggtccagaaccctggaaccccagcccaggcccaggcctgaatccggagcttgtttaacccagcaattccgggaccccatccccggtcgctggcatccgctgtcattcgagagcctggggctgacggggagagctggtccggccttctctgggccgcctttcctccccagcctcgtcaggaaggggcacaggacagccgagctgtgcgacagcccgctgggcctgcgccccagggcctccggcgacacttggagtccgcagctgagtcactgactctcacccgggctcccccgcttccgcccggccgtgatttgctccggtttcaaaagggaggaagggcgggaatgctcgggaagagcctggggttggcaggacctttagggggtggaatgaatgtcgtgagggcgagtaaggaggtaccggctggggctgaaaatgcgcacggggaccatgagcgtgattcgccctgagccgctgcgaacgccctgcgagctggggtggccctggaggtcctggagcagaagctaggttcccgcagagtccgctgcagcgccgctggcgatcgggctgggtcccattttccacgaaaagtcccgcggcttcggccgcggaggtgctggagcctttgcgctcagacgaagggccgaacggccagggccaggccgcgtcttcagagcctggcgagggtctcgcgctgctgggaaggcggagacgccggggcgcgcgtgcaccctcgcgcctgcagcgccgcgcacggccgccaggtgccgctgtggcgctcagcgcgccgcccgccccgccccagggaacgcgaaagtggcgcgggcctggacggcgggacggaccacgtagggcgctgagaaggtcgcgccacggtgggcggggctccgggcccctccccctcggccgccctcgcgctgtggttcgctccgggcgcgctgcgctcgtgagttcccaggaggcctggcgggcaccgtaaccagcgccgcggacaccggcaccggcgccacggactccgcaggaccccgcgcccgccgccgccgctatgctggggctgctggtggcgttgctggccctggggctcgctgtctttgcgctgctggacgtctggtacctggtgcgccttccgtgcgccgtgctgcgcgcgcgcctgctgcagccgcgcgtccgtgacctgctagctgagcagcgcttcccgggccgcgtgctgccctcggacttggacctgctgctgcacatgaacaacgcgcgctacctgcgcgaggccgactttgcgcgcgtcgcgcacctgacccgctgcggggtgctcggggcgctgagggagttgcgggcgcacacggtgctggcggcctcgtgcgcgcgccaccgccgctcgctgcgcctgctggagcccttcgaggtgcgcacccgcctgctgggctgggacgaccgcgcgttctacctggaggcgcgctttgtcagcctgcgggacggcttcgtgtgcgcgctgctgcgcttccggcagcacctgctgggcacctcacccgagcgcgtcgtgcagcacctgtgccagcgcagggtgagcggcccccgcccctggccccggagcacggcctttgtgggacctccgggggctcctcctagtccctggccccctcccctagggaaggcccgctgcctgcacctctttcggatactgctggagtcctgcctcttaccgctcccgcccctccctctctaccgggggcattcctcactgatgcctttgttcgtgggggttcctagggtccccgaatcaactcttcatagtcgggcttagcgtgcttccctcctgccatttcttaacctggcccctcacggtttcgtgttcacccctctcctctctcctggtactctgttctgtggctggagtgttgacctctctggtccttggtcctgaatataggttggagaggtgatcagttagaagaggttcctaggagttcccgaggacctgagcccccctttcacacagcttagagctgaagggctgggttctggtcacctgggtttggggttgaggtattgagccgagtagctgaaagccttctggcctttctgcagttggagagaggagggccatgcacctcccagggctcgctcctcccagcagggcagaaccgcccctgcagcatggcacctggggccctggggacggccaccaggccgatgtggccagaccagttgccagaaaagttgcctggagcgtccgtgcaggaagccagggcctgtgcacccctggtgtgcccttagggcactgccctctccggtctcggacaggtgcctcccgagcagacgagggtcaacgtctcatctcagtcctgatgttacaggaaagggattcagatccagacctcaagggagggttcttggatcttgtgtaagaaagaactcagggcgagtctgcagcgcacagtgaaagcaagtttattaaggtaaagcggtgaaagaatagctggtccgtagacccagtagcatgttcctgtaagaggaggaacgcgtccaccctaggtgcaatgcttgtatatatggggagatgtgatctgctacaagggtttgtgataaaggagtaattttcttaattactatattttgcaagaatcaatattactattttcttttttttttttttttttttcagacggattctcactc

SEQ ID NO: 1883226 - DNA, 4001 bp, Homo sapiens
tacttcagtagatacttccaccaacaaagacactctcttgcccaaccacagtaatattacaacaaatgggaaattaacatggatataaaactattatctaatctacagatctttttatttttttattttttactttttctggttcaggatcatgtctcttaaagtcctttaatctgcaaaagttcttcttcagtctttgtctttgatggctttcatgtatgtaagagtacaggccagttattttataggctgttcctcaacttgggtctctggcgcttaaaaacaaaacaacagaatctcaacgttttgagaattttaggtgtggtcctgagccaatacttaaataagcctctctcctcaaggttctttccagccaccttacacagattatccttagtgaattagatttatagatggtggtgatagacagtaaaacatttttgtattcagaactgtcttgaattacatatattccaacccctccaccacattttaccattttaatttaacaaaagtaagtttgttgaagaatgagcacatactctttaaacatttaagtcttaaattacctgtagactcccattttgacaatctcacccctgcagtgatgacctatgccctaggctcagaagacaaagatctgcaaaaatgggtgttactcattacaatcattcaacaaatatttgttgagtgcctagtatatgtcaggctctgttccaagccctgggaatacatttgagaacaacaacaacaacaacaacaaaatcctcatccttgaaaatctagttggaaagattaacctttttttttgagatggagtctcactctgttgcccacgctggagtgcaatggccagatctcggctcactgcaaccccccgcctcccaggttcaagcgattctcctgcctcagcctcccgagcagctgggattacaggtgcgcgccaccccgcccggctaatttttgtgtttttagtagagacggggtttcaccatgttggtcaggctggtctcgaactcctgacctcgtgatccgcctcggcctcccaaagtgctgggattacaggcgtgagccaccgcgcccggcccagaaagattaacttttaaattaaaaaaaaaaaaaaaatcagaaaccgggattagacttcccttaagtcattcatgccggaggttgcaaattctttttgtgaaaaatcacaccttagcgatgaccttgagcagtaggatgtaaacaactcccacaagcttagcgttccaataacggaacacaaggcataaactaaacaggaagaaggcaagtctgtgtgaatatgttcaactccaagactcaagattctaatgtggatactactgcggaattcctgttaaacgcgctgatttaataaagtcttcggtttatccaaacgggctacacaaatgattaatccaaactccaaagacctagaaagaacaggcggggccgggtttcctcaagtgttccaaccactttttcagcaagagtcacctgcttggcgacgagcctccggaccgccccgcgctatctgttccacccggcgggggccacgcacggggttccgcgtccctgtgaggcggcacctcctgggcccagcagagctgagcacctgggaaccgcgcaccgagagccccacggggaggtggttagggggaaccggctcctccaggcggcctcgcccactgcaatgcaatctgggtggtttttccaggtccctccctgcctcgttccgcgcccagtccctgcccccgcgacgcccgagggcctggacgggtagctcggagttaccggggctggggaggagcgaggctactgcagtaagccagccggaacccatttatgactccgcactctgaagttcaggacagggaagcacccacctctggaactcaagcagtggacgagggaggtcccgagcgccgtcgcagcgctgcgagtgtgggaccctggccttcgcccgctctcaggggacgagagctgccacctgtatcacgggaggccccgcctccgcctgcaccttctcctaccaggaaacgagacggcgcgggcctcgggctcctctcccccctcccgggagctgaacccccactgggaaagccaggtctccagcttcccttgacacgcgtcttgaaaggttaccggatttgtacccggagtgggttctgcagggataggtgcatggttgcccgtttcacatcatgaatatgaacggggctggacacctagagccgaattattaatacttcagacagaattctgttcccaagaacaaatcgctttgagatataaaacccgagaaaacttcacctctggcgcttttctctctaaaatgtcaacaagacccaacaacatactgccaccgatctggtggctggggggtgatggttggggtacgagcctctgggcagaccaagctgaggtggagcagggaggttgtttgggagcttggtcaagtcaacacactccaatacaatgccaaaagcatgagcagagggaatggggtcagggcgcagaacctgggaaaaagcctgcgtggcccgatttaagaaaatttttattaggcatgcggatagatgcttttcatttggggcccaaggcaaataaaaggaaatgggccccagctctggaggatgttccagcttcgaactagcagccaggaccaaaccagacatagcattcagagttgacagaaaaagaagcgggctccattgtgcctgagtttccttgcggggtcccccagctgctttgcgcgcgataactgcgtcctggggagtgactaggtggttgggcgtccagcccctggcgtccggctctgccgcgcgcggggttcctctccggaaggtgggcagcgcggcgggtttgggacgagcgtgcacccgggctccggcccggagaagggggggctcgcaggatttctcctgctgtttgcactgaaagttgtgttggctcaggagctgcttttccggggatctgcagttgcccccgccacctcctggctgcggttggcaggtccctccctcagcagttcgtcctccgcctgcgccgcgccctgggcagctccgcgccccgggcctcacctctggcctcctttcgcctccctgcacctggccttttcgcttgaccgttcagaaccttcggcttcgttccctgcagccggtattctccgagcccccctgcacctctcagttacctccagtgggaacccctccccccagcgactccgagccctttacctctctgagccctttccccgtctggcctcgtctaccctctgggtgtcaaccgcctcttccctgcccctcacgtctccccctcctcctcccctgccctcgcctctccattcatccagccattgtctcccgccccttcctccccctcccgaagcggcctcctcccccaccgctgccacgtcgtggtttgaaggagccaatgggccggcgccgccaggtgtctcttacctgcaccacgtgggggagggggaaggggcgggcaggtaaagccacatcccaaaacagaaaagctttcagccattgcgtgcctcccggggggggcagccttgctccaggctttttgcatagacgcccgggcaactgaatacaaaaagggcaggcctcctgcgccctccttcccaccccccttcctgccctgggcgtggagcaccgaccaggtgtgggcttgggtggttggttaccgccttttgcactagcagtagcaaggaaggggggtgggcgctctttctttttctcttagaagagggtttagcacaggttttttcgttctcacttccacaccaccttaccgcctcccgaccccccctctccccctccccacctatcgtcatgacggcctctccggattacttggtggtgctttttgggatcactgctggggccaccggggccaagctaggctcggatgagaaggagttgatcctgctgttctggaaagtcgtggatctggccaacaagaaggtatttctccacattttc

SEQ ID NO: 1883227 - DNA, 4001 bp, Homo sapiens
aaaattatgcaacagaagacattctcaaatcagtctggtagacacaatctacctttgaaatctcaccactaggcacaccgatgcaggtcatgctgagctactaatttttcctgaatatgacaataatagctgtgatggttaatactgagtgtcaacttgattggctcaaggatgcaaagtattgttcctgggtaagtctgtgagggtgttgccaaaggaggttaacatttgagtcaatggactgggaaaagcaaacccacccttaatctcggtgggcaccatctaatcagctgccagagtggccagaataaaagcaggcagaagaacgtgaaaaggctagactggcttaacctcccagcctacatctttctcccatgctggatgcttcctgctctcaaacatcggcggactctagtttcttcagctttgagacttggactggcttccttgctcctgagcctattgtgggagcttgtgatcgtgtgagttattacttcttaataaattcctctttatacagacatctatcctattagttctgtccctctagagaacgctgaaatacaatggctaatgcagggagagtttactgtgtactggtgactcattcaattgtcataaacagcttttttttttttgtaagcaaaactataatcccaaggattctcacaaaacatattacaaatgacagcatgaaaacaaatttttgcatagtaactcaaagttcacttctacaaaatacccttaaactggcaggacattggtattttgaaatctcaaatttcctagtgaagaatgttacaaacaggcatgtcttcatatatagcaattacataaggaacttatgacctaaagtaaaggtaaacttacttgaaatttaacagattctataccaacttggcaacctctcccagggtgaaaaccagttggatttctcaaaaacctctaatttagtttgatgttgcagcttttctttttatccattggcttgtgttccacagcaacttttaccacttgcttaactatagctgcatactatatcacagctatggaaaaaaagtaaatcttagttccacttttgccagttttgtttctgtattttttaaaaaattacatttctactaggcagaatttagaggtttattatcagtctatgcataactaaagttcaaagcaaattcgattttgcttaagggaacatcataaagtagcaattcttggtgttacatgcttcacagaatctatttcaaaccacagagaattgcacctttgtgtgtcactgttcccaaaggcaaacaaatttgaaaagttaaaacatatttaaaatgtaccatgcttatgaagtctcaaacaaaacttgagttttctgcacatactctcgtcaaatgaagttatttcctgcatacaacttctcttgcaaactggtcttctatttcctttcattcaacttaaactgactgagacctagagaaggatcgggacggcttgtgatttctctcccaagacagtgatctctgtgttttctcctatctctagaaaagaagatactccccctgtgagagaagcttttccttcttggacatctgcggagaggtggaggactcctacgatgatcatctcgagggtgacagtcccaagagataggtgggccatcatttctactcacagggcagctacacagcgatcttccatctagctctcatacagcttcagccgcatcttgggttcaaattcaaaaaaagctaagtcgggaggatttctagcaacctacacacttcagagtggtccttagtagcgaaagcccattccaattaagttttgttgccatttttccaagataacctagataaactttaccatccactgaacagaaatcatgatgcatttcaagagctagggtaaaaagtgctgaggctcaaatctgcatgctccaaaggaccttcctgcttccctcctgcccaactcccactgatgctgttgcttaccaggcattcaggaaacagcagataaacagctctttgagggtagatgctattatgatccttattttgcaaaaaaaaagaaaaaaaagaaaaagcaatgaaggcactgaaagaggaagtaacttacctctggtgctataactggtaagtggctgagctggcatttcaaccaagcaatctgtcacagcatctgtgttcttaagcactacactattgtcttgtgactttgcccatcctgttccccctgctcttcctcaccctgtcagtccagcacaaacatattcatgcttcaatacccagatcaactaccacatccctataaagcctttgtccctcccacagagagatactttgatgtcacacatctttattctttcactcaagttgaattctactgccctattaagatatagattacactggctcagatccccagtttttcagacagtgggaatccaaaacccttccccagtatttctatgcattcctgggaagactttgaatgtgatgggtaattttatgtgtcgacttgactggaccacaaaatgcccagacatttggccagaggatgttctgggtgtgtcagtgaggatgttcctgaatgagatttacatttgaatcagccaggagggtggctcatacctgtaatcctatcactttgggaggctaaggtgagaggattgcttgagcccagggatctgagaccagcctgggcaacatagtgagaacttgactctacaaaaaaataaaattaactgggcatagtggtgcatgcttgtagtcccagctacttgggaagctacagtgggaggatcacttgagtccaagaggttgaggcttcaaagagccgaggttgcgccactgcattctagcctgggtggcagagcaagactctgtctcaaaaaaaaaaaaaaaaaccgaaattgaattagtagattgggtaaagcagattgtggcccctaaaatgggtgggcctcacctaattgactgaagtcctgaatagaacaaaaagactgagcaagaggaaacccactctatttgactgcttgaactaagacactggctttttccttgccttcagactcggacagaaagcattggcaggcttcagccttcagactagaacttatgccattggctcccttgggtctgcagcttgctgactgcagatctggggacttctcagcttcataataaatctttgtatacatacacacacgcacgcatgcacacatacacacatcctattggttttgttcctctgaaaactctaatacaataataaatatttatcgtgtagtaaataacaaataatactatgggtgagttttcgtattgatttaaattactcaatgattataagtgtatttaggttgttaatctatcttgattgagttttggtcattcatgttttagaaaaaattgtccttaaaattaccaaatttattggcataaacttcccttatggcttttaagatctctagtcttctataattttagtgcttatttattcctaatattgtttatttgtatatttctccttttttcttgattaattttgtcaatagtttgtcgttgtattaagattttcaaactggtgttggttttctatttcatgactttttacccttttcaaaaattattttcttaatttactttctttggattttttctattgttctttttctaaattttgagttgaatgtttagctcattgattttcagtcttttttttttttttagacggagtttcactcttatcacccaggctggagtgcagtggtgtaatctcagctcactgaaacctccacctcctagattccagtgattttcctgccttagcctcctgagcagctaggattacaggcgtgagccaccgcgcccagcctgtctttttttttttttttaaactactttatagtatcaattttcctctaagcacaagtttttatttgtagaattttcttgttacatgttcagttctaaataattaatatttttctttaagatttcttattt

SEQ ID NO: 1883228 - DNA, 4001 bp, Homo sapiens
agctgagccttcatcttcatcaggtatcaataaggcagaacgaagtggtgggaggcaggatcagttagcactccacttaccactggtgtgatcagaaactagtggtgagctaaatttctaacccacttctgcagcaaaaaaggggtaaagctaagtataaatatccatctgactctcacattcacactacacatcaacagggcaattgcttcaaaaaaaaaaaaaaaggataaatagaatccttagtttcataatctaatacccaaaatgtccagcatacagtaagaaactcacaggaaaattacaacttgagtgagaaaagacaacagacagcagcacccaagtgaatcagatgttggaaataagtgataaggattttaaagcagtaattacaaaaatatttcatgtggcaatgacaaattcccctgacacaaatttaagaaacaaaaagtctgagtggacaaacaacagttatacaaaaagaaccaaatggaaattatagaactaaaaaatataacaataatacaacctgatgattgggtttaatcacagaatggagatgacagatcgaatcaatgaatttgaaaacagatctatagaatttttccactcttaactatacagagaaaatagactgagaaaaaattaacagaatatcaagaacctgtgaacaataccaaaagatctagcatgcatattatcaaaggcccagaaggagatttaaaaaaagaacattattgaaaaagtattccatgaaatgatgactgaaaagttctcaaatttgcagagtagagttttgcagtccttgggttttcagaaattaagtatagtctacttactaagggctttgaaggctcttggtcttgtttaacctaaatttctagaagataagcagggtaagtagggagattggtaggaggaagatggcgaggatggtaagccgggggagaagtagtatgggctttgtgttttcaaactgtcactttatttttacattattggatatggggaataatgtgactgaagtagaatagattaggcatatataaaagtataggttgagtagggttataatatctataatagtgggaatgacaaggttgttatttttttgtaaattcttgaatgataattcatttaggtagaaaactggttaatgctggtaggcacttcaggatttacacttcaggaaatttagctaacttcaaataggacaaatttagacaaatatgccaagatacgtcacaattaaattttcaaaatgtaaaaacaaagaaaaaccttgaaagcacccagagagaaacaacatgttacctattacagaacaaaagacaacagatttctcatctaaaaccatggaggccaaaaggaaggggtacaatatctttcaagtacaaaaagagaaacattgtcagctaagacttctacatcaggagaaaatatccttcaggaatgaggaaaaatcaaaatattctaagaagaaaaaccaaggtaatgtatttctaatacgcctaccctaaaatagctaatgtaagttctttgaacaggcagtaatggctattgtggaccattgcttctttttgccctgtagaaagattcattggaagaataatatacatacattttgtattgaacaatgatgttatttggaaatcctggctaagatttttttgggatcaatgctgaacatttcaaaggatgttacaacaagctggaaagtatgagttgtgggtctagtcctggtttcccactgctggtctgttacagaaatgtggtcctactgtggagcctcagcataaatactcacagaaggagatccaaagacagatgacagagcctctcagtatttgactccatccttgagttgatatggcaccaggtagaaatcttctctaatttcccccaacaagagaaggaatattacttagaaatatatcttggagtattcttctagacagaacgtcagtgatctgagatcttctgaagctcagtccaggactattctcctggcaagaaaaggagagtttgatccatcaattttgttcaaaaagttcagaggtgagggtggaggaatagtagtttggggtgtggaggaatagtagtttggggtgtggaggtgtgattaaggggaaaaaataacttttccattattcttctgtctgaatattcaaagtctggaacacatcaaaagcagttaaaaataaaatggattgttatacttatctgtcatcccaatgcagtttccatgttatttaaaatagcaagttatctttgggtgacattagccttagtgatgtgaattgcagttttctttatgatgtcagggcttaactatttagtaagtaggaggaaaactatctaacagaatgcaccttaataggaagaaaatcagttgaactgaataaactaacgtttacattccctccgtctctatttttcatctaatatcacccccatgctattagagcctcagccaaaaattgggttttattctttctggccccatgatttcctttcagtaagaaatgttcagactaagacacattaataagtgcaaataaatttagctagcatttgcttggctgattctcaaagaggatcaagaaaggaaatggagaacaccgatgataaactattcaacagagcattttgaaattggcaatgttgcaagaacagtattttatggtggttcagatacataatatgttttatagaatgttcagaaaaaaataaaatgatcaaaccgcacccttttaggtatagatggaatggcaagggatttatttgatacacagtaaatatttgaaaatgatttcaatttatttcaggaagagtgcagataagatttgttgaggaaaagatctttataaggcacattaaaatatttggagttagattagatttcatttgtgatgtaagaaaaaaatacataatatctttttcatatttaaaggagttatttaatatcagtaggtcgacggctgctctagtgtctcacaattgtcaaacttgtattatgcatggggattacaagtgctttattaaatgacttgttaatattatcctccctcaaaaaggatttgtagtaagaaacgactgccactacaagtgaactagaagacacgagtcctgaaattctgctactcattagtacgacgaggcttgcattagaataagcacactaagaaaaagtaacaaattccaatttcatatttctcatccatgtggaaaaaataaaatataagcctgaatttcaaatgtgtttggtggagggatgttttagaatgaccagtatttttatttgttttatttttaatttgatatggcttttccactttgttttgttctgtttaaattccttaggtcttctgccactcacaatactagagtcctaaataagctaactgacatgatttccaggttgcccaaatagggaaatagtgagatgcttaaataattcgattagtgtagtttattttccatatcaagtaacttaggtcaagttaaggaaatttcacaagcatgaactactagaattttagaggaagtgaatgcagtgaaccaccaaatctcaagggtctgttttaacctcagaagtaattctatcttgataattaatcagtgacatagttaagaattcaaaagaaaatagcctattttgccaagagtgtctgtagatgtttaaattcaaataaacagaaatagcaaatgacccaaagacagtagtcttcaagagcttctttggaattcacaaaaatatttcctttaaacagtgctgtatttagactagccatttcaccttggaatatgagttaatgaagaaatgatgagtttaattgttctcctggtttagctgagtcctttggattttatgaactagaaagaaacaatgtgacgtggtactggacccaaaggtttactcttttctctgtttaatgtgactcagcctgttttcaggaagagtaatcttggatatggaaagcctatcttcaggtcaggta

SEQ ID NO: 1883229 - DNA, 4001 bp, Homo sapiens
cgtctgttcccttttgtggtcaaatggacctttcaaaggtttcccaaaccacttctcatgaaccagtgaatattcaaaagagagctagaaatttgaagcctgtacaaaaacttatccctataacatatgtgccataatatacaaacttacaccttttcagtccttcacatctacctctctgaattttcatgaatttctatttcacaagggtaattattttaggtacactggcagcagcatacaagcaaatatgtagtatgaaaacaattctcacaataaagtgagggcagcagaatttggttatgtgtatgttcttttttaatgacttttttttcgtagatatgaccacttgctttttcactttaaaaaataagattctgagaccaggcgtggtgtagctcacccctgtaatcccagcattttgggagaccgaggtgggggtatcacttgagctcgggagttcgagaccagcctgggcaatgtagcaaaaccccatctctactaaaacaaataaaaataaataacttttttttgaaagttgagtgtggtggtgcatgcctatagtccctgtagtcctgactacttgggagactaaggcaggagaatcccttgagcctgagagattggagctgcagtgagctatgatcgtgccactgcacaataatattaaaaaataagatcctgggctgggcatagcaacctttaacacctggagtagtagccactctggaggctgaggcagggagattgcttgagcccagcctgggcaacatagtgagacagcatctctaaaaaaaaacaaataataataataagattttattgatgcctcatttgggtcatattatagttaaataaggagaggcaacagaaaatcaagggttggaaatgccctcactttactgtgagaattgttatattagataagaattacttaaatagttgagtaacttcaatcttgataagagtgactaatgtagaggaaaattttttgggcatagcttggtaaccaaaggagttcatgagctagtatagtaattatattttccaaattcaaattggaacatacgacctcataataatttttaaaatgtataaatttattggtagaaaggtacttggcaaagatattaaaattaaatagcattcaaggatgttttaaataaatcacctttatagataaaatatagaactacagtatatttgctgataattctggaaaatacagtgttgttgatttaaataacaataaaaaagaatttggagttgctggtctctgatttctccaaagaaaagcttttatagctttccagacccaacatccttcctgaaattcactcacctccttctgcttctgtctgaaatccatataggagaggaaacacacatttctctccagattgaggtaatgttcttaagagcagactgtcagtcaggttctgagagttcaatttctagaggtacaaggaagccacttcctatattacctgtaattttagggtcattcacatggagattctgggctctcacccttttgcttgcctgaaatctacccttctaatcatttgcttaccctccaggggctgcttagtttcagcttgagtattctctggtgagtaggcaatctgctattttcatgaggggtctggaaattcttcactggagtatgaattcctccaaattccaggttcattgtccttgcttacgacctttagccccagttgaagacatttcccgcagttttctgcatttagcttcaggaccctctgccaagcccagtgctacaaagtctttttgacttgggcatccctagtcagctctatccctggattagtgtttttctctttttcctacaataaacatagaaatgggagccagtatattagctcagtgaaatctcaaggtaaacctactacgcttcctttattgcccatcaataatcctttcattttgtcatgttttcttgccttttcataccctgatagttatctgtacttaaaggttaaatcgagcttttccactcctcattttttccccttctattctttgatcctacattgaaatcataatgctggacttgtgacgtcactctcaattgtttccagatggcttatcagactgatcaaaaagaaggtgaagccaatatgttagttaaaaagtagatcttcaaacagggagatggttcagaaaaaaaaaattgtgtaataataatgttgagaacacaaaacaactataggtaaagtaaattgccttttctctctgtcctaaaataaaatctttgatcaattgttccagtgtatgaaaatttgaactctaaagagaccaggcagctttctaaacccaaacatcaaaagctttgcttccattagaaaaatttaaacccatgatactttgaatggatttgaaattctctaaaatgagctctaataataaccttcccaaacagaaagaaaaagaacagtaggttatatggcttcgtgctaccattttctctggaacattagttttccaaagatgccattttggctcgtaccaaataaaagggcaaaggttaccaaatgcaagcctagggaagccaggagacagaacagctattacaatggagggggaaatccaagctgtcagctctgaatggatagaaattgcatgtgtgaaattgacaaccagcaacagcatggtaccgtcagaggggccaggaaatgagctcgaccgggatttctgtttactgtattagagctgcggttttgtagagttttatttaagattcacagatacaaatcttcaggtttttgacaactttagtaatgttcagtggctgtttggaaaataatctaaacaaataaaatatcagaatgagaatggtagaactgatacaggaaaaaacataaataaagggaaaaaaatcaaccatcatccaacctcccaagagtctctgttaacaaactgttgcatttgcttcctcatacacacattgttatacaacattgaaaccaatttgtatatataactttgatttctgtttatttagtattatgtcacaaatatttttccatgtcatgaaaatgttttcataaccattgtgtttatagagcattctgtcacatgaatatacagactttaatttacttaaccataatcaattcaactactaactctttcccccaattttttgtcccattccagtatttttcccactgagcaactagagtgatctttcaaaaacttgatcttgtcactctcctttttaaaaccattcaataacttttctttctcttagaaaatattactgtccttagcaggccctttggagctttatgtccttgctacttcgatgtggttatgtccttcgtatcacctgggaatttgttagaaatatagaacctctactccctctctgaactactgaatcagagtctgaatttttacaagatcacaggtgatttctacccaagacaaggactgagaaggtctgctcttcactcttcatgctcctgtgttgcccccaccagcctcaccagccttctcaatgctttttaggatccagcagagacctagcttcagtgcctcactcaaccacgcccctttcctccacaaagccttgccaagtgtatggactaaatgtgtctgttcctccaaattcacatgttgaaaccctatccctcaatggaatggtatttggaaatggagcatttgggagctaattaggcttagattaggtcaagaggccagggtcctcatgatggaattagtgccctgtgagaagagacaccaaagggttctctctctctctttctcttccatgtgaggacatagagataaggtagctgtctacaagccaggaggagagtactctcaccagaacccgattatgctggtcccctgatcttccagcctctagaactgttagaaaataaatttctgttgtgtaagccacctatgctaccagattttgttatggcagcccaagatgacaaatacagcaggtacgtactatgctctct

SEQ ID NO: 1883230 - DNA, 4001 bp, Homo sapiens
agtccaagttccaattttttgttttgtttttttttttttttttgagacgcagtttcactcttgttgcccagactggagagtgcaatggtgtgatctcggctcactgcaacttccgcctcccaggttctagagattctcctgcctcagcttcctgagtagctggattacagccatgtgccaccatgcccagctaattttgtagttttagtagagccgggttttctccatgttggtcaggctggtctcgaattcccgacctcaggtaatccgccctcctcggcctcccaaagtgctgggaatacaggtgtaagccactgcgcccagcctccaatgtcttcttgatgtcaccctaatctaccgtttcaatctcatttgcaaccatgcccctatgctggaaccagaaaggctattcacaattctctaaacccacccacttctgtgccttctctcatccgtttcccttgcctggaacactggaacatctactctcaaaatcaccaaacaggcgagtttggtgaaaaaggaagcacctttgtctagaaaggcttttctcaaaatcactctttacctttccccagcagcctttctctcacttagctgcaatcatctcttccctccacttggtccttgcagcattttatttgtatcagccaacaatttattttgtattgctgtcttatttcccctgctagattgtaagcaaggtttcaaatattgtattcatctctagtttttcttcctccaccagagagggtctagtgaatggctgtgttttcaaatgttctgaatagaacagaactttgaagaaataaaagacagagccaagatatagccgagcaaaataaggaaaaacaaaatcaggaatgcgtccacagctcctgattctaccgaatactctctcatacagcctcgcaagataccctgcttttccacacaggaaggtcgctttcttcctttcacatttgatgatttattaatcaaccacagtgctgctcaaagtacacagagggttcggaagaatgaaagggaaaaaagtcagggtcttaatatcaaagatcttaacttcagaggggtgtgtcaacacatattccatttgtgctatgtgttgcgaagcgtagcagcacgagagaactcggggtctctgatcatgatcattagtgctgaggcatctaaaaaagatgaaaataaattaaaagctatgtaggtaatcttagaacccctagtaaaaaaaagtctgttgtggagtagaaaaattaaaacgaccgcgaaaatgagacctaggggattgaagtaatgtgcgcttgtaacatcagtaatcccctctccaacgcgggtcctgcttgggactgactccaccaatccttttaaaaatgaagacataaaagccatattcctttaaaaaatttccactgcaccgtattgcaacgttcgagcactgaggacattttcacgtggtcacaaccctttttaacacccggacactgggccggtcctttctggccacgaggaactcgcttccctaaaggagtaccgcatcaccgagggcgggcgcctcagcccgggaggacactccccagggtaaactacaggcctcacaaagcggagggagctggacgcgaaggctcggcagcggcgccgacaggcttaccccaggcccactctaggccgcacagggttcgcgccacctccggcccaggacagctctcagacgctgccagcgtggagctcgacccggctcacaatgcgctgggccccgcagcgtgagcgcaggcgcccgagaggcggcgggggtcgggcggacggcgcgctccagccgagccgcctccctctctcggcccacacccgcgcggccgcccttcgcctgccggggagctgcgggtggctggagggcgggaagcgaccggccagtctgcacctgcatgacccggtcgcgcgccgacccctcccctctctctcccgggctcagtcctccttcctcttccgtccccctcccttttctccgggctgcaaccgggttccgccccgctcgcgcggctgcccggccagctgtgatgtcaccaggccacgccccctaatataaatactggcgtcgctggcgccgccttctcacactttcaggctctgatcgcggccgcagtttttccttttttcttctgccgtcgccttctctgcctcttctcatcctttctcgctctgctgctctgcagtgtgacgagtccgaatcctcttcccacccagcccgcgcctttcttcttttgcctgcgctgttctatttctccttcggccgccgccgccactgctgcacacagctggtgtcggtgccgcgcttttacccccaagtcgttcccgcagcctatggcccaggccgccttgggtatttctgctcaaggtaaccacatccctctttaaaaattccgccgaaaaagagaagacgctttacccgactctttgggccgttatctcacgtgagtaccgagccgaggagcgcgggaggggccaggacgcggggctggccttggggggcggctggggggctccggctgggccccgccgcccttaagacgtccccgcagcgccccgcggccggccgcctcgaacatggcggcggcggctgtctgtgcccccggcggcggcggcggcggcggggctgggcggcgggccgcgcctcaggaccttcgggcggctgctggacgcttggcggagccggagccgcagcagttggggcgagggggcgtgtgccagtgggggagcgcgcgggggtctcgccgccgggggtcgccgtcccctcctggcggcgtgcggcccccacccctctcccgtggtgcattgctgtttccggggagggggcccggccgcagccctgaggggccggggtcccgcagcccctactccgcggtgcgccgccgccacctttgcctcccgaagcccggcgggcgggcggcgctgtgggctgcaacggctggggtcctggttatgaatggagcggggcgggccccgcgccggcctctggtgacagctgcggaggaagtcggattcctggggggcgcggggagcgcggtccccctctggtggaggaaagttgacgccacttggggcctggcggcggggaagccccggtgtcaggtagccagcgagaggcttttggccccttctggaagcctcgaggctgctgctccgcccctgcggcgctcctgattgggtcaagtcgccttcactcaccccagtcacctcctggagcctgaggattagtcaccatggcttcgtttttccgtccgcgccatggttcctaggcagaaagagggagattggtagacgggtggcttatcaactactgtcttgactgccaacagttggtggtggtaacatgttctaacccttacacggtatcctgaatgtgtgtttcgtagacaaagctgctggttcagaaacccgaaacagtcggggacacagtttaccgcctcatgtttcagcacatttaactgaattttgtggtggcatcttggttatattagttctgtgtcccgtcgtgtttctatcgtgaattcccagactgggtgggaatctaaggactcaaaggagggggaattgccttgtgctcagcgaaggttgatgtagaggtgcatcaaagcacaaagtagaagtacatcaaagcacatcaaatacagcaagggttggcagaaacatggctcatgattgtctagaaaggccctcataattcattaatttcttttacatatacgagagcgtgcagatgctgatcatgattagaaataagccccaaggagtttaggaaagactccaaaagaaaatgattatcggtggtgataagtgaggtcgagtagtcagtgcctttctcccccaaggttttatcacatacgttttcaaacagaaggtgaaaaagagttatacttccacctagattctgtaattaacattttaccttatttgtcgatgcatttcaaagtaaagttggagacccctccaactttagtatgtgcata

SEQ ID NO: 1883231 - DNA, 4001 bp, Homo sapiens
gggaggcagaggtgggtggatcacctgaggtcaggaatttgagaccagcctggccaaggtgttcaaaccctgtctctactaaaaatacaaaagtggcccggcagggtggctcacgcctgtaatcccagctcctcgggaggctgaggcaggagaatcgcttgaacctgggaggtggaggttgcagtgagccgagatcgcgccattgcactccagcctgggcaactagagagcaaaactccgtctccagaaaaaaagaaaaaaagatttcttctgtgtgcatggctcagctctgtggtccactagcgtccttcctcaatctgcttccaatctgtggactcaggaaagactgaaccaacctagatttattaatattttagtataacataatacagtgttacttactatggcattgaccgtatatgcccttttgctccttggaggaaagacaatagctattatgtgagttaataaaataagcccaggatttatcagtataactaacctgttcccgttggtttttcttgtctccttcaggcagagagctgatcaaaacagcaaaagcaaagcagtgcccctggcccagttctgaagccaaccttccttaatcacccagacccatccctggttaggacttgctgtggattctcaggtgactccatctcaggatacagggactgagaaggtgtatgcaacatctcagacccagaaaccgttgattctgtctaaaaacacagcaataaccacatcccatcctcttgatttaaatgaaagtgtttggaggaataaaagatgaacctttttttttctttgtcagatcttgcgctcatttggttctggtggggaacaacagctataagagaacaagtgtattcaattagaattaattcccctctcttattctcatagctgagcagggctcaagtgcctctcatctgaaagaggtaataagattttatctgtctcctcatctaccttttgcaagtatacttaacaaattagctctcgggactcttccaaatggagtttgatgaggaatttgctaaggtaaacgttttagactttgaacacagttcagatttcaggggcagtactgaaatctaagctgtgttgctaactgccctgcctttcaactcaagacacaataactttgaactaaaataattatatttttgttgttttccactctgtccccacgtctatatcaccaccacccccaatcccaccccgcaggagttaactcctccttcctgtccctgcaagatcaaaactcctcctgcaagccccgctagctctgtctgctcaccttcgtggtagatatcgctatcgtacttttatcctcatttgtgtgataagtacttcaatgtccacttcttccacgagcacctgagcccctgaagggcctggaccacacctagtttttctcaccgttacatctcccttgtcaggcacatggtaggcgcttaaaaagtatttgatgaacgaatggcttgtttggtgacagtccaaaggctgggggacagagggaaagctccctcctttcgggccccagacgggtggcgctgatggagaggaggctaggataaggcctccaggaccgaagcatgcacccgtaaggcccctgctgaaaagaccttcctgaaggcggaggaactgcgagagtgcctacgttagcccaaggcctgacccgacgatcccagggacagtcgccctaactggccccgcctcccgggccccaaacctggactcggccccgcacgaagctccggatcctggggcccgcccctggccccgcgtcggaagaccatgggctcgctcttgggcctgcctcaaaccctccgcaggtaacgcctcccgaacttgagccacattccgatcccctcctcaaacccctccccgtttcccacaccctggacccctcgctccgtctcggccccgccccaagcccagctaggtctcggcccctgagcccagccccaaccggcctcccagtccctgggtccctcccaacaccggcccctccctaagctccgcctcccagggcccgcctcctgagcgcagcccagcccggactcggccccgcctcccgggccctgggcccctccccaagtgggcccgtcctaagcttcgcctcccagagtccgcgcaccgcctggccatgtgctacgacatagtcaacgccccgcccctgccccgcctcctgagcccttctctgggcctggccttagccccgccctaagacctgtctcctgggctctgctctgggtcccgcctcctgaatccaatggcgtttatccgcgccctaatgcccgcctccaggactcttatcctgcccccacgcaaggcatcgcctccaggacgccaccaacctggacgcttccgaagcccagcttccaggatcgccctatcctggccctgccccaggaaccgccaacctggactctacccaggacctgccccgatgtcgcttatcttggccctaccccaggccccgccctcctaacgctcatcttggccccgccctagagtccgcccccaggacgcacctcctgaccctatccccaggccccgccccctctctgcccccgcgcactgccctcggcccgccccctcttcagtccaggcccggcttcctccaggtctcccggcaacggctgcggcctcgcccacgttatggcgcccgaggagaacgcggggaccgaactcttgctgcagggttttgagcgccgcttcctggcggtgcgcacactgcgctccttcccctggcaggtgggcggcggggcgagcggagaggcccgcgggggtcgcgggagtccaggggcagacgggatgggtctccgtgctgaaacccccggcgctccggccacgtgagttcctgggctctcctcggtcagggccgcgagacccggtccccgtccctggggcctggccagagtcgctcgcaccccttctgccccgcgagctggcggcggaagctgggggcgtctccaccgccttagggggtagacgcgcgctcggtgtggggtacggttcacgatcattttcacgactttttaaaggcagtaatcgttctggtcactgggacacagctgcactcgcccattctaaaaagtcagcgccctcaggcccgcgggtaaccacctcctcctgagcgtggtgaccaggtcacaggctgtccctcgtgcctcagtgttctcatctgtatgtcgagcactgcacagaatcggctcatgcgctgaggctttcacgcctgtgatggaagagacagagaagggggtggcctctcctctccctggggacctgccattctcagcacaggcacatggcaggcagcagcctcccttctgccagcagaggggcttaatgcaccccgttccatttgtaattcatgtgcattgagctcactggatgagtcagttgggatatatattcctccctgggtctgccccattttatggggtgttgcttaatcatttgcattattccattgacataaaatatttagcactcagagatcatttctggtcaggagaaatgtgtgcatttttaacccaaaatagaaaccttcataaaagcatcataggtctccattcaatattgactataattgttcacatgcccacactgaatgctaacttgggctcaccctcaacacccaccaggtgggtactattattatcactcacatttgaccagagggattgtttgattagggtgaagtagttgagagttcagacccaggagacagcctgcctgcttcgaatcctggcccaacccctggccctgtgtgaccttgggcaagtgactgtatctctctgtgctattgttttcttattaataaaatgggggatataatgatacctacctcttagggttgttctcagcattgagtacaaatgcctgcggatcagtgcctggctcatggtaaatgcgtgtcggtgttagctagtgttttcttcagtctcaaaatgtttaataaatgccttccgtgagccaggcaccat

SEQ ID NO: 1883232 - DNA, 4001 bp, Homo sapiens
ggaggtaactgaatcatgggtgtgggtttttcccatgctgttctcatgatagtgaataagtctcatgagacctgatggttttataaaggccagttcccctgcacacgctctcttgcctgctgtcatgtaagacgtgcctttgttcctccttcaccttctgccatgatggtgaggcttccccagtcacgtgaaactgttgagcttattgaacctctttcctttataaattacccaggctcgggtatgtctttattagcagcatgagaatggactaataccctccagttacctgcacataccccagaggtctctgcagccacaggcttgccaaaagtagagtcaggggctcctcaccaaggcctgctctctgattggtgtggccgtggcactgacttccacaccgggctggggtgcaatgcatgtaccttaaagctaatgaagcttaaacttcaggcccccattcctggtgccaagagggagcattttgtagtcataattttgttctcccaaaagtaggatcccaatactgacatcatttaattgaaatgagctctctaagcagagattctgcatttaatgttgcagctgaggaagttagaaaggcctccagcggtttgcctggttggttggctgaaatgtggaccaaagtgtggcccacagtgagtgagtagaaatgctgaccctgcctctgttgtgtgtagaggacagaattcaaaagcttagggaggttggatgttagagtggatcttacctttaagacctcctcacccacgctgggaagctcctgaagacatgcctttcaccttgatggtgagaagtaaatatatgaaaggagctccagcctccttgaggagctgtgatcactcttctctgaaggccagacctcacagcaggaacagcagccactgaaccagtaacctgaatgcgaccggagtaattggctccagggtggcgggggccccgtggctgtagtactaccaaaggcaaggtggacgtgctgaccctattggacagtggagtcaaagcagaaatcagtctgactgctgcagacctgtggtgttggctggttgatcatgatgttcctcgaagtgaaatagacaggaagcctactaagttcgtacttaatctgtataagcagaaaacttctaggtcaagcaaacaaaagtctatcccaaatcataaaagcagagtagagtcatgacccctcaatccattcccgtacttgagccagttttatcagactggaagctcttgaatgagggaaaggctgggtaccctcaaggaagcaccctcgtagcctgccagaaatctatactgtattctttctcccagttctccaaagacacctttcaccaggatgagcgtgcattggagaaaaggaaataatcagatcttttggactactggccactggttctgagctgacagtaattctaggagacccagaacatcaaagtgggggcttatgggtttttagcttacgtccatctgaaacccattctgtgctatttccccacttccggaaagcatcatggaaatagatgtactcagcagctggcagaatcccacggcatctgccttcactcttggcaaggggagcaccggtcggtaggactcttggttgaatcagtccagctccgtgttcttcctacagtccagctattggcctagctgcctctttcacaggcaggcttcccgctccactccactcaaggctgcctcactcactccagtcactcctccagtctccaggtctggagcggggtgggctgtcttccaccctccgtgggcctccgtctgcagctcagaggcctgtccccagtgaaacactgggatggaggaggggaggggagggtatcccctgggaggcctgaacgtgctagagggtctgcagcacattcctgggggctgatgtcagagggatccgggctgctggggacagttgtttgctgtgggctctgcactcttcatttagaacgcaggacatctgttcctggagagggtggcgctcactgacggctggaagcagaggggttttcctgagccaaggcaggcggtgaggtctgaccaatcctcgagcagctggtgttcccccgagtatcttctcccgcccctgtgtgggcgtcatggaacatgctgtaagcttccaagtgcaggggccttgcaggaagtgtgtctggagggcagtggttcctggaattattaatagccctcctgagcagttctctgccctgggctgccgctgtggtgagcacgcaccctgaatttgccaggatagtcctcagcaagattccgtgtcattgtgttcacaagcacactagaattgtaacaagtctcagatttgggttaaggagagatgataactgtgtctgtaggatttgcccttcctctgtcttcacaccccattcactctgagacaaaggaggtacttccagggctgctggaccagcagggatgggacctcgcctctgccctgtcttggggtcagcctgcccagcgagtaccctctgctggctccttctggcatcttactgggtcctgccgtgcagggacaagcacacgggccctgaaaagctgggtcgacatgagcaggtagcagggccttcctggacctcctttgtttcagatcccaccatcattcagggcccaatttaaaggcttctcttccgtaaagtctcccatcactccaaccatggaatccctccctcctgtcactcttctttttttttctttaacaaatacagttttatttatttacttatttatttcacaaactcttatgtagctcttcctatctctgggcactgttttaagtgacaagtattaactcatttaaactgtcacaacaggccaggcactgacgcatgcctataatcccagcactttgggaggcagaggtggccagatcaccagaggtcaggacttcgagaccaccctggtcccaggagacctcaacttctccagagttctagcctcttcttaaagggccagagtcatgggaacccagatggggtgagggggtctcctgccacggcctccttacaatgatatgacttggcataaatttggatactacctccaaatacagatttatggtctggcgtgatagctcatccctgtaatcccaacgctttgggaggccgagggaggcagattacctgaggtcaggagttcgagagcagcctggcaacacggtgaaacactgtctctactaaaaatacaaaattagccggatgtggtggcaggtacctgtaatcccagctacacgggaggctgaagcaggagaattccttgaacctgggaggtggaggttgcagtgagttaagatcgcgccaaagcactccagcctgggcaacagagtgagactccatctcaaaaaaaaaaaaacaacaacaaataaataaactgtcacaataatctagtgaagcagatactacttctgattttggacatgagaaactgaggtacagtatcctttttggtagccaatctattacttatcagttggttactgttttagaaaaaaaaaaactgaattacctgcatctatattctgcctttaaaaaaaaacatacaaaggaacactttgcacatgttaacaatacaggctaagggcttccttaggatatggtacagagacaagctcaacctcactgatcttcctgggtgcaggaagcagtagttgcattaccattataatttctattgctaggcagattgtactttgattcagcagatggagtaatttaagactgttttcattgtttctcattggaaatacaaatttaatcttgtatatcgttgggagagtttagcaatcagcttgtactgctcattgacaaagaaaaataaagctaaagaatgacaacaggctgggcacagtggcccatgcctataatcccagcactttgggaggccgaggcaggcagatcatttgagatcaggagtttgagaccatcctggccaacatggcgaaaccccgtctctactaaaaatacaaa

SEQ ID NO: 1883233 - DNA, 4001 bp, Homo sapiens
agtgccaggtacatagcaaatccccacaaaaagagctcctggaagggctctgtcaacagcgtgagtggacagtctcagcagaggaccacctgaggcttgggttggtcacagcaaatgtgagagaccaggaaaaggggtgcatgtgagttctggaacccagaaagtgatcatctgtatctggcacagtatctgcttttgagcccagaaggaaataaaggccctggaggggcgctgaaccctaaagcactggagctgcagggagaggtcttctgaggcagcttctggcagccccagacaaggggagggccaagtgctgacctaaccatggccttgggggcaggtgtgcaggcctatggattagcaaataaggaccgaaacatgcttatggattagcaattaaggaccaaaacatgcctatggattagcaattaaggaccaaaatgagcttaagtttggacccttttcagttcacaagcgtttttatttttacatacatatatgtagcatggtgtattggctaagaaaatcgaccttggaatttcaagcccaactctacagttaactgtgaggttggatgagttattaatgtctctgaatctatttcctgattagtaaatgatgtattatggttctccagagaaacagaaccaatgatgtggggtgggggaggacaagagaaagagggttattatcaggaatgcactcacagggttatgggggctgggcagtcccaagacctgcagctgtcaagcagaagagctgattgaaagccagtagacttgagacccacaaagagctgatgtctccattcaagtctgaaggcaagaaaagacgtaggtcccggttcagtcaggcaggaggtggttcctatgcgggccttgaactaattgaatgaggcccacccacattatgaagggcactctgcttcactcagttcacaaattcaaatgttaattttatccaaaaacacccccacagacacactcagcacacacagtgtcactacttactctcagattgctctccagactgggggaaccaattgacaaggcccccagctcccccagctatgagactacattccccataacttttcagcatgttcacttgattctccaaccttaacagacttgtgatattactttaatggcaaacaaggctctgctgtcccacgcgcttactttgccacatggcacagtatctgtgtcacagacgcactcttcccaaggacaggtccaggcctgtgtcagtcactgcttcatcccagcacctagcacagggcctgactcatggtgagctgtggacaaacgcacatgcaattaacgacttgttcctgcctcagggttctcttttccagatgagtagaacaattcacattttttcactccttacttcagactgggagaaagggcctgagcagaaggatcagagttcaaaggaggggacacagcgccacagaggcaatgcctggagcaacaaagattggggtttgggcatgtactggagtgagagtggaaagggcatggaagtcagggtccagtcagaagacagaggcctcgtcagttatttcaacagagaggatttcgcatcatgaatcactatgtacgaagtgactaccgaaggagctgaaaagagaactctatctcagaagcaaaaactgcagggagcacctgctacgctagggctgtggaaacaaagggaagcgtttggaattactggggtcagaaagcctgggaactaaacccctaaggagagggcttcgcaggtctctggtccctgacctggccccgagggtggggacagatccccgaggcgaggcgtcgatggctgcggtctgaggtctctagcggggggccgatgaagctcttctgcgaagttgggaacccgcgcaccagttttagcagccgcggaaggaagtgctcttgccggggcgaagcagcagagttcggaagacacgcgaccagggcaccaaacagaccggaagcctgaggaaaaaaccggaagcaaaccggaaagagtgtgcccctctctcctccgcagcctcgcgcgctttctctggcgcccctagtgggaaagcctagcatggcaccagctggccaagcagaaaaaggtttgcggagaccgggccagccgcagaggtggagctgagggtcaaaacctcctccctggagcaggagggcagagaggccttccttgtacgttcgagcggattcataagataaatggtgaaggactcagatggctgagatgagattttgtagaaaaacctcgccgagtgccaagtgcagctagggcttcaggagtccagcctggtttgtaagcctcgaggagcccacgcgtggccgcaggtgcaaatggtctcagagcagccatgcacgggagaattcctcccagggagaaacgccgtgaatgtgacttctagggacacgcacagccggtggaaaccgtatgcatgtagtgtgcataggtgagatgtaatggaacactggagaagcaccttgtgaacgtgggaagggtttcgcgcatgctcaggctccgttcgggatcagaacattcccgcaggagagaagccaatgagcagcactggacgtggccacaccttcgtggaagcgctggtcctcaggcatcagagtggacatagagaggccctgcaaatgtaatgactgtgggaacgcccgcctcctgagttcatgctgccgtgagggagcggactgtgggtgcgggcatgcggaaaggtctcagataatccccactggagaggaacactgtggatgtcatccacgcagcagaatcggataaattgcaccaagggaccccacccccaccccctgtgcagtgaccaccgcaaaacctttaagcaaagatctcatgccccgaaatgccagggccgtcaccagggatgcagcagggagtgaaacacccatctcttttctcacaccaaaccgtagccaagggattcaccacgaggtgagccggtgcgagagggaggactctgcaggcggagactgccctcggggttgtggcctcagaacggggtcctgctccctggagacatggaccctgtttcttacagtagcttttgtgcatcatgggcaggcagtgccagttgacaccaatcaagtctcaacactcagcctgcacacgtgcagatcctctggaaaaacgcagcccctcccatcctcagatcctaagagaggtaggggccttgcccattagctgactccaagacaacctggctgggactagaaggtgagagccaacccctgcggctgctacaagccccacaggaggcccggggagggtttcctggcagtgtcttccgagtcgccgcaagtttctgcccagttttcacagcctgctcttccctgggttccggctgggtctcttcctcaggtatggctccacgcctcccctgcccagttgatgcaggtctcgctctgatcacatccagttcctgtagaccattggccactcaccaggccgctttgccttgcgttttctagggtcttgtttcatggggtcatgggaacccactcagggaccacccaactacctgagaggcccactggaaaacgcagattcccaggccccaccccaagggattcagcaggcctcaggggaagccaggaaatctggatttagttcaaatacccaaatacattgatcatgggcctggttcgggaatctgttctcctccaagccctcaaagcaggagctgctggcctgccctctgcaaggccgctgcccaggctctcctcagacaccacctggacgggcagctcgagccgtgggacgcccctgcttgggccagaatcgggtcctgcacctcagacctgcagggcccagctcggcctctgggcctctggcagccgcgccctgcctggcaccccctgcctccgtgacgccccatctctctctctacaacgtagccccgtgctagttcacagcctcgcgacccctcccagagaggccccacagccatggcccccagccgcgcgagc

SEQ ID NO: 1883234 - DNA, 4001 bp, Homo sapiens
aactcctgggctcaagcgatcctcccatctcagcctcccaagtgtctgggatcacagatgcgcgccaccatatctggctaattttctacttttttgtagagacagggtcttgctatgttgcccaggctagtctcaaactcctgggctcaagcgagcctcttgcctctccactgattttagaaggcaacacctcagtgagatgggacctcactgtatctccagaaagagttactgtctataaactaccccaggctgaaaatctaagtgcagaacccctaccttcccactggtgcgcactacccttgtcctcctaaatgtggcaaggagaccacatgggagcctctccactcacttccttaagcacaaccagtagaagtcattttaaatgtttagcacctaatcctagtcacacctatagttaggataatgattgcctttagatgcagtggttcctcggcaaggcagctgttccctttccatgagccccctttcccaatgaaagaaattttcacccttctggctggagggtctcagattcaagctttttaaccctctcccccaaacgctattacccataagaatagtaatcacatcacccacaaagtgtctaggagatactttaggacccaagaagcttctgtttctaggtggtaaatctatttactttcagctaagagtcaggtcactcccatatcttccatatactctgtcagggtatggggtatcttagacctcagtcttcccctctgccaaatgggtcgtgcagcataaatggtatccacgaggagacccagagaggcgaatcacagtctcagagaagtgaccggatgccagaagtgatgatgtgctttagcgatcattaaacagaagggagccccagagagcggaaggaactcccccaagtcacaggcagatcagaacataacctaagtgccatccctggctggtgttcagcccattcagactttcactgggattctgatctcattctgagctggccaagtcattctcgaaagaagtggggacttctcacttctctttgacccaacatcctggactcagaaacaattttgaataaaagagatggaagctcctagttctgccctgacggaactaggagccccgccccaccccctcccgcagttactagattccctgaccagggctctttccccgacacaaaaactcttcaatacacaaatgccttctagtcccatcaggacctggggatgagagtccagggagccagcaccgtcttgccccatgcggggagaggggtggtgacactttcagtccgccgccagcagccactggggaggcccggctccagcacgcccctccgtcccctgcctggatagaggcttccactccgcgtgtgtaactcagagccacatgacactgaaatgctaagtgaagagcaattaacttttgcttctgaaaacccactttagctttccataactcttcgggggccatttcagctcagccaaacctcccgcacattctccctaagcaataaattaccttcctggctttaattagctgctggcgcgcaagcggggctgggtgctgacgtgctgctttcccacaggtcccattctgtcacacagactccaggagaaggcggcggcggggggcgctgggccccctctgcgagaccaggcctgtagcagacgcctcacctgcccgcggtgtgagggaggaagcctgaaagtccaagcctcatggaggttaaagtctaatgtagaccaagtccaagttcgatggagagccttagactcctcctttaggcctcttgaccccttagcgatgtgccctcagacccatgttccctctctccagccttctcttccttcagtcggcccccaaaacacacacgcatgcagacacaccagccctcagatacccgagctcttcatcttcctcattcttgctaggggagaaattactgacagagcttaacatataaaccctcccaggagactttgctgtataattgtgagctaagcttgagtcagaatgaataaatctctaagtacggggtttagtcacatctgtgggccgaaatgtattggctgaggaagaaagaagtaaaacagcaccttcagaatcccagacaccattctaagcccaagattaagatttggggtgcagccaaccctatctctaactagaaatgggtccctcagcaagtcccctcccttcttcagtccaggtgcccatgagaaagctgtgacgggtgaacccaagtgcctcggggccctgccgtactgtgattccggaggtcgggcatgtgcacacaagagtgtgagtatgagcgtgtgtgggggttggtgtatgaatgtgtgtgtcagagtgtgtgtgtgactgtgagtgtatgtgtgtgtcagtgtgtgggtgtgtgaatgtgtgtgtcagagagtgtgagcgtatgtgtcagagtgtgagtgtgtccaaaagtgtgtgactgcgtgtgtgtgcagttgtgtgtgtgtgtgtgagactgtaggtgtgtgagtgtgtgggtgggcatgtgaatatgtgtgtgtgtgagtgtgttagggtatgtgagtgtgagcttgtgtgtgtgagtgtgtcagagtgtgtgtagtgtgtgagtgtgatagtgtccgtgtgtgtgaaactgtgtgtgtgcgtgtgttagggtatgtgagtgtgagcttgtgtgtgtgagtgtgtccgagtgtgtgtagtgtgagtgagtgtgatagtgtcagtgtgtgtgtgaaactgtgtgtgcgtgtgagtgtgtgtgagtgtgtataggggagtgagcaggaaagacgcatcctaaagtagaccttagtgcatccctcctgctttcttctagagactgcagcatctgggctgagggggcagcactcctggggacctgatttccagggggcggccaggccagcaggagcaccacccgtgacagctggcagccaaggcacccacgctcttcaacccggaggctctccctgaccaggaagggcctgggagaagtaagcctctttcttggtctgctacagacatttatgctaatggtgcttctcttccgggcctagctttcacctcctctgacaggtaatgaactccccaagtccaattacaggccacctcttccatccttcttttctcaaggaaaaaaaaaattgaaaataaaaagtccaaacacagaaggcccacagccaggccctgcatgtcaggccagtgacaggcaggctgggcacagcctccctctgattaagaggatgagcaccaagcaggcctaggagccccagcaagtcctcactacaacttctctccacacctctcaatgaacaggcagcttgtcaggaacaaggagacgccgggcaggcagtggggcaagattgcaggcaggtacccaggctgtcaccaccgccagacagggcccgtgtcaccccaccctgcctgccagcgcctgcccctgccgtctacatcttccccagcctttcacacaccccacatggtgacaagtgagcacttccatcagccaaagagagtgcaaggactgggtggcttgtgcaacttcccttcatcctgccctggagtggtctggtgctagaggtgacctggagtccaccttcctcatcccgtcttcccaaaatcagtgatgccctcaagagatttgtggcaggcggacccggagagtcgcaggggcctcctaaatggcctgtgagacaaactgagctttggctggtactttgggaatcatagaaaatgagcaacagaggcctgctcaggtgcagaaattgaccaggctctttgagtcaaatcaccctggcgctccttggaccaattaaccacacacctgctcctccctgcagagattctaggcaccagcagagattctaggagggcctcacgattccactcccgccccagcataatcccatgcattgagatgtctcactccaggccccacaggtaaggcccttggtgtcctcctgtaggcttggcctccctcaatcaca

SEQ ID NO: 1883235 - DNA, 4001 bp, Homo sapiens
agaggtgacggcaggcagggctcttggaacagcaggaggtgggccaagttccctggggcctcctgccccacctgcctggtagcagccctgcttccttcccacaaaatacttctcttgctttcagcagggtgtcacctaatccccaggaaggaaggagtgccacccttccaagaggtatttgcatttgagcaggagtttctggaaacctaggaggaaaagggactggaataaaggaggaagggggcagagatggagacagcgagctccacacttctcaaatcaaatcctgcctcatcctgattcctgcctcatcctgatactgagaccccacatcgcacaggcaaacagatggaccagcatgggtggccatgggcactgaggtcagcagtggctcccaatgccgtcctgagaaagaggcagggaggactgaactacaggggaggggccctgagcattcacatcggggcacgccaccgtcgtccagtgtctgcgtcctccacactggacacaaacagtgtaatgcccccagaacctcttggggagtgggagagtgaggttgtaggaatattgagccccacagctttacttggcgtcttccagcatccccgggtagccacacagatagatgagcagacaccaccgcaataagctagtgtaagcttccccagccatcactgtatctccagttctgcagtacagtccccgcctcccaagagggcatcttctcagtactaaatacccatgccaccaggacacttgcagtctgccacctgcagaaagttatatgcggggccctggttgggggtctttctcctgcactccccactccaggggagaaattcagataattttctgaccattagtaacatttcctgcgatgtcaaactaagataattatggagcttaccaaatcgtaggctccttaactcacggatggctggggaatggggaagcctggaaaattcgggaagcccacaggccgggaaatcgagccacgggtgtgctgggactgtcttaggaccgtggcctcctaaggcctgcacctgagagcatttctccctccctccccacctcccggctgctttttctctccaagggaacaaggagtttgcatctgtgggctgaaaggtgacccctcattctggccgagggagcccaggagcacccatccacccccacagacccacccagtgttttttgaaactgagagatctggatttgctctccctgcctgtacaaccaagcgagccccccttgccttctgccactaaatgagcataacaaggagagaaactagacgctgcaatcgacagaagccatcgtttgggagctgtcagacttgatgtctcagagacccgggatccaaaggcccgtccccctatacagcttgagatatttaataaagtaaagcctcgaggatcaaggggctgcaatccttcccactccttcccgcagctcgtgctggagttctttaaagcctgccttgcgtctgcctttctctccagaaagcctttcatgccgcctcgccagactgacactttgacaagttgccacgagtgacatctgatttgtacaaatttcaagactaataaatctacctgtcaaagcggaaactttaaaaggagctaagcccagcgggtatagtttaacagaactcaagttgatgaaactgtaggatgaagaaattatatctgtcacaatccacccacattagttctgcagaaatgttggcaactgaaacaaacgtctttcacgggcgttaccgaaaaaaaaaattaaaaattaaaaaaaaaattttaatcaaaaaaggagattgttaataccccgagtaacaagtaacagttctattttgtaaactaacacattttatttatttaatttttaattttgttgcagatgttagacgtgtttctcctcctacctcttaagctgtgttgctggaatctggactttccattcaagctggggcccatcaatcactcggcggctcctgcttggagaagcagaggcagtgcaggctgcagggtgaggcaggactcatagcccacagccctgtgtcctgggggggccctgcagggccccgcttccccccgtccgtccgcaggcccacagcgctgaatcatgtccccttcaccctctggccttgacctggaccccaaagtctggctcccactctgcgcaggcctgtgggatttttaagattgtggatatttacggggaagggcagcgggggatgactaagatgacaggaactcataggcctggctaacttgattttatttttatcttcccttcctgtctctgacaagtccacttttctcctgaatcatcatatcagaaacgttggagaagccagaattcacagatcagaggaagcaactcgtgggggggcggggggcggggcttctgggtgttcccctatacctaggaaatcaaaggacaggagagtccaagacaaaaccccttgtgtttcgcatccttcccgcacaccacctcaccctgcagtcaaagaggagggtccgctgctctcgcctcctggaagtggcctcagttacccttcagggtgagctgttttctctttaatggcagccccaacaagtcataacctccaaataatcactgttattactactgccttcctcctgggagttcaaaatgggatctcatttgccctctcactcacacggttaagaagcaagcaggcagggacagaaaagagcttttttctcaagttcacctagaggcagtggccttggggtcaccctgcaagctgacgatggaccccagcacttcggggtggggaggaggccctcgctcacagaccacaggctctttccccccttgctccccatgggggcgggcttcctcccttgaatcctggagcttccgcttaatttttatttggcaaggacaatatcagacactaacactttcttttctatctcttggcctgctcgatatgtgaatgtggtgataatcaggataatgcccttaggtgtgagctttttctatttcctgataacaatgaggctggatcagagctaaagggggtctttcactaccaatggggaagagcccagaaacccagagcagctgtcttttaggtcaggacgcacagtgccaatctttctgcaatgaactggggttaccactagttctgcccaattcagtatttctccctgtcaattagctatttattaagcagctttcatgtctaagacaccctgctcagcattgtgtgaattacagagaagtacaaaacacgatcctcatcttaaaagagcatgcagtccatatggggtgttgaaatggtgatgcaaacaagattaacacagaacaaaatagatcctgaccaggaacaaagtgagtgcaagtacaggaagaaagcatggtgagtgaagggggcgtgaaacccagccctgccaccaactgtggggtctcagaaagaacgttctccctagaaactgagatggttggccagatgatcagaaggcccctgcatttcctgtggattttttagaagaagaggagctgggagattgtgaacctaaaaaccctttataaactgtaaacagttctgagattgctagtgctggtattgttgctgtgggctgggctgattaggcctgtcttcactgggggatcaggttatgatccagcaccgaacatagcagatgaaggagcaaatgaacacacagataaagaagcaagctgggccttcaaagagggatacaattcagttgcactttgctcacattctgcctttggcacccacagcttcagctccatctcccaacctctcaccaccccatggtaagctccagggcctgcctcatgccagcagacagcaggctgggaaggtgagaatgcctggaggcaactcaaaggaaaacaccgatattgcttttccaggccagggtgaaacaaaaccacaaataaggacagcacatcttgggagtgagagaccctagatcagccggatagaaaccctgtggtgggac

SEQ ID NO: 1883236 - DNA, 4001 bp, Homo sapiens
tcagcttcaggcgttcaaatgtgccattctcccatggaaagcccactaagtccctcaagcttcacctgaaataccatttcactgagaagtcttccttgtctccagactaaattagattgccttgatatatgctcccagagaaccaagaatgtccccttttcatcccacaggtaactccttgttaaatgttgtacaaggaaggcatagacagaattcacctttcactgttccactggtgcccagcagggtatgcaaaggaggaaatcagctgtgctctgaaagaagcaccattccagtaaaggggaggaaaaggtcatcagactgcaagggctcaacaaaagtacaaggtaaggaggcagagggtgtgggctgattatcaactaagaggtttgcacggaaaaagggaaaaaaaaaaaaacagaaaaacagggccgggtagtggcagaaagagagggtggatctgtgactgttcgcaggaagagaggagcgggagcaggacagacaataactgatagtcaggagctgggtttggagataaagagggaacaagagaaagttaagttctgtgttttcatggcaaacattgcacaaaagtttacaacttcgtgactaacagtaatctggggtgattcacaacaaatttacacataaacacatatttactgactttatacacagcaatcctaacgtgaacacagaacctgctttatcttttcgcacactgttctagtgtagagatgtctggtctcagttaaagaaagcataaggagcattagttgtgcacactgtccacacctgtgacttttttccaccagtactaaacctagtgcttcttacagtacaggacaatgacagccacagaaagagagaagctccttttactgtgtaatgcttcctgctggccttcaaatacttgttacttgagagatctccattcacctggctttgtccccaaaggtcatcatctaccaatgatgttgttatttgatgttaatcatgtataaagaaagtagctaccatcctggccctgattagaacttcccactgaaataccgtcctgcctaaaggtagcacaggctcccattatggtggtggtggggagggggcgggaatatatatatatatatatatatatatatatatatatatatggtaaagcattcggcattcttttaaagtacaactatccttgaaaagggttacatattaaaccatttttaccacagccaaaggggaggagaaagatccaaaagtcctgtggatctgctttaacatcaataaaacagttatccacccttcgtagcttttagtgaaggctacaaaagtatgctttttatggattacacatgtgcacgcaactactttaattactacagaaaaaaacgaggctccttattaaaaaaaaatcagaaacaagtccaacagactctgaggaaatgaagcaagagtgaattctgaaaaggtctaataaacagtatggaaatatccttgtgggattgttcttcagctatgcataaacatgtaattatcatcattactgtgatggggaaaaacacggaccctaattctgaaacaccctggtagcgagagacgggcaggaggggctgctgcgcactcagagcggaggctgaggaggcggcgtccccttgcaaaggactggcagtgagcagatggggacactcgagctgccccgcgacctgggccgagctgcctacaacctgggcccaggtgcctgcaagaattagacctccgataacgttaacacccactttctcactgctctaattgtgtgcatcccggcgcccaggggcttgtgagcagcaggtgcgcgttccaggcagctccagcgacccttaaacctgaccgcgcgcacgtccggcccgagggagcagaacaagaggcacccggaccctcctccggccagcacccaccttcacccagttccgtcagtcgccaccacctcccttcccgcgtccgcagccggcccagctggggagcatgcgcagtggccggagccgggttgcccgcgccccagcaggtagctgtactgcaactgtcggcccaaaccaaccaatcaagagacgtgttattgccgccgaggtggaactatggcaacgggcgaccaatcagaaggcgcgttgttgccgcggagccccctgccccggcagggggatgtggcgatgggtgagggtcatggggtgtgagcatccctgagccatcgatccgggagggccgcgggttcccttgctttgccgccgggagcggcgcacgcagccccgcactcgcctacccggccccgggcggcggcgcggcccatgcggctgggggcggaggctgggagcgggtggcgggcgcggcggcccgggcccgggcggtgattggccgcctgctggccgcgactgaggcccgggaggcgggcggggagcgcaggcggagctcgctgccgccgagctgagaagatgctgctgtccctggtgctccacacgtactccatgcgctacctgctgcccagcgtcgtgctcctgggcacggcgcccacctacgtgttggcctggggggtctggcggctgctctccgccttcctgcccgcccgcttctaccaagcgctggacgaccggctctactgcgtctaccagagcatggtgctcttcttcttcgagaattacaccggggtccaggtgagccgcctcccgctcccgggtctcggcgtccacccgagctcccgggggcgcggacctctccgctcccccacagctggcgagggtcacccggccggcccggcggacccagcacggagagcacgtgccgcctccccgccttcctctccgcatgcttcctgccgttctgccgagatcgctctctaggaagctgtggctgcgtcgtcctgaggctacgagtgggacccgccgcccctttccccgcccctcgcctgggtctgatgctgcttagcaaagtgggtgcagatgcacgttttaaataatagggcacgcgtttagcagtttctggcctttggtccaaagaggtggtcatgttggaacagatcggagacgtctacactccgaagtgcgcttttacagtgacctcttgaaacagaagtacaattcggtcttgtgttctttcccctggacaagtgaaagctgggcgaagaaatgaatacatttgttaaccgtagaagcctaactagatacatttcttgccaactttaactgggcttgaatgtgtgggtgatctgttgtctgattactttctttctgttactgtttctctgtagagattggattcgtagattaaacttgagaaacaaaccataaaagtggaaggccctctttaacagtaggtatttgaagtgttataaaaaaaaaaaaaaggtgaatttttcttttatttctcagtttgaaagaacagctttattcttggttattcctaatgtccacctagtcctcttttacttttcttggtagggttagggtggcatggggaaatgggacggtatcattttgtctttttaactttttttttttccacctacagcagctgtttttaccctgtggtcagtcaggtactatatttagtttgcagttgcactgctgatcgacccttgatggccccagttggaagttgtttggggggaaggaactaggagaggccagggcctccatttaaaccagtgtctgtaagtgtctccttggaaagaaaaaaagatactgttccaggtcatggtttcctggtagttgacgtttaaaatgggcctcatttaaaaatttcaataattcaggctaattttttccctttatatggtaactccaccaagtttgtctaaatgtatgatttttatcatgattaagtttttacttccacatcatgtgacaactggcctgggatgggatataagctcagaacacaaagtcattcacctcttaaaaaaataattctatctgtggcgggttatgttatttttgttcaaagaggacacaatatgatgcagaatacaccattgaagg

SEQ ID NO: 1883237 - DNA, 4001 bp, Homo sapiens
ttcggaaaacagggaatcttctacaaatgttccttctgcaaatcgcgtgagcttctcagacgttctttctgccacacattccacctttaagaggtttcaacgatgaaacgttcagtcttctcgcatgtctactctgccaaaccggggatccgatcacatagctcttctgcaaaacattcgacctcatcagaagtgtcttccaccaaccattccatcttgccagatgtttctgtgttactgtggatggctggacacacaggatcagcgcatgagagggtctagcccacaccccaccagatatgtcaggtgaccaggaagtgacagggcaggccgtcgttaaattgcctttctcaaataagaaatgatggctgggaggcagcgccagggacggcagtgcccccaacagacagaaatcccagaaggtggtgatgagcagctccccaagaaggtatcaggaggcaggcgagggggctcacacacacctcctcacaggcataccggccaggtttcactaccctatgaccttccccgggcaacatcctactgccgaaaaagacacgcctcaagtgagagtgcctgcaactgcaggaaaaacgccatgcctacggcccctcccagctgtcaacaggacacagccaatgtggacagcataccacgtgaaaagggcagctcttttggagagtgcagcaaggctttccgtgagtcctctcgcttcctcctgctttagcctgtatcctctgtttctctactcacagccatgcccttctccagatgcttccaggccttccaggtcctatttgaagggagaaatgtccagctccttgcagcagctagctgaaaaacaggctcctcgtctactgtgagaatctgggaagtgggaatcagacagcagagatcatcattgtcttgctggaacgctctcacccacagtcactctcacgtcacgcagacaaggacagagtccggacaaaggccacaggtgcaacagaacgatagcacccagaccaaggctgatcccaggctaacacacgtccattagagcagggaggaaggcaagaacaggggcacatggtaacaacggttcattctgggaccccagggatgaatggggcttccccgaaccggttcactccagcacctcctctcttctccagtgggtgatcatgacgagatggcaccgggtttggcagggaaacagtaagaccaagacatcccagagccctatggatgaacgggggatgccctattcaggatcctgggaaagataagagagcccaagcatgatggacacagtccttgtaagccgccaaaaactttcctgaaacaggacctgggaaagaaaccctgtgcggtttgaaaggttattaggtctgttaaatgcttctggaatcgacgctttaccagaggccagtcaggaccatttgcttacgtgtcatctctgactgcttccacactgctacagcaggcttcagcagacatgacagagaccaccgggcctacaagcgtttcccacctgcccctttacaggaagaactggccaaaccctgcgtcacgccgtgactggaaagtcctaatactcaccgctcatcttctgactcccctgctcaaaagcttcccgtgaatctctgcaggaaacctggctggctccctatccacggaatttcttctttctcgctggagaaatgcaaggttatcaggatctttatcgttccctcaacccaccccagctcctgaaggaggaatgatcattctaagctcatcacagcaatcacatggttttccccagtgactggcttagcagtcggcatgtgctgtaacccagcccatacgatgttaccagaaggccactgtgagctgctgacttgactgcctcttcaaaagacacctgggaagaagagcaacccctccacccttcacacgctgccttcagagaacacgccgactgcagctgttgctacttggcccgccagcaaagcagacatgaagtaaacactgcccacagcacagctggaagggaaaacgtgagcgtgacacgacgatgccaacacaattctggtgcctatggcttcagccgctcttacttgggtcatctactatttacagccacgagcatcctgagaatgtggctgtggcccatagaatatgtctctacccctcctactccggactgttcaaaaatctaccctcagctcgccttttctagatattcaaaccacgcccaaccactctcgtaccacactcttgccaccagcaacactgagctgctcctgaacccgacagagttcacatgagcctctgacctttggaacttgccgttccttcgggaaaacaggcaatctactcccagtgctccttctgggaatcctgcgagcttctcagatattctctctgccacacctgttccctccgttccaccctgccagatgtctcctcggccaaaacgttccgtcttctcgcatgtctcctctgccaaaccagggatctggtcacatggctcttctgcaaaacattcgatctcgtcagatgtgtcttccgccaaccactccatcctgccagatgtttctgtgttaccgtgggcggctggtcagacaggagcagcgcaggagagggccacgcccacaccccacctgacacctcaggtgaccaggaggtgatgggtcaggccaccattaaactgcctctctcaaataacagatgattgctgggagccccgccggggacgggcagtcccccagacagacagaaaccctggaaggtggcgatgagcagctccccgagatctcagggggtgggcgagggggttcacgcttgcgcattcacaggcaaaccggccgggtttcactgtcctatgaccctccctgggcaacatccaactgccgagggaggcacgcctcaagtgagcacccctacgactccaggaaacacgctgcgcctgcggtccctcccaagtgccgacaggccactgcccatgtggatggcccgccctgtgaaaaggctcaggggaggaagcgacgcaacccctggctcctggaagcctgccaatgtgtgagacctctcctcaaaggtcgaacaatgcatgcccctgacctctccagttgcacacatggcattcttctaagtgtaccttattgcctcgcctccctgctccggtaccatctgggagacccgcgcttaaagtggcctcggtttctctccctccgcctcatgcccctcagtcaaactccctctgacgaggcaagagctcaggttgctgcgtgcaggcctctatggatccaccgccgcggacgtccctaccgccaaacaccccatcttagcggatgttttctctcccaaatgttccctctttccagctgtttcctttgcacggcatgcaatcttcctaggtgttccgtctacccaccgtggaatctgctcagaggttccttctgcccaccatgagacctgcttaagggttttctgctgttgaccacgccatcttcgcacttaggccttctgctaaacgtgcagtctacctgagtgttccttctgccaaacagctagttgtgtccgctccctcccctgacaagcgctcagtcttgtccggcgcaccatgggcccaatacttcctccacccagatgtttcttgggcaggccttgcaatctgcctagggcgtccaactgcccatcctgcagtcttctcacgggttccctcaccctgccagccccccctgcaatctccctaccctaaggtttcctcatgctgatcaccagatgttcttagcagttccttccgaaatcgctgcagtctgcttagatgttacctctgtcacactcggctgtcagatgttccttccgccagacactccatctcgtcagatgatcttctggcacacgttcaatcctgtcaggtgtccctctccgtcacacgtgcagagcggggcccgagagggttccccaccaccagtaaatgttaggcagccgcgaggtgatggtcgtgtggtctcaaagcagactctctagag

SEQ ID NO: 1883238 - DNA, 4001 bp, Homo sapiens
ttgcccaggctggtcttgagctcctgacctcaagcgatccgcctgccttggcctcccaaagtgctgggattacaggcgggagccactgagtccagccccagatatctacttaaacactataatggtaacaaatatgagaatatctggctttttattagctttttaattaaatatttaataaataatgtgtatctcaccttgtaaaatattttaacaatatctttacattttttgagaaaaagcaaatactttcacatttttactaagaataatatgttagaagcttttttattataataattggaacacagactttaagtttttttacattacattttcctgatatactgcctgaatttttttttttctggggcaaagaaaagtacttttcttaagctactgtcagttcctttacttaagattattctgaaatgaacccatccttccctctaatggaaagataggtacataataagataagcactttttttatttgaacaaatccagtattagagtagtcttttgcagctagtgaatcatgacagcctgctaagaagaatgccttcagtaaaataaagttaggttgggactgaccaacatgaatgcataaagttaactccattaaaaaaaattgaccaggaaaataaaacaatgctaagccaaccactgtaataccaaaaacgctgctaaaaaatttagattgcttctgagtaaccaaaggtgaaccactctccaccctgtggtgaacatgtgacactctccctaacagcagctctgtggggagggcttgctcccactgagaattaattcactttccagaagtgagagataaggaaaaattcccatgacaataatccatttggtgaactgcagtttggtggtgtttgaagttttacgcatatttaagaatcaaacatgctcttacttcatccctgttaggaaagccacaatccagtttcacggaaaatgaaagacaaggattcctgctgatcaaatcgcctggctccctccacagaatcccgggaagccactctacattcacaaactttgcactcaattcttggcacctatcaacgccatatctccagggccaagtgaagagtctcatagcaactaagttaatatttgaaaattatgtaaagaaacaaaattacatcaatgggccccaacagatacaatgcacctacagaggcacaaataaaagcttcttctttgctacaaactccattttgtaatggtcctaaaaatttaaaaactttattgctgctttcttgcctaagaattccctgtgacatcaacccaaaacccacataagcagaagtacacaattttctagaatcttagaacaagtaagtctaaacatgaatcatatttgtttggatgaaattgactgaaataaatagtaaagagtgattttgagatacatattgcaaaaatgtccactaataacttatccttgtatttatctgtatattttcaaaggtaagtaatgtgatgtcaaggccgacacaatcacattaaactgtgtcctgcttccccaactgtaactctaatactattgccctcagagattgcagagaccacagaaccgaactccttcccacaaacccccggatttttctgtggcaaaatcccttgtaggaaatgaattctctctatatctcaaaacagcctcacttacccagtaggccctgtaagcacagtgtctcaggtccacaatacttttagatgcccaggaaaatgtttccttttaaaataagaacaaaaaagaaaaaaattaggtgttggttaaagaaaatgtttaaatatataatattaagatatttatctttatgtcagtgttggtataaatgcgtgtttatgaaaaagggacccaccaaggtgaaatgccgtaggacccacaaatgtcataatgctggctggcctcaaaatgtccttcctattaaactattttgaatgattcctaggtatgccagatgccaatttttcttggccagccagggaacgtctcatgtctttggaagaaattatctttctcttactggattcttctgagaaaagtgatttgttaaaagttttggttatttcaaatcaatatgtactcaactaggacgtctcctcacccacgttaattttttaaagaggaggaaagtaggagaagatgagcgcttcatgtaaggctctgccagcctacgaggaaatgcaatcctccaggctcgcccgagcgtgggctgcgggcaggggactgtggggccgttgtctcgttttattccacggccgtgcagcagagggcgcgtgcctctcagcactcatgctgcgcgctcccctgcgcctctaggatcgtatccctatttgccccaaggtcatagctcctaacccagcttgccagccccaggccggggacaccagagactgagcccttcgcgctggagaccccggcgcgggtggggcgggagggctccggggccaagagacaggtcacaatggggacaggggacgaaaggcgccgggggtccgggtcccgagcagtccccgccgccgccagactccgcagccgggagggggatggggtgcgcgtagaggctccgcggcccgggttggacggaggagcccaggagccaccgcagccgccgcacgcccagagctccgagcttcgctgccagcccaggacaccggggccctgccgtgggccgaggggagccgggcggcgggagaggagccccggagccccggagccccggagccccgccgggcgccagccgagagggcgttttccccgcccccggagactcgcccgcccggcccgccccgccccgagcgcggggagttcacctccgcccgtcaccacctccccttgtcgcctaggtccacccgagccccctcccccgggccgcccccgagcacgaagttggcgggagcctataaaagctggtgccggcgcgacccgcggacacacagtgcaggcgcccaagccgccgccgccagatcggtgccgattcctgccctgccccgaccgccagcgcgaccatgtcccatcactgggggtacggcaaacacaacggtgagtgccggcgacggccagcgcgggggcgccccgatccccgatccccgatccccgatccccgagcccggatgccggcccggggcccgcagcgcccgcacatgctgtttaccgcggccgcggggagtgctggaggctcaggtgcgccccgggcgctcgctccgctcgcggctccgcggcgccggggatgtcccccttgccccagctgcgaggccactgtggaggaatccccgcgtccgccggaggcgcgtagggcccgagggaggggaggcgcagccctggccgcgggacccgaggacagtccctcccgggtcccgacctggggatcattttaaccggacctaggaggaggcgggaaagggttgtaacggaaaattctagttgttgatcgcagagaaattaagagactcccctcccccctcccccaccttccacccccaccccacccctccagcttcagcaccacctgtggctaaggcgctcagcacgaactgtcccggggcattttccagtgctggtttgaatccatggctctgatttccgagttttcccttcatctctcgacttctaatgttagggggtcggacatcaggaatcgggttttatcttggcctcagatctggttcttcggagccagcggagcagaggagcatgcgtctggcgcacctagcgcatctttggagggtgtggggcttcccaggtagtggggaaccctgacggttaaaggtggggtgggcccgggcctgggcagtgaggaaaggatccagacctccttgaatgtcttaagtgagcttgcatatcccaaaatcgcaaccacaagccctgacattagtgtctgcccgatttcagttgctgaatttcagtaaaacgaccttaaaatagctaatatttatatagcactcagtgatctaagagctttacatatatcgattctaattct

SEQ ID NO: 1883239 - DNA, 4001 bp, Homo sapiens
gaattccctgtgacatcaacccaaaacccacataagcagaagtacacaattttctagaatcttagaacaagtaagtctaaacatgaatcatatttgtttggatgaaattgactgaaataaatagtaaagagtgattttgagatacatattgcaaaaatgtccactaataacttatccttgtatttatctgtatattttcaaaggtaagtaatgtgatgtcaaggccgacacaatcacattaaactgtgtcctgcttccccaactgtaactctaatactattgccctcagagattgcagagaccacagaaccgaactccttcccacaaacccccggatttttctgtggcaaaatcccttgtaggaaatgaattctctctatatctcaaaacagcctcacttacccagtaggccctgtaagcacagtgtctcaggtccacaatacttttagatgcccaggaaaatgtttccttttaaaataagaacaaaaaagaaaaaaattaggtgttggttaaagaaaatgtttaaatatataatattaagatatttatctttatgtcagtgttggtataaatgcgtgtttatgaaaaagggacccaccaaggtgaaatgccgtaggacccacaaatgtcataatgctggctggcctcaaaatgtccttcctattaaactattttgaatgattcctaggtatgccagatgccaatttttcttggccagccagggaacgtctcatgtctttggaagaaattatctttctcttactggattcttctgagaaaagtgatttgttaaaagttttggttatttcaaatcaatatgtactcaactaggacgtctcctcacccacgttaattttttaaagaggaggaaagtaggagaagatgagcgcttcatgtaaggctctgccagcctacgaggaaatgcaatcctccaggctcgcccgagcgtgggctgcgggcaggggactgtggggccgttgtctcgttttattccacggccgtgcagcagagggcgcgtgcctctcagcactcatgctgcgcgctcccctgcgcctctaggatcgtatccctatttgccccaaggtcatagctcctaacccagcttgccagccccaggccggggacaccagagactgagcccttcgcgctggagaccccggcgcgggtggggcgggagggctccggggccaagagacaggtcacaatggggacaggggacgaaaggcgccgggggtccgggtcccgagcagtccccgccgccgccagactccgcagccgggagggggatggggtgcgcgtagaggctccgcggcccgggttggacggaggagcccaggagccaccgcagccgccgcacgcccagagctccgagcttcgctgccagcccaggacaccggggccctgccgtgggccgaggggagccgggcggcgggagaggagccccggagccccggagccccggagccccgccgggcgccagccgagagggcgttttccccgcccccggagactcgcccgcccggcccgccccgccccgagcgcggggagttcacctccgcccgtcaccacctccccttgtcgcctaggtccacccgagccccctcccccgggccgcccccgagcacgaagttggcgggagcctataaaagctggtgccggcgcgacccgcggacacacagtgcaggcgcccaagccgccgccgccagatcggtgccgattcctgccctgccccgaccgccagcgcgaccatgtcccatcactgggggtacggcaaacacaacggtgagtgccggcgacggccagcgcgggggcgccccgatccccgatccccgatccccgatccccgagcccggatgccggcccggggcccgcagcgcccgcacatgctgtttaccgcggccgcggggagtgctggaggctcaggtgcgccccgggcgctcgctccgctcgcggctccgcggcgccggggatgtcccccttgccccagctgcgaggccactgtggaggaatccccgcgtccgccggaggcgcgtagggcccgagggaggggaggcgcagccctggccgcgggacccgaggacagtccctcccgggtcccgacctggggatcattttaaccggacctaggaggaggcgggaaagggttgtaacggaaaattctagttgttgatcgcagagaaattaagagactcccctcccccctcccccaccttccacccccaccccacccctccagcttcagcaccacctgtggctaaggcgctcagcacgaactgtcccggggcattttccagtgctggtttgaatccatggctctgatttccgagttttcccttcatctctcgacttctaatgttagggggtcggacatcaggaatcgggttttatcttggcctcagatctggttcttcggagccagcggagcagaggagcatgcgtctggcgcacctagcgcatctttggagggtgtggggcttcccaggtagtggggaaccctgacggttaaaggtggggtgggcccgggcctgggcagtgaggaaaggatccagacctccttgaatgtcttaagtgagcttgcatatcccaaaatcgcaaccacaagccctgacattagtgtctgcccgatttcagttgctgaatttcagtaaaacgaccttaaaatagctaatatttatatagcactcagtgatctaagagctttacatatatcgattctaattcttacagcgacatctatgaggtagatttctaattatcccatattacaaatgtggaaactgaggcacagattacgtgttttcccaaaatttagcccattgttaagtgatgcttctaaaattggaactgagcagattggctccggaatgattgctcttctctaggggtctgggtgtacctttccccacaatgggggattcacatgtcttctttcccccaggacctgagcactggcataaggacttccccattgccaagggagagcgccagtcccctgttgacatcgacactcatacagccaagtatgacccttccctgaagcccctgtctgtttcctatgatcaagcaacttccctgaggatcctcaacaatggtcatgctttcaacgtggagtttgatgactctcaggacaaagcaggtcagtgtttagaaaataacttgtgtcttttagccagtagctgttttccgagcttaatggaaggagccaggaacagtggcaggaaccctcttaataatacagtttgtctcaggactcaaggatgccaccctgatcattttcattaggtctcagattctgagaagtaggctaattagtttgaagtgtcccggggccgtttcttccctgtaaaacccttggcttctatgaaggccattgaataactgcgatatgcctgtgaaaaatcacaaaaggtgcaaagtcccctcgcaataaagatcagtcacgatgagatttgcaccaattgaacttttaagattgtaaaatattttgtcttgcagagctgatgcatatccattaaaaagtatatcttagtgagccttatcttcaagttagcagcgagaagagtaacaaaaacgtgccaatttaaaatactgaaattctgggaaaatgttttacttatgagtatttcttagtattgggctagtgtgataaagatggcagcatgttttgatatctactcagaaattcatttcacaaacgaagatgttttagagttggtgaacatacctggcccattactgacaaaaccaattaccgtatttattggtaatagagctgtttacaggatgctcactgtaaaaaaaaaaaaaaaaagaaagagaaagaagaaaaaaaatcctgcttttttttttttatctctctctcttttgaaacaagagaacaatcccattcacacatagtagctgccttctttgctaagcagttaatttaattgccagtgccctattttcctgagtgctttcctctgaaggtcatagaatgaaatggtgctgcaaacacattt

SEQ ID NO: 1883240 - DNA, 4001 bp, Homo sapiens
tgaaaaagggacccaccaaggtgaaatgccgtaggacccacaaatgtcataatgctggctggcctcaaaatgtccttcctattaaactattttgaatgattcctaggtatgccagatgccaatttttcttggccagccagggaacgtctcatgtctttggaagaaattatctttctcttactggattcttctgagaaaagtgatttgttaaaagttttggttatttcaaatcaatatgtactcaactaggacgtctcctcacccacgttaattttttaaagaggaggaaagtaggagaagatgagcgcttcatgtaaggctctgccagcctacgaggaaatgcaatcctccaggctcgcccgagcgtgggctgcgggcaggggactgtggggccgttgtctcgttttattccacggccgtgcagcagagggcgcgtgcctctcagcactcatgctgcgcgctcccctgcgcctctaggatcgtatccctatttgccccaaggtcatagctcctaacccagcttgccagccccaggccggggacaccagagactgagcccttcgcgctggagaccccggcgcgggtggggcgggagggctccggggccaagagacaggtcacaatggggacaggggacgaaaggcgccgggggtccgggtcccgagcagtccccgccgccgccagactccgcagccgggagggggatggggtgcgcgtagaggctccgcggcccgggttggacggaggagcccaggagccaccgcagccgccgcacgcccagagctccgagcttcgctgccagcccaggacaccggggccctgccgtgggccgaggggagccgggcggcgggagaggagccccggagccccggagccccggagccccgccgggcgccagccgagagggcgttttccccgcccccggagactcgcccgcccggcccgccccgccccgagcgcggggagttcacctccgcccgtcaccacctccccttgtcgcctaggtccacccgagccccctcccccgggccgcccccgagcacgaagttggcgggagcctataaaagctggtgccggcgcgacccgcggacacacagtgcaggcgcccaagccgccgccgccagatcggtgccgattcctgccctgccccgaccgccagcgcgaccatgtcccatcactgggggtacggcaaacacaacggtgagtgccggcgacggccagcgcgggggcgccccgatccccgatccccgatccccgatccccgagcccggatgccggcccggggcccgcagcgcccgcacatgctgtttaccgcggccgcggggagtgctggaggctcaggtgcgccccgggcgctcgctccgctcgcggctccgcggcgccggggatgtcccccttgccccagctgcgaggccactgtggaggaatccccgcgtccgccggaggcgcgtagggcccgagggaggggaggcgcagccctggccgcgggacccgaggacagtccctcccgggtcccgacctggggatcattttaaccggacctaggaggaggcgggaaagggttgtaacggaaaattctagttgttgatcgcagagaaattaagagactcccctcccccctcccccaccttccacccccaccccacccctccagcttcagcaccacctgtggctaaggcgctcagcacgaactgtcccggggcattttccagtgctggtttgaatccatggctctgatttccgagttttcccttcatctctcgacttctaatgttagggggtcggacatcaggaatcgggttttatcttggcctcagatctggttcttcggagccagcggagcagaggagcatgcgtctggcgcacctagcgcatctttggagggtgtggggcttcccaggtagtggggaaccctgacggttaaaggtggggtgggcccgggcctgggcagtgaggaaaggatccagacctccttgaatgtcttaagtgagcttgcatatcccaaaatcgcaaccacaagccctgacattagtgtctgcccgatttcagttgctgaatttcagtaaaacgaccttaaaatagctaatatttatatagcactcagtgatctaagagctttacatatatcgattctaattcttacagcgacatctatgaggtagatttctaattatcccatattacaaatgtggaaactgaggcacagattacgtgttttcccaaaatttagcccattgttaagtgatgcttctaaaattggaactgagcagattggctccggaatgattgctcttctctaggggtctgggtgtacctttccccacaatgggggattcacatgtcttctttcccccaggacctgagcactggcataaggacttccccattgccaagggagagcgccagtcccctgttgacatcgacactcatacagccaagtatgacccttccctgaagcccctgtctgtttcctatgatcaagcaacttccctgaggatcctcaacaatggtcatgctttcaacgtggagtttgatgactctcaggacaaagcaggtcagtgtttagaaaataacttgtgtcttttagccagtagctgttttccgagcttaatggaaggagccaggaacagtggcaggaaccctcttaataatacagtttgtctcaggactcaaggatgccaccctgatcattttcattaggtctcagattctgagaagtaggctaattagtttgaagtgtcccggggccgtttcttccctgtaaaacccttggcttctatgaaggccattgaataactgcgatatgcctgtgaaaaatcacaaaaggtgcaaagtcccctcgcaataaagatcagtcacgatgagatttgcaccaattgaacttttaagattgtaaaatattttgtcttgcagagctgatgcatatccattaaaaagtatatcttagtgagccttatcttcaagttagcagcgagaagagtaacaaaaacgtgccaatttaaaatactgaaattctgggaaaatgttttacttatgagtatttcttagtattgggctagtgtgataaagatggcagcatgttttgatatctactcagaaattcatttcacaaacgaagatgttttagagttggtgaacatacctggcccattactgacaaaaccaattaccgtatttattggtaatagagctgtttacaggatgctcactgtaaaaaaaaaaaaaaaaagaaagagaaagaagaaaaaaaatcctgcttttttttttttatctctctctcttttgaaacaagagaacaatcccattcacacatagtagctgccttctttgctaagcagttaatttaattgccagtgccctattttcctgagtgctttcctctgaaggtcatagaatgaaatggtgctgcaaacacattttgtttggtggtggtgtgggagtgaggggagtggtggaacaaaatgagaaagttttggagtagtgacctacggtactaatatattatataatatgtaattataaccatttagtcaggtagactattctttgtcagcagctatcctatatagtcaacttggttttgaaaaaagaattcttccctcctttcaactttaaaaaaatttgcaaacacctggctttctgaaatggtgattctggaagacaatttgatgggggataatgtggagatcatctgagaaatgttttcaacctacctgtgcctgtctgtgtgcacccctccccagtacacacatacatacatacatacacacacacacacacacacacacacttacaatcatactcacactttctggcatagtatgatgatttattagaatcaagtaaaggttgtacattgaaaacagttcggtgattctgctacattgctttcccaagcattcctctcactccaaaggaacagtgctcatataattaaattaaacaatttttttcttgtaaagaatactgtatatttataacaagacaaggccaaaggtctc

SEQ ID NO: 1883241 - DNA, 4001 bp, Homo sapiens
gaggacattctattttttaattttaaaatttttattttttgctttcaataagaatttattttgcacattttaaaaatcgcaattttcaggatgtgtaagaaaactatttttcttatactgaaataagcatgtctttggtatagaaaccacaccctatgtgtgatctttaactaagaaaactaatcaagaactatgatctaatatgataaacaaaactcttctttgcccatccatctgtcccctttcatagccccattgtggggctttagaatatagttatgtacatatctccatatctacaaagagttaagatgccatatcaaagatgttcagaagttatatatggtagagaattaattggcttatccttgacacataatacaaaacaccaaaagtaatatatatacaggacaagcaaaatagaacattgtcactaaggtcaaataatagaaaaacaatcacatcatttaagtttgatgcattggaaacaaagtaacttctttattatgtaaacaacttgcaaagctcaaaaggtaacagcacagagccataaatttgataaggcactttaaagatagcaatcaaacatataaaaatgtcaaccacaaaaaaactgtaaaaataataaccataaaaaataggggggaatacatgcattctttctagatagtctttcattttccaaaggaaagccttctataaaaatatagaagtacaaatatatatatatatatatatatttagaagccatcatcaaagttcaaatctctgtaaagagaatgtttttcctcaagttagtaaagtttggattcatacattttctagagaagcaattacaatcttcatgctatatataggaagaaaaatagcttttaattatgtttgtcgactcttttattcaataaacatttagtgactattgtgtgacactgttttaggtgctagggatatagaaataaatcagaaacaatcattagccctagagaactaaacctaatggaactggatctatcactggcaaccttaaaattacctccgtttgtacttaagctgaagctcaacttcaaactctgacatgcttggcatcttgttgaaaataaataacgatctacctagtttgccactggtagcactttggcactattaatattaactatatactgatgaaattaactttcataaaggattatacaaaagtttagagggcagaaaatattaatggataaacaagtactggtcagcaacaaaaatagcgtcagccttctgctttcacaaaggccaagaaaaccaagaaaaatttcattctgagtatatacagaactgctgggaagagatcattctatacatgtagtacatatgcaaatatcatatatgaggaagtatgagttattacacaatcattaataactaagcatgccaaatcagtcatcaggtttcaaagaatcatagccttgtttcaagaggtcctgccaggttttaaggaaacatgcattttctgtacattggaagacaagctattccacttgagctggtactgcagatgtgacctcaagaaatttggttaatgaaaatgctgcatctctgatctgcatctccactttctccagcaggtctaccatttggcccttgttcctgctcagaactggccagcccaaactcactggttgcgtgggaaagatgctaaaaggtgtttgaagatgaggaagaaaagggaagttctgggagctggtgaagaaacccacaactcctcaaggtcagccatggggaagagctaggagctcagaatccaaccagcaagaggacattttaaaacaggttcttttttctttctctttttatcacctatgattttaagagtccaggtaatacaagcaaaggtttactccatagagcatagaataaaaacagttaatctaaatatttaagaggtatgttgccatgctattgttgggcttgggtgaatatatatttacatttctgtatatctacatatgtatgaaatatttagatctgttttcatatatttgcctatttaaagcttaattttttaaaaaagttttatttttctcctaattattgttaaggggaacattttaagaactagaaagttttaaaaatatatatttttacttatcttctcaaacttatatttcttatagggaaaactcataaactcttcaagaaacatcaggaacttaaaattttattttaaacattaattccttaactgtgattcattttggaaacatgctattcaattaactattaatttgaaaattcaaaaataggtttttccatatgtcttactatcaatgaaatcaaaacgccatttgaataagcaacttgtatgctagagtagctttataccctctctgaggcagtctattctcatgccgttcccttttagtaaacactgtcatgtttctccctcttatatcagtagaaagattttttctcactgatgtcattacccgaaagctattttcaaggaggaagaggtcttatcgtttattggctcagataccatattttaagtagaaaacattggacaatataaaacactgcccaactcctgtcttctagtgaaaaattattttgatttgtgatgtatttcaaatctaaattttgttattatctgtaatgggcatttgtcatcattgtggctagcaccttttgaaaatcatatgtttggcaaattttccatggtgaaactctcactgcatcaaaattgtagctagaatttatagttttctatactttcttacagcgagggagtattcatgtgacttgggaactactgaacagacttggattctgaaacaaataatatgaaatggacactgcagcctccatttcctagtgaggatggtggagtttagtggagagacacagagcttctaaggtagctgtggcagagcatcaagaagtgacacccttattgcaacatgtggcctgttccccatggtagcactttaactgactgtcctcccctccaagtttggagctgttcagccagaaagagtgccaagttggtgattataacttgggcattgtttctggctgaacagcctccaaacttgactatctggctctcccagagattctatgcatttcccaatagcttttagttattattattattatttgcttaaactgattagactcggatctgctgtttgcactcaaaaactcttcaacaaccaaatttggtctaacttgtgctttccttttacagtggctgtagtaatgggggatgtgttaaaatcatattttacaggaaagaatattcaatatactgaaacaagacatcttccttaacccaatcgtagtgttagataaccacagactgaatttaagaagtatgctttgagtataattatatgtatcttgcaggatgaatttgaggattatcagtaacatgtataaaatctttgccacaatctgtgacatttaataggcctcagtaaatgttatgaattatttattacataatgttagatatatgttcatgttagatgttgatcaaaactttattttatttaattcccaccaggcactattttaggtgcagtgaacaaagcagtcaaaaatctgtttttttttaagttcacatcctaatagatgaagattgaaaagaaatatgtcaagcaagtaaatatgcttcatattaaattctgacaatgctatggagaaaaagcatgggggtggttagaagggaaatgtgagggagggtggaagagggttacaattttagatagagtgttcagggatgatttcattgaaaaagtgatatttgagcacagacctgaaagaggggtgagccattattgtatatcttttttgtttactatacttgtttcttggattattttcctttaacatttagtgctttctgttagggtattcaatgtgattgatatgtgcaaatgtacaagagaggaaagagtatttcatgaaaagggttaaataagtgcacaggctctgtggtgagagcccggtac

SEQ ID NO: 1883242 - DNA, 4001 bp, Homo sapiens
ccccttttggtcaacctctcagttttgattggccaaaactttagacattgatgtcactctgtcaccattgtcagtgtacttatttggtctcaaatctcagtgggaaatagcaaaacagtgagtttttaaatgtgagaaccaggacttcaggtttgttttttttttgttttgttttgttttttttggtaagggttagaacagaagggacctctttatgctggaatctcctgttttcaggtgagaaaaaaaaactggtctgtttttgttgtaaccaagaaaatgctgaatcaggaaagtagtaatctaaaaatggcagcaaagctttgcagcttccttagtttcattttgattatgtctcatttagcatgagtgactccattttgatttggtctggtctgttggggcctagtgcagaaagaggtctgatctgatttggcctaggtccaaaacaatggcctctcataattttaacagcaagatgaaaagaattacagaagtgggtggcggtgctggttgcacaacattttaagtgtatttaatacctctgaactgtatacttaaaagtgattaggatggtaaattttatgttatgtgtattttaccacaatttaaaaagtaaacccagtagcagcggctcctgcctataatcccagcaacttcaggcgctgagacaggagaattacttgagcccagaagttcgagattgcagtgagctatgatcacaccactgtactccagcctgggtgacagagccagaccccagttcacaaaaaataaataattaaaaattaaaaaaaaaaaagaggtgccattacctctaactgtggcgtctcttgagcgtgattttgagaggaagccagtgagaccaagaacccaccaattccggacacaatttcaggcctcactctagccagagttgccgggctcttgggtatgggcaggtcctgtttttcctgcttctgcagcaccagggcaatctacttgatatgggaaaagctcccttgtccccctcgcagggtgtgtgatgaggtgtggctcgattcttcagtgccctgctgctcagacctctaggggagcatacaggcgggcaggctgtggggctccgatcgcacagcagtgtctaggggtgaatatttacagctcctgaagccccagtgggcgggcgtgtgttacaggatgctcttttaggttgccatctataggcggtttgtgttagctcaattacaccccctttcttatcacaaggacagaaggatttctgtatcctggggtttcttgccctggcttacctgaagaatcggattacacgtgggcttggagaatgagtgcaaggttttattgagtagaagtagctctcagcagatgggggagccagaagggagatggttttcccctggagtcgggccccttggcggcccaggctcttctctgactgccccgtcaaactccgcatcattctgctggtgcatggcctgccggtggtgtgtcggtgcctgtcgttgtgtgctcttctgctggcatgctcctctcaacgtcctctcgaggaccagccacttgcgtcttcttctgctaatgtgctcctctccatgtctggctggctgtgtgtctgcccactagggtcttgggaggttttgttttgttgttgttgttgttgttgttgttgtttttgaaggagtctctgtcgccaggctagagtgcagtggcgcaatctctgcttaccgcaacctccacctcccggattgaagcgattctcctacctcagcctcccgagcagctgggactacaggcgcgcacgccatcacgcccagctaatttttgtattttcagtagagtcagggtttcgccatgttagcaaggctggtctcgacttcttgacctcgtgatctgcccgcctcggcctcccaaagtgctgggattacaggcatgagccaccgtgcccgcagtcttgggttttcgtaggttcaggatcggcgtatggcgggccagggaggtcttagaaaatgcaacatttgagcgggaaagcaggaatggggttcgtcggggaggagccttagccagggacccgcctttctctacccagcacttcccttcctccattccgcatcatttaaagggaccacgcttttcccttcccagcactccatatcatactgacctcactcctccagtcctgtgagcaggacccaacaaataagtagtatgagaaataaagcttagcatctctatttgaaaacacaggaaaaattgggggcaaaagttgtgttccatattggaatttatttgaattgtcacatccagtgtcacttctcttttgatatatgtcaagagcaataactatgaaatattacatataattgtttccattctaagcaattgaaccaatgttcagctaatagcattagtgaaagagaacactgcctgagcaatgtaaaatagcggctgatataaacattactagtatttggctttgaaatatgcttcttataaagacttagatttacacatggcagatttgatctcaaaaattccagcaagactaggtgccatggtggctcatgcctgttatcccggtgctttaggaggctgaagtaggaagatcacttgaggtcaggagttcaagaccagccctggtaacgtagcaagaccccatctctaccaaaaaaattcaaacaaaataaaatagaagcgtaactcaagagaattgggaggcggtcttgcctcgttatcctggcgtttacttcccacccctctgcctactggctgctggctggcaaagattgctagtgctcctaatggatgcaactcacaaggtcaaacttttgcctcccaatctttcctgactcagagactttcattttgtgttttgtttgggattgatttaaagtgcttctctcgctaatgtgtaagtttcatgtaaaaatcagtgtaaaaatagaaaactgaaaggtcaaattaagtattgtgaataatgcaagtgctgttaaaattaaaagcaagatttgctggaagtgatgtgccctagattgatagtagatggaatctatttgtatacctcgcagattattatgtgtgagtgtattgttcatttgtcgaccatcatagactggcttccttcttctacttaacctgttttcatttagtttcttttttttgagacggagtccctctgtcgcccaggctggagtgcagtggcatgatcttagctcactgcaacctccacctcctgggttcaagcgattctcctgcctcagcctcccgaatagctgggactacaggcacgtggcaccacgcccggctaattttttgtatttttagtagagatggggtttcaccgtgttagccaatatggtctcgatctcctgatctcgtgatccgcccacctcggcctcccaaagcgctgggattacaggggcgtaccaccacacctggctaattttttgtatttttagtagagatggggtttcaccatgttagccaggatggtctcgatctcttgaccttgtgatccgcccacctcggcctcccaaagtgcttggattacaggcgtgagccactgtgctccacctatttagtttccttatggcaggtcttggtggtattatggagccagacagaccagacttcaaaccccagtagcaatgccacttacaagctgcgggagcttaggaacttggcttattgtcagttttgacccttacttgtgccacctcaaaatggcattaatcacacctccttgataaaactgttacaggattagtgattccatgtgtattaataagagcacattatctgttccatcttcttttatcaattttgcaataactaatacagcaacataaatattgtgattattttctttggcagtaagttttgtactgataaagttaaatagaattattttattggatttggggagtaaagaaaagcttttaaagggagagattttaaaaaaacagcttttaaactaagcacaagtagttatttaagtcttgcatagttat

SEQ ID NO: 1883243 - DNA, 4001 bp, Homo sapiens
atcttccaaatcagctcagcagcctgggagacgattgaggagagttgcctttaagaaaaagcagcatctataaaaagagctggatcaaaagtagacgcccgatcacacacccactgtggctgggctgacaaaaatagccacttgcacagatttagttcacttcaatgtcaggcttccccctccaaccaccctgtcccccttcccacctccaagaattcagtgctcatagcaggtgccttccgagtcatccacaccaaacggggggctacatcaaaaatcaggggctacaatcagaaactgcagcttggggtgatcagctcagaacactcctcttccttgctgtcctaacgactaccttcctggaaagggatggttttggagtgtcaacatgtagaacatgtctacagggtgccgggtaccattctgaatgctttacaggcaaaacttcattgagtctgctgacagtcctatattacagtcattataatccctgctttacagatgaggaaatgatgactcagataaatcacatattcaagggcatatatttaattagtggtagagtagactctgaacccagatctgattgcagaacccatgctttcacccattatgctaggctgcctcctgtttggtcaagaatggaagactcattgcatgtcctggttgaaagtccatcctggttgaggtggagtatgtcaattatctacactttgtctcaccaaagccaaagtcaaaattcttgaatctagttggcttgtattttaaaaagacaatgtaagtgaaaagtaaataaagggatatcattttgctaaatctttatttgaaaactgaacacactatgtgaacacatagcttaaaggtgataaatgaagttacaactcttagtataacatctgctcagactaaataacaataaccttcacgtttgtatgaccttccctccttctgttctactttcttccataccttctctctattttcccctccttactccctttctcttacatgttaatttatcttttcatgcatttatctgttctgtttttttttttagcatcttcaacacatcaggcagagtgctaggtgctggagatgcaaagataaaattactactctcaaagtgcttacattttagttggggagagaggtgagccacaggtaagtgatagtgcaggatgatatactttatgacagggacatctcatggagtaccatcatagcaccagggctgagtaggcagcctagtcttagagaggtacaagatgctcttacacatcttatttttaatataatgccttatacttaatattaatctcaagcatggttgaaaaacagttaatagatggaagtcatgcttatgcaacctactcctttccccaagtccacaggatcaccagcaatggctgaaacatctcagttgctgtaaatatgggctggctaggtgcttctaagtactttcttagctcatcaattcttgcagtcaaaaatcctttgaaaaacaaatctagctatcaactaatatctcaattctgttagtcacatattcttgcaatgtctaaatgttcaaaggatagaaagtgaccagcacaatgttgccagacatttcctagaagcctgtgggctgcctctcagcagcagagtcagggaggagtgaagactcactacaccactacagcttgtcacacaagcgggctctgcctcacattcacttgtaaagttggagtttgagttgacagaccgataaactgtagtgctcacaggttctagctaaggagtagcaccttccaactaaagacctgcagctagacatataataagctgcctctgaatagacaactgtacagacaagtaagaaagctactatggcagacagctcaactcccaaggccaacagaataaaagaaaacatattctgtgggaaataaacaaaacaccctgtaccagatagaatccacttggctgcagtgacttccaacagaggcttcctcttggcatctgaaggaggagattcagcagggaactcacatctaactgtgtagaaaccttttctattctacaaagattaattagctaaactcatgggtgctaccagatgccacatatgacttcagcagagacaatctttaggcagctggttcctaggaaaccaaagtggccccagactcacaagactgaaattggcaaagatctagcttaccaggcatgacatcaaagaatcagaatttctaaaatcaattatctgtacaaacatagaacactttccattagaagttctgtgacatatattgatttatgatctgtttttctctcctcttcatttctcattgttgtcctgagaggagtggccttagcattccacattgcctgagaggcaacggaagctgagaaaggtcaaatgatatgttcacactcacattgaacactgcctctcacttgtgactaagcgccacactgcatcacagtatttatccttgaggaagtggccttgcccaaagcagctcctaaactagtaacttttatatgaagctgctgtcttcttgtctgtgaaatatttttaaaagcacagtaacacttggttaatgggcaaactctcttggcagatacttccatgtttaacatacaatgatgattaatgttcaaaatgaggattgccagattctgaaatgccttctgaatcattaaaagaaattaattatgtccaatatggttttgtcttcagtgtatttaattgtatgttaattcttaagtgaactattcatcactgatatatatgatgactttcttgcaagtgaaacatgtgagtagccaaaacatttcatcctctgaaagtataggataatacatgtacgatgcaagatgttttcctcttactctctccatcttccccactcactcactcacccttccatccaatccacctttatagaccagttctttgaagtgtgagtttctggccactgcaacagaatcattcaggatccacatctcacatccagcaatcatttcctagcccttagtgaaatgacacacaacagaagggaaggaataggaagaacggttaaccatggcttcctggtcaggaaagctaaacccctgcaccactgcttttgtagaggagaacatcttcttctggtatgaagttttctcatttttttttaatagtctaaggtggtttgttttagtgagagttatctgaacaatttcttaaaaatacgattataagaaattgtccaagttggctggtcttcagtagttcaacattgggcttaattacacgttatgattctgatgtttaaaaaattatatgctatattctttctctctacacatactatattttacttagatgatttaactctgccattttatctttggaggttcagtattcaaagtaaaagtatctaagaaagagctaattgcttttttcccttcacatcttaatatttattaaaaagggaaaatgaaaaaaatgacattgactgtgaaggaaccaggacaaatgaattagtttgtgagttactgccttattatgaactcagtaagactttgctagattaataaaaaaggcaaatcacaacaggtataattaatcaatcattaagataagcatgatacactgttatttcctaatatgattttagtattcaattgacatttaatttgaaattaatacaaattaatctagatttcatcaaaggctcttttagatatccaggttaaaatttattgaaatgtatttggaatggcagttgactgcttacagaaaagaaaagtcgcaaggggagatgcatcgaaagcaaaactataaatgtacttttggctctagttggcccttaacaagctcaactcctcccccaccctctaggcgacaatgaaagttttgctactaatgtatagcataagttctcccctcaggagcagacagaattgggggcttcctatgtgggatgatgtctacgggcatcaagaaggaactttacattaaacaacaccaaaaa

SEQ ID NO: 1883244 - DNA, 4001 bp, Homo sapiens
atcatggctcactgcagccttgacctcctaggctcaagcaatcctcctgcctcagcctctctagcagctggaacttttcaggtgtgcaccaccatactcggctaattttaaaataattttcacatttttttttaatagatacagagtcttgctatgttcctcaggctgatcttgaactcctcggctcaagcaatcctcctgcctcagcctcccaaagtgttgggattacagacgtgagccactgtgcccagcctgtgtggactttagaacctaatctctaataaagttggactcctctgcctgttatgctgtccactgactatccactaattcaatctgtggcattcactaactcagtaccgtgtgttacaaagtccctactatgtgtcagtaactattctacacaccgaaactagagagatggatccaaagaagtaccactctcaaagagggaacaatatcttcaatatctaatatttgtataatgttttacatctacaaagtgttttgtaatgctgatccagttttatctacccagcatctctcattttctgggattgcacctctgtcttagcttgagctactataaaaataccatagactgggtggcttaaacaacggatgttcatttcccaattctggagctgggaggtccaagatcaaggtactggcagatttggttcttggaagatcctctttctggtttatagatgacttttcactgtgttctcttatgacctttcattggtgtatgtgaggaaatctctgtcttcctcttcttaaaaaggtgcaaatcccattttgaggataccagccaagatctcatcgaatcctaatcaccaccaaaggcaccaactcctaacaccagcactttgggatttagggcttcaatgtatcaaacttaggggcctacaaacattcagcccgtagcaaccccgtagcacccatacctttaggaaatactctttcccacactgcaatcctgtgttctcagtgggagccatcacagtttctaaactgtggctcccctggtcatatttaattgactgaagtggggccacaaggcttgagttgggtcagtcatgataatttttgcccactgtccaaactgaccggtcaatggaagagtacccagccccaacctggccaatcaaagttctttccaggatttgtccaccagaaactacagaaagagactacagaaagtgctgaagctctgtgatctgtggcgtgtgaacagtagctggccatgtttccagggaggaatatggcaccagtgctcagagggcagcaggagtgtgaaggatggagagagagcctcctgcagcagctgtttctgccaccctgagggcctccataccgctgcctcttccagggcaataggagattacccataaattcttccttttgactgagctggttcaaaatggttttctgggccagacgcagtggctcacacctgtaatcccagcactttgggaggctgacgtgggcagatcacttgagttcaggagtttgagaccagcctcgccaacatggagaaaccccatctctactaaaaatacaaaaattagccaagggtgaaggtggtgcacctgtggtcccagctactcaggaggctgaggcaggagaatcacttgaaccagggaggtggaggttgcagtgagccaagatggcaccactgcaatccaacctgggggatagagtgagactctgtctcaaaaaataaataaataaataaataaaaataaaagatggttttctctgtgtcacttacaaccaaagtgcctgagatattctttttcagacatcttttcattttctcctcaccttgaggaaggagctcagagaggttaagtgaactgcccaatatcccactgctccagaagagagcagcaagaattcaaatgctgcttcacatcctggttcacgccctcaaaagaggtttcccgccctggatgccagcctctctcacaggtgttttctgtactctcagtggtgtcttttttacagcccagagccgcacatgtcctgtccgtgttccggtcctgcggtgactcacagtcacatcacagtgcaggcagacgctcccctgacagcccattggctcttcgttatctgactcctgcctacctcgcccagccccctcctcctccctccagctcatgtgtgctccccatccaaccccctgcgtgagtcacatgctgctccctcggccagagcctttgtttgcctgccttggaggcctggcatatgccccagtccccacccacccaggaagcctccactgccacctaccacccaggcggagccccggcctcctccttcctctgtgtcttcctgggatcgacctccaacccagcagctgtctcattgttttcaaattcccaacctctgccttccagaataaaggcatgtggggacagggacaggaacttcatctatctctagccccctgcacaatccctgccacatagtggtattcagtttgttgctcaggggataaacaagagcaccagaaatatgaaggtcgatgcaaatatcgagtattcatatttctttaataatccacattgtttgggagtcaactgatgtgatgctttgaagccagtgaaagctgaacgggcaaatctgaaataccttttcagagattcatctgcactctatgtacccaattaatgctgagccattagtcctttccgaagctgccaggatctattaagccatttaacttatccttccgcacttcaggatcagtcccaagggcattttttcaggcctgggcagccaaagtataaatgacttaagtggtgagctttctctcactccccctgggaccccagtcctccaaagcagagctttaatggcgctaaagcactgtgaagcgaggaagcgcctaaagctgccactagagtcggcctcaaccctgaaggaaatcctggtttggagcccttgctcagggcgggccttctgaataactgcaacaggaaagcaccctctgtggggtgattggaatggtcccaggaaagtccccaggcctaaggatgcccctcaggaattcacaacagtgcttgaaatcccctccatttatcacttaataagtatttcttgagcacctactaggtgccaggcacttagggattctgacaggaatccttataggtttgttattttgagctaactgaggctttatcctgagctcaaaagcaaatatctcttggaggataacccactgagcattatcaagtcatcaaataccatccttcccaggacaccactaaggaaggtggcagctgtatggggagggtcttaggactcatatggatacaagttgctggggaaaagaagaggagtgaatcctgtggaacacaggctaactccctgtgtcatgagtggctgccatgggtcaggtcaaaggcaacttccatttccccacccctgcagcctcatgaaattgcagagaaacaagcagggtgggcatgtcaaatacacctcgtttatcagattcgcctatattcctcaacctggtatcccccccccgcttttttttttaagatggagtctcgctctatcacccaggctggagtgcagtagcgtgatctcaactcactgcaacctctgcctcctgagttcaagtgattctcctacctcagcctcctgagtagctgggactacaggcgtgcaccaccacgctcgactaatttttgtatttttagtacagatggggtttcacctattggccaggctggtcttgaactcctgacctcaagtgatccacctgccttggcctcccaaagtgctgggattacaggtatgagccaccgtgcctggccctggtcccatttttaattctcttaagaaatgctttagatctgcaagtggggtgtgcagatctaagcttcctaggtttggcatatagtttagcctctgtgagcaaaacctatttagccaggaccaactctaagttgcacccataataataacacaacagctagtgctct

SEQ ID NO: 1883245 - DNA, 4001 bp, Homo sapiens
ctaagcaagtcagctcctcgatttgcctgatgacgatgaatatgaatacaggctttctctccagtacagttgctcttcatcaaaaacaggctggctctaacatatttcacaaacacagaaaagtgtgccaagacacagtcagcaattctttttaatttttgagatttaaaatattactgaactttgtttgagttttacatttctcatggataattttactgtgaaatttatgatgctataaaactatgtttatgaagatactatagtaggtttcacatatctccatatcttatattggtaacatttaaatttgaatactacatctttatcctttcataaactagaagataattgttctgatgactagcagaagaagctggcaggaacgatagatttgccactctttgctttctgttatttgtgagtctaattactctagttggtcaattaatggcaacacatgacaaaatcttcctactaattgactctcactattttgttactgctgaagcttcctctaattttgtatgtgcatatgttaccctacttgtcatttttttcctcctaaccttccttatcagaaagcccatctcaccaacttcacagtcagataattcttgttatgatcaggaaaaaagcaaacaagaatgaatgtgacgccaattaatataattactaattagaagccacattttgagggcattaaaacagaagaagagtagaaatgataataacttggttttagggaagctgttaacatataaatagaacccaaaatggcaccactggtagttttccagggacttaatatttctgacacacactcaatttgtgcccatggataagacatactatattataggagaatcaaagagttacatatttggaaaaatcaggttaccaaaaagaataatgacattgtttaaacaataatgcattaaactttccttgtttattatgctagaagttgtatgagattatctgagtaaaagcatttcaattacttcagcattgtgggacatgaagtgtaaaagaactcagaacatgggaaaaaaaggaaaaagagaaaggaaatggctgaaagattaattacttggctgtcagctgctaggggagtttatttatgttctcttaatattcataaggctcttgtcaaaatggtattattaaatacccattttatagaaaagggactgaggctgttcaactgcagtttatttgatgggtatttatgcctgtgatggggacagctatgtcaggaacttcaattccagttaaagtgaaacctggcagagacatagttttgatccaaattttgacagtagtacaatgttgcttgtccttctccgggatggtagtctgtgtttccctgtaacattttgtctgatttgtttgtaccaactatttggttttgtaaatttatgtgacactttgttttaagctaattataaatgtaaattagactctaagatgtcttttttccactaactggttttgtagtagcaaaaatctgaaattacatgcaaaatgctgtttacagttgttttagtaaggggatgcagagcagtcagagtgagttgtcagattctcaaaacaaaatcaaattatctaatattttacattaaatcaggtaatgaataccgcttctggatccaaacattggtttaattatttataatctttgcagtgtccctaaaatatctattatctccaattaacactaaggaaactgaggcatagagaggtccaagtaagtggcagggatggaattcaaacccaggtcagtttcaggcttgaactccactaattctatacctttcactgcctctctcactgtaggtaattgtattagtctgttttcatgctgctgataaagatatacccgagtctgggaagaaaaagaggcttaattggacttacaattctacatggctggggaggcctcagaatcatggtgggaggcaaaaagcactcctttcatggcagcggcaagagacgatgaggaagaagcaaaagcggaaactcctgataaactcatcagatctcgtgagaggtactcactatcacgagaacagcacggcaagaccacccccttcccccccgcccgaccacgattcaattacctccacctgggtccctcctgtgacatgtgggaattctgggagatacaatttaagttgagatttggtggggacacagccaaaccatattaataatcaacaaatgttcacgtatttcctttacatcaggtggagtaaaagaacaggtgtgtgaaagaaacagaatcaatcattaagcgatacttaaaccagtgcagattagttttaatgtaaatgttataataataatgctagtcagcagttactggatattcatattatgttagaaactgtgcatttaatacattatgggtttgtttgtttgtttgtttgttttgagacggagccttgctctgttgcccaggctacagtgcaatggcgccatctcggctcactgcaacctccgcctcctgggttccagcgattctcctgcctcagcctcccgagtagctggaataacaggcatgcgccacaacgcctggctaatgtttgtatttttagtagagacagggtttcaccatgttggccagggtggtctcaaactcctgacctcaggtgatccacccgcctcggcctcccaaagtgctaggattacaggcataagccaccgtgcccagccctttatgggtatttttaaagttaaatctcacatatatactaccgactctaggaagtagctaaggtgatcaaaacatcaacatgatcagcaattaagtggaaaggggttcctgggggatggttttgaccaagacattaaggagagaagggatgggcagtggtgggaagactgagaagctatttatagcagggagatagcactaagcatgcattgcttgcttaagaactgtggaccctgataacctaaaaagtgtggttttgatgaaaactgaagagttatacctttatgcagtttaaaaataatagactgatatctatccatcccttcatgtttgaacataactggtttggagatgtgttgaaatgactgatctcaagttctctttcaaatctgaactaaatgtctgtgtgatggagatagaggctatggagctgctttcccgagctcattgatacagccccctcactttcgccagtgttttacattctggcaaaccagcatagttctttttatctgtagttattatacatctagttgagaaaacccagtttgatctatttataccaaagtacaaatgaaatctgaattcatctgattagttcttcctgtaaaattgtgttcatttctatcacatatgttgtaacataaagatttttggtgatatcctagtcccaaagtgataacctagatcatctgactctacattctccataggaataaatcatacgaatctctctgaagtaatgttataattaattcctaaaggtaatttataattatatatatgctactttcatgcatatttgatatcattttgactttcactattcatttatcatgtttgcaagccttttgttaaaaatagctggtacacaaatcatttcctgattgccacatctggaaccctgattatatttgcatttcacagtcgttagcctttaaaactagagcagaatctgggaatttgcagacaaaacagtgcttccttctggcagttgcataaaaagacatttttaaatctgcatttctgtttaaagaaaactgatttattttcattctaaatttatataacactttctttaaactaatcataaaatgtaaattaggttaactctaagctttttccccaccagaacaaatgacagtaacattttgtacaaaaagaaaacgtttttctattcacaccttgaatcattgctctccctgtctttgaaagttaattctgattaagatgtactggtagctcattgaaatctttgacaaagccagcttagctattctct

SEQ ID NO: 1883246 - DNA, 4001 bp, Homo sapiens
ctgcattgtaattgctagttggggctgtcaattgcacttgagacaaatcataggcaagagatcagacagcttcaggagccctgcgttctctgatctatctgccttttaattgcactggaaagccttcccagcagctcccatatgctgcttctttagaaagatataatattctctctggataagaggaaaatttgttgtgctttgaggcttaattggaggtttttgtgatgggacttgctgggttctctagaacacaccaggcaggcatgttgccccagactctcaccttacttctccgcctctgaattctcatctttatctaacttctcttccttctccttcgaaactatcttattcagatttgagcccgagtcacagggcttcttttaagtcttccattgaacaatgattggagtgctctgaaaatcaaaggaaaatatcacatggcagagatgatcaaacccagaactataagcccattatctcttgaaaaaatgataccacattcaaacttggaagcccgtgagcaaaacgttgtactgtttctgctcagccaagctcaggtcctaaagctgggtttgtctttcttggacaacacaaagattcaattaattatgcaggaatgtatgattgttcacaaaaagatcattatacctattagtaaaggaaacctcgactggtgatgggtgcagcccacgtactgtagcccgtattccacataggaactaacaacacaattacacttacaatcgacatttatgtaatgtatatagaaacagaagtgtcttttacttttgtattatggtttaaaaacaagcatttactaaacaaacaaataacataaaactgattatagaatttataaaacaagtaaaaacatgaagttttcagtgttgtgaagttatttgatatgccatttaagaatagttgaaatggcaattatgaagtttgttctctttttagtaaaacagatcctctaaaaactcgttctaaatagtattttattactctagttggatgctcttcaaaacattaaatttgaacttgttttgtaagaatctaaaattcaggctggatatgtcaacttaggctgcagcagaaggttttacggtggagcaggaggatatctcactccagctgctaggaaacagagaaacaagcctgatattatgtgttaaatagtaagtaagtaaacaattaacgtggctgtcaggctctgtctgtgttcttaatcctgtattcaccccacaggctgagaaggcacactcagagaatcagcccagctacaacctaatggaataaaaatgagctaagaggaaacaggagcaagaaacaaatgcattaaagagagagagaaaaaagagagcaatattctctaaaaatcatcatgtatatttgtacacaaaatacacaaagcaaatagatgtgagggcccttggaatttaatatatggctgtgtcctggtcatttctctgtcacagaaaaaaaataagccctttcaaagccctggtctgaaggaagagctaacatcaaacaacctcagaataaccaggagattaaagcctgacgctattcaacttcctgccttgtaactaactaatctccttagagatggaagaagacgaggagccgccattgtatcagaaaagctttccggatcagaggcagcagcagcgtggcgtattaaaaggagcacaggaccaggagtaagaggacttgcactgctgcccctcctaggtcagccccccagaatcctgtgcagcccacacgtcccctctctagaggttaactcgatggccatccccccacacggctcccctgctcagcacacctgggagtagcctttgacacagtcagcgcggaggaaaggctttctggcagaggaagaactcggcaccatttcaaaggctccttgcagccgccttctaccgaccactcatgaggccaagggcacctctaacatttgcgtgactctcgactgttccctagactccatctttaaccgctagtttctaagcaatccccggtcctgccagctcccgggtctggctctccttttgttccattcccagtctagccttggcagttcctggtcctggcctcagatgtccgccataattcaggggcctggcatggcaacagtactttaactagaaacctagaagtattttggaaaatgactatgagcaaatatgagagggtaaagccacttccacaaaccagtaatgctgacccaacttccacaaactagtaatgctgaccaacagacacagctttctgttatttggtgaaacttaggagaaattttgcagaaagttttaataccgctcctgcccaggccccctccagaaaaagtcagatctgtttatcagtcagtcttacattcataaccagcttatgaaactggggatattattaatatttaaactaaaaaaggtagtatctgcaaatactcaccttgcagtaccctcaaatactcagtacatcacaaaaagtaaactacaatattataatgtactcaaaaccacccaaaaggtactgatctacacagtgaaaaaatactgatgagttataaaagcaaatatatcatcaaaacctagggactaatattccaaggtaatgtaccattgaaacagaaccataagaataatcatattctgccatatatatatatatatattcacacacacacttttttttttctttttttgacacagagtctggctctgtcatcgaggctgaagtgcagtggcatgatcttggctcactgcaagctatgcctgctgggctcaagccactctcccacctcagcctccaagtagctgggactgcagacatgggtcaccacacccagctaatttttggtattttttgtagagatggggttttggcatgttgctcaagctggtttcaaactcctgagcccaagcaatccactcgcctcagcctcccaaagtgttgggattacaggcgtgaaccaccgtatccggccctatatattttatagttaaaatatcctaaccactctgtctcctctccatcccccaactgaattctatgcaaagtcataatctttttttttttttttttttttagacagggtctctgtcacccaggctggagtacagtggcacggtcccggctcactgcaacttctgcctccggggttaaaacaattctcctgcctcatagctgggtttacaggcatctgccactatgcccagctaatttttttttatttttagtagagacggggtttcaccatgttggccaggctggtcttgaactcctgacctcaggtgatccaactgcctcaccctcccaaagtgctgggattacaggcgtgagccaccgtgcctggccttcataatcttctttctgtttgttatttttcaaaaaacgggcaatcacttgaacaataatacgaagattgcaaatattcaccaagcagaatttagcacaaggaatttagcacaatgaatgcctgttgagtgatgaatagatgaataaatgaatgaatgaatgaatgagcagacaaatgaataaaaattcaactcttgtgattgctgctgaaaaaattcagaaccagaatctgatctatttttttttaaacatctggtagttcagaagacttgcctcagtgtaaggtggcatttaaatgatagtccagaactattttcaaagtgaacagaaacgtatgattcaggttcattttaaaagtcaaactagtttgaccaggttggctcttttcttcccgtgcacttgactcctgcgctcttggcgctggaagtgattaagaggtgtgagccatcccactggagctgctgtttgttcacagtgatgaccctggaggccgccaggctgtttctctaggcaaccaaacttacaaagaactcaaggaggcaaactcttgattatactgtaatgctttcagaagcaacataaggcttctcttgaaaatgtctttgtgctctatttttttttttattaaaactttaaag

SEQ ID NO: 1883247 - DNA, 4001 bp, Homo sapiens
tggcctcattcccaaagatcattcctatcattcctgttttttgtgagttcgggcagtgtcactgactaagacaattttctgtttctcatgatttcatgagcatcctcgtaataaaccccaaaacaccctgagcacattgcttctccttgccacatgtcctttctgctcgattaaaaagtgtgttctgtcatgggggaatgatggccggtggtgtgagggtgaaagaatttaccaagacagttgtaggtaaaggaaggcagatttatttgagaaagtaggaaaatacgtggccagagagacaacgggcaagtccgcagaagctgactgtgaagaaacaaaggctggctggagagtgtatgggatggtgtgtacgctgtctgttgaaggaggctttgtgcagcactggtaacgccaaggttgggctgcagggagctgacttgcaggtgtctggtgagggttgggcacaggaaaattgtgagttactttcacaggagggctgtgtgtcctggaccatgcagaaaggtggacttgttgctcacttcctttctctttttgctttcccttcattccaccagcctggctcccttttccccatggaacgcccatgttccatgagggctttcttatggaacagagaaacagcccatgcgttagcagaaaagcaagacccagaagggctgattctgagcgatgtccaggattttcgtgggagaggatggaggcaactttagggggactggggagacatgaggcaagagaattgcagaggaagcaaatcttacagggatctgggctttctcctgaggttctggggcccgtttaagggattaggaatgaaaaaatatgatcaggtttgggattgctggataaaatgttgccgcttcatacaatacacactgttatctccaatacacatgagtgtctccatggaagtaaacataaggtatttggggtctcagagcaactctcttctgtgaaaatgtctgattcctacatgaccaggaaggaaatccatctctccaggaatattcacccagccaaaaatgtaaagcagagaaaaagaaatttagacacatcacacatctagtgcctagataaaggacctcccccaaccccatcccccgcaacccctggaagaacaacatcaacagtgattttcttaacacaaaacacaacacgcacacaaagaagacccagagctggtgggggcttttgttttttttttttttttgagacggagtctcgctctgtcacccaggctggagtgcagtggcgcgatctcagctcactgcaagctccgcctcccgggttcaagtgattctcctgcctcagcctccagagtagctgggactatgggcgcacgccaccacacccggctaatttttgtatttttagtacaaatgaggtttcaccatattggccaggccactctcaaactcctgacctcttgatctgcccgcctcggcctcccaaagtactggaattacaggcgtgagcgaccgcgcccgggctgatgggggctttttaaagacatgtgtaatagcacacaaatttctctctcaggaaaaacaatctctaaagaaaaatttaatggaaaattcacaccatgagtatcttacctaccttaccttggcccgagtttcacaaatacttgcttctaccccacacagccaggcactgagaagtgtacagaaagactccaactgcccgagattcccagagaagcagaacacacagagccacgacgagaactcaggatggaataaacttccaggtccatgtgagcttccaggacccagcccacatctgccaacccaccgtgtcctctgcttcatgtttaccctgcatccttttcactgatgccttcaaatatccgtgtgtgcacgggaacagtggttatgctgccaatttaaagaaccaaggcttcagaggaaaggaaactcatgcgtgcccccaccaccgactccccggttcctgctggttatttgtaaaagttattcacaggaggaagagaaagagccttcgtgtgtgattccctgctcacatcacggtggggtgaaccaaggttctctgtgcagcttcctccaccatctgttcgcactgccttctatcggagacttggcagggaaacactcactgtttttcatcccaactcaaagacagtgagatttttcatacctgcacaggaaccatgcaagttgtgattgaaaagagcatcatgggatgcaaacagaaagaaaagcggtgaaggcgccaagctgcggattctaacagcttccagaacgcttggccataagtggccgtcagactgcggagttccatttccttcttttctttacaggttaaactctgtcaaatttgatccaactccaacccaaacttctgttgaatgaaatgattgttttctaagctccagctggtagcgaactcattctgagacatattcagtataactgaaccgcagtgtaacataagggggtgccttggcctgaattttcctttccttcctctggttctcagtccccttcttctcttcctcccttccttctcacctctttcttttcagggttttttttttttttaaaccctttgttaagttcacttttcaggcctcatttctgcttcattttcttttttttttttttttttgagatggactctcactctgtcacccaggctgtagtgcagtggcacaatctcggctcactgcaacctctgcctcccagattcaagcaaatctcctgcctcagcctcctgagtagctgggatgacaggtatgtgccaccatgcccagctaattttgtatttttagtagagaaggggtttcaccacgttggccaggctggtctcgaactcctgacctcaggtgatccacccgccttagccaccacgtccagccttcttcatgttctagacgtctttcaccctttcctatcttcaccctcacttatttacacttcactcttttgccttttgtttctctcttctttcttctgtcttcttgtcccttctcaatcttaatgtagagagaagctacaaactcaaaaccaggtaatgttgaaaatgttaccaaacgggaccacacagcactgactcatcagaacagacactagcggttgaactgcagcaaggtctagaaggtttcccgctctaccactaaccagtgggttgtggggaggtctgggggaagcaggcaccaggcagggagatgagaaagccctcagaaggctcatggccatggctaaatactacgcagtacagaagtatttctatattttaacaatcaatatagctgtacagagtgtaccaaattgagaacaagaaaaacaggtcctaacatcccagaaatggcctggttctgtcagccaggacttggtgctgctaggagctggtgttggcactcatagtcttgttgaacacagacaatttcacagaaccccaatatcacgccagtccactccacaactgtaatgaatcaaagcaaaaacaagaacactccataaacatgcctgagcatggacaaaaatataaacattgttcaacgcacaaaaatgaccggacatccccctgttgtgctaatgagtgacagctgctgctttttccttttttcttttcttttttttttttttttttgagacagagtttcactcttgttgcctagtctagggtgcaatggcgcgatctcggctcaccacaacctccacctcccgggttcaagcgattctcctgcctcagcctctcgagtagctgtgattacaggtatgcgccaccacgcccggctaattttgtatttttagtagagacagggtttctccatgttggtcaggctggtctcgaactcccgacctcaggtgatccgcctgcctcggcctcccaaagtggtgggattacagatgtgagccaccgcgcccagccagacagctgcttctttaccaatcagagctctggcctgattccttactcctaccttatagaggcctgtttaagatacccaacaataa

SEQ ID NO: 1883248 - DNA, 4001 bp, Homo sapiens
ggcagaggggagcaggtgggatggtttcctatgcctggaccatcagtttctgggagggaagaggcaggaagtagtgatggatgccctggactgaagactgggagggccaggaaggagccttaaaatttgcacttccagagagaaagtcggctggtgggattgacctcggactgacaactaacaggcagcatgcggtggagtttcaggaagccagaggtctggggtgccagcagcaacaaacccaggctggctgatggaagggcccagcctagacagggaagcagaggggctgcatggaaaggctcagggctggaggtgatgtgaagtggaataagcttcagtgggagccaggaggttgtatttcccgttgggggcggtggtggagggatgggggtgcccagagaggaactatggattaggcccaggccggccactcagagtgcttggcatccaggatgtgttaagatggcattgaggccgagcgcggtggcttaggcctgtaatcccagtactttgggaggccaaggcaggcggatcacctttggtcaggagtttgagacaagcctggccaacatggtgaaacctcgtttctactaaaaataccaaaaacaattagctgagcatggtggcgcgcgtctgtaatcccagcttctggggaggccgaggcaggagaattgcttcaacccgggaggcggaggttgcagtgagccgagatcgcgccactgcactccagcctgggcgacagagtgagacaccatctcaaaaaaaaaatagcattgagatcaataaggaagtctagaaaccaggaagctttttgcaaagagaaaacgccttttgttattctcaccgatggatattaagctttccctcacagacaggactacaagcttcagagtggatctgagatgaatgcgaattgctgtgtacctttgtaagggacagaagaccggattttcaaatttaaaacaaccattctgtttctggaatcagaaatcagtttcgagatttacaactgtattttttaaaaaatctgtcttcttagtggactcgggggggacttcacgtggcacccagtacacgccacgccaagccaccgaagccagaggtgtgtgtctggggccagagacgtgcattccctcagcaaggccggcctcagacgcaaacgccagcaccgccaccctgtcgcccgctgagaggatctggccgccggggggagggggcgggggggggggcagcgggggaacaacaaaaaaatcccagcataatgattattcccagggaccgttgggtttttttttccccaaggcggccgaaaaaacaagtgctccccttccccggaaatgagatgcacaggggtattcattccattccgcggctgggaagcccctgcggaaacgagtctggctgcatgtgcggcctcggtcccagaaatcaaaaagagcgtcccctgagcccacagcttgctcctccatgtgaccggcccctgggctggtggccactgtggacgcgcccggcgccccctctcccggctccctgcgggttccgcggagccgccggcgcgcagcccggccaggtgcacccggcacggccccactaacagcgcgcgcctccagccgccgggcactggcggccacgcgggcgagatttacggtggcgctaggcggcggcttccgaggccggccggcgcccaggctccgattacaggttcacactgggggcccggccggcggccgcccagcccccgccggcgcgccctcgcgcggcccggctccccgcctgcccattcttctccattcatgcggacgcccagcgccgccgccgccgccgccagcgcggccgccgccgtcgccgtcgccggccgcccggattggctggcggccgcggcgccggcactttcccacggcccgcggcgcgtgcggctcaccggaggcgctgcaggctcggccctggcgcgcggccaggccaatcggggcgcgcggggcggggaggagccgcggccgccggcgggcttgtgtcccggcccggcctcccgcgcctccccgccgcccgcgcctcctccttcccctgagtgcaggctggacagagcccccgcggagccgacgcaccgccgccgggcaggggcgggcgcggagggcgggggcgcggtccgctagagccctcggcctcgctcccgcccctccccggagcggctgccaatcagcggcgcgagaaaccggattggccggggggcggctgttgccctggagttgccgccccgcctctccgccccctcgcccgccttccccactcccccgccctccccagggccctgggaaggggctcagcgtgggaaaggatggttgagttttaaccagaggcaaagcgtgagcgggatcagtgtgtgcggaacgcaagcagccgagagcggagaggcgccgctgtagttaactcctccctgcccgccgcgccgaccctccccaggaacccccagggagccagcatgaagcgagctcaccccgagtacagctcctcggacagcgagctggacgagaccatcgaggtggagaaggagagtgcggacgagaatgggtgagctggcggcggcggagcggagccgagccagagcgggaggcgagcgcaggcctgccgcggtgacagcgggctaggacccttggcgcgccggtgccctgcgctgacctccgcgcgtcgcaggctggcggcagcctgcggccagggaacccctaggtgccttccagcccaagtggcaaaaaaagtctgagtgcggggagggtgtgggggcgacctctcagatcacctctcctcgtttaacggcgatttcagtttttgtttgttctttttctcttttcagaaacttgagttcggctctaggttccatgtccccaactacatcttcccagattttggccagaaaaagacggagaggagtgagtctctttacactctccttttatttttgttattgattaacggaaataaccacctttttttttgtctttgaaatttacagtcgtaatggtaatgccttcctttgttttgcttgccttctgcagataattgagaagcgccgacgagaccggatcaataacagtttgtctgagctgagaaggctggtacccagtgcttttgagaagcaggtaatggagcaagtaggtaaagctctcagcatagctatctgcaccttctgaatcttcccctcattaatctcatccgccttggaaaatagctgtgttgcttgtgcctagatgaattcgtacacagataccagcgtattttgtgaagacaactgattttgctttagtccatgctttacgatttacaaagcatgtatctttgtatatatgtttgcatattttaaattgttccccaaaggaacttgtgccaaatcaatcttttgccattctcatctttagggatctgctaagctagaaaaagccgagatcctgcagatgaccgtggatcacctgaaaatgctgcatacggcaggagggaaaggtacatctcctagacctagtgggggctctgaatggttggcaaagagtgagcagcggctgaaggccaggattggtgcagtagctgcctgatttttctttgggggtggggagagaacggtgtgtggtgtgtgcagttccctgtcagtacattttcgaatgcacatagaatcttctccagtgaattcaccaccccagctctctgcggattgagctagtgcatcttttggaaaaatacctattatttgtgaggtcttcaaaagttgtgacagccctgattcagatcaggtagctttcacatttgtccattgctattttgagaaaaagcatttaaaaacaatatgtggtcttatttttggtatacgggattttaaaaaaaaggtgctgccacatgcctcttgaggaaagaaatgtattctggttaagtaaaggaaacctaacgggagaccaaggtctgtgtgtatgtctctccagcaggaaaatgctttactgaggtccaagtgcctaaaagct

SEQ ID NO: 1883249 - DNA, 4001 bp, Homo sapiens
tcccaaagtgctgggattacaggcgtgagccactgcgcctggccccaatgttatcttttgatccgcatcaaatgaagataggatgggcggagaaatatggttttgtgaagactcccttctccattaatgccatgctcattcaggtcttatctttatattccagttcgttattttgctctgttttaaccaaaaaaaccccacacacaaaacaaaacaccataacagtttttgcatatcttcttcagttgaagaattgtaatgtattttgtttatgattgtaaagccaaggacaattctttttttttttttgagactgagttttgctcttgtcatcaaggcaggagtgcaatggcacaatctcagctcactgtaacctctgcctccaggattcaagctattctcctgcctcagcctctcaagtagctagaattataggcatgcgccaacacgcccggctaatttttgtatttttagtagagacgggttttgccatgttggttaggctggtctcgaactcctggcctcaggtgatccacccgccttggcctcccaaagtgctgggattacaggcgtgagccaccgtgccggcctagccaagacaattttataactctttgtacgtggctattacatgtaaggcaatctttcagtaatgacacattactcttaaaaaaaaatcctagttttcctttcaagtcaaatgtcttgtttgaataaacttatttaaaatgaaaataaattgatttaataaactgtgtgactcaggcatctcaatttgatctgagccttttgaactcagccatctgagttccatgaccctctgggatggcctgactcgtacgtggaagctaccattgcatcaaggtaatttcccaccccaataagtgttttacaagtaatatattattaaattcacacaacaaccttatgaggaagggattattattcttatcctgtagatgagaaagctgagtctcagagaggttaattgacccaaggtagcatagctaataagtgagggaactagaattcatgcccatgatgatatgactttttcaccaaactcattcatgtttgtatcttgaatacctaaacgtgatgcccgacacacaattattgtttgatgactttaattgaatctgattatttgccacgtggcctatagtaaattgagactcagttgcctagcagaatgtatgtggctattatttaaagttcacagatgaaaaaaatttcactcagcatttgacccctagtagttgctttaagaaagactgtctacccctacgctatggcaggtttgagaaagggctttcagcattttcaacgcttaaagtgagatcttgatcctatttaccatccttcagccagccacaaaacaggtgcatgctgttcaggtcatggcaagatcccgtcaatctttcagcttcaaactacttaaacaaatctctcttccattttatttttgttagaccaaactatttttttcaaaatatatttttttcaaaatatttgcctgactttagtaacgtgtccctctccccctcactcacccgcattcacacacacacacacacactttcccccagacacttccccttttcggttgtttacgcacgaaaccagccagccctttccctagcgaagtgtttggcggtgtagctgtcccgtccccggcgcttcccacagcaacagcgcgttctcttcgcctcccgcagtctctcaggacaggccaggctagcgcaaagtaccgtgttcctggaacaccacgagggcgagctcgggaatctcgagccggcctgcaggacacctgccgcaccaagtggctagagcccggggagggcgaggcgaggtgggacgaggcggggtggtgagcgggccgggaaggcgaggccgcgcggactctgggatagctcctcaggagtgggcgcccggagtgggcgagcggaggaggcggggccgatgaggtgaggtggggccagctggagtaggctaagcagtccagagcagggggcgtccctcagtggaaagccgggcgactgggcggtgcaacagagtaaggcggggccagcggaagcagggagatttccttaggccgcaggcggggaaatggggctggccggggtaggcggagccccgaggcaggggaggcgtggctggcagaggtaggcggtgccccaaggcaggcggggcttgccgagacagggataatcccttaggccacaggctgggaggcagggcaggccgaggcggggaggatcccttaggccgcagtaggggaggcgggtcggccgaggcggggagaaacccttaggccgcaggcggggaggcggggctggccgaagttaggcggagccccgaggcgggggaggcggggccgggccggcgcagggagagtcactcaatggacaggcgagaaagcaggaccggcgcggcggggcggggccggccgagtccctagagctgggggcggggcggacccagcggaccagcggaccacctgggtgctgtcgtagttggaggtggcctgaggagctcagttccctcagcgcccgtagcttcggcggagtctgcgcgatgggcgacccggaaaggccggaagcggccgggctggatcaggatgaggtaaatgttgctgttgcgtcttccccctcaccgcagtcacgccagcccgttagattgcaagttgcaggaccgctgtaggaaatgttattcgccgcggtcaggacaggcctgtccgcccgccctcgccgcagcctggcttcgtcgttgcgagcgccggggaggccgtccccggggagggcggaggaaggagctgactttgggtttgcgtcccgctcgctgctctgccccggggccagccaaggacgacgcttggaggcctcaggccggggtgagacttacccctgcgtttatccgcctcacgctctcccaccctccttccctgttttggagccctggccagggaaaccgaggcaaggaaagaggactgtggcggctctgctggagaggtgcataccatttgggatggtgacaaggagttggagaacgcgtgtggaaattgacacaggtggctggggtgaagatgacaggtagaaggggacacgaaatcctcatgacctcctcccagtgaaaaaatcagggtaggaggccagttttgctcaggcccggctccttaactaactgaatcttcggggtgtcactttcttcctttatacaatggaagtgatacttcagagagaattaagtaaaatgctttatgcaaagtgccacgaaaattgtaggtgcttaataagcccaagttgttcatccaagttgtttatgctgataaaagtacctaaaataaataaaccagaatttgttagactgtaggattgtatggtagtttaaactgttgctgtataattttcaaacactgtcattttgcaaatacttctaagccctttgtggacaagagaaatgctttttgtactactggaacctgttgctgtggtatctttgatttaatactgtgaagatttgggggaaacaaacgtttccaccccaagagattcatgcttggccctacatttctttagaaagttgtagattccaggtttgagattttattttatttaacttgatttttgtaagcatttagtaactaactgtaaatatccctcaagctttttcttcctgttttgaaacaaatgcgtttagtaccaacttccctactcaaaggggaaaattcagactgctgtttatgctaatggcaccagcagtgattcaggcttaacacctggatattacattttatttattactcctatctcaatgatacagacccgcaaggacagacagaattttagattcagaatgaattttagtggtccaaaagtttttaacttgagatgctgggttgcctgaagcactttgtttttctagatgccagagtgcataataggagacctgcatcagagtcacttggagtattttgtaaaaaatgtaaattgctggaccaa

SEQ ID NO: 1883250 - DNA, 4001 bp, Homo sapiens
tttttaaacatcatttgaagttattgaaaggaaatagactgagttgaaaagttattcttatttttttcctaaagctagaaaaaataaattaggctttttggcatagggaatctaactcaaactgaggggttagttttatatctagaaactacatgatttgaataagcagaagccatctaacaacacattgataactgacataatttaaaattaaccaataaaataatccagcattgtgttcacaaagatgctttcattagacactaattttatgctctgaagcatattttctttagatttttcaaactaaatatttaaaaattagaaaaattattataatcaacctaaaataattaacataaacaattaaaatgtttaacataaacaaataaatcgatttttcaatattttacccaactagcaggattatagtgatttaataattatttttgatttttaaattaagcttggttttgtctaagtaattctcattggtattcagtggagtaaatacatttttcactcccttttacatattaagaaatgaagattgacagaagaaacttgcttatgtcagagagataagtggaaaaatacagattatgttggatcattgtggaacatatgtgtaattggaaaacaagaaaaatatatacatttgtatacaaataatattaaactgtaaattaagtgccataaaagcaaataaaaaataaactgggaaatatttacagtacatattacaaaaagttcatttttaatgtgtataggtttccaatattcataagagaaaaagtcaacaaaagaaaaataaagtatataagcaatttgcagaataagtgtgcatgcatatgtatgtaggctactgatttcatattatatattatatataatatataatcaagctttgtaatatttaaaatcaattaaattaaataagaatattttattttaaaatcaattaagttgaattcgtcaataagttgaagtaaccaaaaatattcctttctgacttgagctataagattttaaatattttacattgttgatgaagaaataaattcaatgtttctgaaaaactaattttacacaatatctaagatggaacatttaaatgtgatttgaaacattaatttgccttctatgaataggtaaagggaaataatcagaatgaaggcaaaatattaagtacaaagtttctcattacaacattatttaggcaatagcaaaaaattgatgaaaattagagcaataataacagtactataatttttctgtaaattatggcatattcacattcttaactcttttaaagtcaatagaagcacatttatgtttcattttatctaaaataacaattaagatcgttcttttaactatgtctactttagaagtttagttactcaaccaatattcttgctaacaaaatatgttgattttatttaatcagagtgattagacatcactctgcctctaggtgacctacatatagaagactacatcctgagcttatatgaaatttgtgattcatctgtcttagtggaaccatgacccttattgatcatgagtttaaaggtaggtatgtgacccaatctggcaaaagcaacaaaatttagccttctgaaagcaaaacctgtttattagcgggttaccattttggaaggaagaaaataacctaggttcttagtagctttattaagctgcaaaactgctaattatattatgtttgaagttgccttacttttaaatctccagtatgtgagaaaacaaatttctcaatatttaattgagtttgagcttggatttaatgtttcaaatactcagtaaattccttataataactaatacttagacaaaaaaaaaaaaccttacctgtaaacactgtaaaaatgtcatccactcccacaagcagaatcctgaagatttttttcagaaataatagaaacgagaacaatgaatgtggtgatcacttaacagagcagcggatgcagaaaaagaaactgttgggggaataaataaagattcttaaaggaatatcacaaacaaatcctcttttgaacagaataattgctttagaggggactgtaaggaagactggaaagggaacaatcaaactattatattacagctttcatgctggatgccattattgatgtgaaggcacatttcagagctgacattcagtttatagagaaattttactgagtctataagctcctatttgtttgcattctcctttaaaagattctttgtggtttagtttgaatgtctttccctctcccccaacccctgagaaatttcgtatttattcgtatcaaaagtctggggtcttttaaattgctattaatatagtaggcctggattggccatgaaaatgtttcaattcaagcccaaaccaaaatgagactagccagtggcctcaaattctcagcagaaatgttttttcttgcaataaacgataatgtgatgggaaaagtttctttgacatttgtctatgtgggccaggatttcatatccagtttatacttttttgagcatatagatgtattatttttgacatttatgcagagatttttcagattctgcatgggtccaagtccccgctatccactcccatctcacaccatttgccaagctgtctttaaaaccaaaaccctcaatctgcttgtattggtaatgatagtggggcagctagttacttcaaagcttatgtatttaaccaagagtaaaggatttacttcattttctttcaagtgcagtcttttattttaaaatataagattctggaatatgtatctagaattttttagtttaatatttatatatttaatttagatgacagacttatttcagggtacctagtctgccattttgctagaagagaaatctttggaggaagaattgtcccaatataattgcttataaaatattaacaggaaaacaccatatacaatgtgtttgtatgcatgcatgtgtgtatgtcacttaggtaaagttacatatatatgtatgtatgcatacatgcacatatgtgtctgtacgaatgtgtctatgcaggtgtataaatatgtatatgcctatatgtatgcaaaattgacattgcatacatatttccaataaatataagcatgtttgtatgtgtgtatatacatagctatgtgtatattttaagaatgtattttatcaatctataaaatatattttgtcattgtgctaagatgcttagtgattttatattcctatttcttctgttaatcatcttgaaaatatataaagctagtattcattagtttatactaaaaagtaggttatttaaaaacaaaaaagatttttctaatttctcaaactgcaatttaccattctgtcctaaaaactcacataatactttagacttttaatttttttatttatctttttttttttttagagttaaggtcatattatgttgcccaggctagagtacagtggctgttcacaggtgcattaacagggcattacagtctccaactcctgattctcctgcctcagcctctggaggagctgggactataggcacacgccactgcttgtggttttgttttatatataggtctttatctgcttgtagataataagctctttaatgatgtcattcatgtttgttccatctttttgatttataggagctaataaaatgcaattccttaaataatattatacaaaagaaagagatggtttagacaaaaatcctcatagccattttagcaatactgaatctatgaaaaagccagtttgatgtactcacagtttacataagaaaccttgagaaggtatgggtaatcatgtttcaaaatagctccacattaataatagaaaattttagaaattattatataatttttaaatattaaaacctcttctgagttttgtgtttctatcttaaacttagaaatactgatgttttgcctcttaatttagaattaaccacgttttgcctctaattcgaaaacaggactactaaa

SEQ ID NO: 1883251 - DNA, 4001 bp, Homo sapiens
tgtttccatttgtaacaggacacaattggaaaaatctggttatttttaccaagcctttgactggaatggtgtgctttcctttaaagaatcaaatgacttaatggagccagtaaaagtattttggaagactgccttcatagtttccacagtccctgtacagggtttctgacctgtagtaagtaaagaatgtcactttctgacaggtccaggagcccacagtttatcttgaaaccccaagagtagaggaaattcacccaacttgtaggtatttgatggtagaaatcgatggctgggcttggctttaaaaaagtcttatctgagattctttctgtggaacaaagttccatcaaagccaatttaaaaaattctatatgaaaaataattattcttgctgtactttatacaaataatctgtccaagtataataaggcaaatcagccctactatgatttttctttagtaaaaatgggaaactggagacagaaagatcatgtttcaaaaactatattacacctcttgttatattctagtcttgcctcatgtttttcaatttttattattttctacagcttcggctgaattctaatttttcctggctacaagcctccaaaataatattttcacttttttcttctttcttttcctttttcccacattttttcctgatttgaaatcactgaaaactaagctgtgctttcctaaagccctgtgaactgaagctagacatcttaaaattcagaagaaaataacagcaacctacttacatatataagccactttcatacctgcctactgatgtatgacttcagagtaatatggcctatatcgattttccagaattattcttcagtttgttactgtttttctcccttcctccccctattttctctttacaggacatgagacttcacaaccttctaaccatgagctttcctaataacttagggcctacctgcctaggaataaaccattctagccatgcgatacagacaaaacctggaaccaaagaatcattttcttctaaaatgccttatccaaaacatttgtaaaaagaaaggaaagaaatgtgaaaggaatatatcttgggccccaaaatcattaagccagaaagaaaattcaagctgggaactacttggggcaaacctaccttccattcttttaaaagttatccctctactcccgagataattgcttatctgattgcctcctttagaaagactaattataaactcaaaagaatgcaactgtttgtctttcacctacctgcaacctggaagacccctccccactttgagttttcccacctttctggactgaaccaatgttcattttacatgtattgattgatgtcttctgtctgcctaaaatgtataaaaccaagctgtgctctgaccaccttgggcacatgtcattaggacctcctgaggctgtgtcatgggtgtgtatcgtcaaacttggcaaaataaactttctaagttaactgagacctgtctcaaattttctgggttcaaaatatctatctagtcttaagtaaaacacaaaatatgtagagaaaacagatgtttctgaggaactttgttactaaatataaccataacaattaattgcattattactactttccaatacattaaaaatctaaaattctgccctacaaagaaatcacaacatgaaggcattatttaaaacctctcctttttccattattttgccaatctctttgaatcatctttaatgcttgctgagattgaaatttacataacaaccagtaaccatctagttgttccccaatctcttcaccttctaacatctaaattcagggcttctaaaaagtactttaaactttggttgaagtgagaggcagtggtggagacttacttataggtgattttttcttcctgaggaggaaatacagtcttcttcatatacctgttggttccttccctctctgccttaggtgatccagctgtaaccatgatactctccctttcccccagtgcaagcagctgaactgtccatgatgtcataatcacaattccattacctcactgtgctggaggccttagaggaaggggaagttgtgaacagccctgggctctccttaagctttgcaaagtgttctggatagggctaattgaagaaccaagagagaaaggcccccaaactgttgtaaattctaggcttaaaaggtttaagcccatcctgcagctagaggaggggttcctgggactcagagcagaccctttaagaccatggactacatttcccagcagccttcatgtcacattggcgtcctctactggtggagaggggagtccttccaagagagggctgtagagggcagagcagggcaggagagcagctgagaggagccttggctaatactattaaggaccaggatgacaaagaaaaccacttctttccccccgaaacaaaacaaaacaaaagaccaaaaaataaacaaaaaagagttttgtatgtaaatctgtgtgtcagagttgttttcctaggaaacctgaccataaacatttgaagccaggaatcaaccaaagtagccaactctaaaatgggagtttggggttggatggcttgctggctggttggctgtgaagaccctactgttagtggtagttgactgactaataaatagcccatgggtatgacttgtggtagtggtataattattaaacttccgttggtgtttaactgagaagaaataccagtggaaaggaatatattagaaagtgcaatggctcaggattttgagagttctataggaattagtaatactaactttataaaatccagtgggtgctgctgagtttcttcaatgcttcagaacgtctggggatgattaatctccaattaaaacctaagtgtgaaagccagatggcctccttggcagcatgtaaagagactcatttcctacagctggaacataggaaaagctcaggatcatggctaagtcttaattatgagagaaggagagctccagagaaagctgtattctcaatgctagcaatatgttacactgaggtcagagacctgatagaaaggattgggactctgagacttcatatagagttatctttgtcaatgtattcagaagtcattaaacctccgactctcttggaacctctatacctgcagaatatctcagtcctctgtgttaaagctgaaaactcagctattgaagaaaatgcacagttatcttccttgttgaaaacatgtgctcccctcatcatctaaccttacatctctttctaagtgcagttttaatgattagcattgtattagtttccagtgtttgctttaactagttagcacaattagtgacttaaaacaacagaaatttattatcttatagtggaggctaaaagtctgaagtcagtatcagtgatcccaaatcaaagtgctgtcaggatttctggtcattacgggcatttcttggcttgtggtttaatcattccaatttctgcctctatctttgccttctgccttcccctcttctgtctgtgttaaaactccctctccctccctcttataggggtgcatgtaattgtatttggggctcaccctagtaattcaggataatattcccatctcaagattcttaacacatttgaaagacccttttgcctcataacatttttatgtcacaagcattaggacttaacatttttatgtctcaagtattaggacttaatatttgggggtggccatatttagcctactacaagcattaattcataatattatccggtatggaaaggaatagacatttttattaatggtacagaatacgtcataagtgaattgcagatcttagccaacaattactagaaggagacaggattgtatgtgtgtgattggattctgaaggtgctgaatcaagggtggaggaatgtaataatgaattaaggagaattttagactacataagatcactttctcatgatacagtaagcatcacattaaactacatgttttagctttttagg

SEQ ID NO: 1883252 - DNA, 4001 bp, Homo sapiens
tccaagaagaaatttacttttcacaatgggcatcattaccaggcagttcttggaaaataagcacatatagtaatgcgatatataagattcatgatatctattaataaatagcaaaagaaatttaatggaaatcatataaattgttctagaggaagaagttttttgagatagttcagtatagtggtgagagactgagcttgtgagtcagaaaggctagttcagatccaattctgtgcctggctatgaacctctgagcctcagcttccccatctttaaaatggagatagtaatactacctactacataggattcttgacaggcactcttaaaagtcttaaagttctatgcattttttgaaagtttaagttttcgataaatattagttattttgttgttactctatttggatgcaattccattgcctagtattttttttctttcggcaagcatttattgagtgcacactgtctactaaacactgtactggattctggggtataaacaagaataaacaaggtacctgttcccaaagaccatagccttaggttttacagaggtatggaggcaagatattaataaaatttacttgttaaatcaataaggccccaaagcaccatgcatttgtaatctagagtatgaatggcacatatggcaaagtaacatgttggcaacgagcctatgaatgaatagcagctggattgcaaaatcaaggagaagcttttcccctaccctccgaacccaaacaatccccttctttcatcaggtaacaagagatgacagcacagggatcaggtcctaatgcacagcctttcatggccccagtcctgcttttcattctgattagaggataaaggaaatgggtttcctggctggtctcatcctggtaaacattttgcctgctttgcagaaccgccaccctatttaagtgcaatttgctggacctgcagttggttgaaaacagcagggcctttgtcagtgaatagagctgtagtgacagggaggacatttataaaaatgctggtgtgtctcatgccccgtgccagctggtgctattagtgctcttttatgtgtgtcttgaaatatactgtaataaatctttaaaggaaagccaggacataatgagtaatcaaattcagtcctctggaattcattgcaatggtggcttctaaacgtgggtattgccccaccagaaatggaaaactgagaagttaagaaaaacaggttgttcttgaaaatgtatcagagacatttttggtaaagaatcatattggccctcttccagtggctttatttttattaagaactagaaatccatgagctgaaatacacagactgctggaacccagccttgatgtgaatcctgcatcttagtctgagttactattttaataaaaaagaaatacttctattaaaagtctctgggtgccccatcaagtatcctatatctattcaatgttataatcgtagaacttgtaccatagtgtaagaaaatgtctgggaagtgatgactgaaaaaagcagttttcttccagctggcatctacctgatgatcaccccatatgtatatggtcaaggtgcggaagagatctctcctattaaaaatacttgatacatttgggtaatacaatgtgttccaagttttctctttttctttttcaattttatgtgctatagaataattttaaatgatcaaaaataaaagaactgtggttaggtatgtatgtctacagaccacccattattctcccttctgggcaaagtctagatcaatttttccatttgagccggagcttcctatttgcaactatagagattagtgttgaatgctcggagctgctaacataggagttaactatggcttgtgggtcaattccagcttaccatctcttgtttgtttatttgcctagaagttagtctgtgtttattgtttgctgtaactgtaggtgtcagaggctaaaatttctgctggtgtccttgtttttagggggtccctgttgtcttgggtttccctggagactcctttataaatagaatctgagccttgcagttcttttcagctatcatcctctgttatacgggaatcctattgatatggcgctaaaatggaggtggtggtaatggggaagcacccaataaccctatgatttgctctcagtctttaatgactccatcattatagatttaagaaccttttaattcctttccttgtttatagtctttgctcatttttctgtcggactgcttaacttttgcgtgtgttctttatagttttaagaaattagcctcttgttagttgtaaatctgtttcctatttgtcttttgactttgtttacggtattttttcatgcagaaaaaattttaaatatcaataaattttactatataaaattattcacaaggtcttcagggtttttttcaccccttagtaaatgagacaggaaggctagatggggctggagttgggtatttccctttttccaggtcagatgggctctttctgataaaatcttactaggttaggctctggtaaaatagtctccctcaaagacaggtcgtgttaaggagaacagaacagtctgggtgtatttaaaaatggttacttttcccctcccctgcaggaaggatgaggggatttttctttgacctttacagtgcaaacctggttaagcttcagcaggtaaaactcatacaaatgtgcctcacccacctctctcaggctgggtctccaggagtttttaatttctgaagctaggccaggctcggtctccagtaattagtaaattatcctttaaatatgtctacccaatgttggctccagtgagatttctgccccaagtaagatataattctttgtatctaccccctcttcggttttagcagtggtgatttgatctgtaacctcacttctctgatagacctaagaattgttgattttcagggttttttttttttttttggcttgtttcttattgtgaggacaggagtgacaaataccatgatctttatttacagaaccagaaaccaaagtctaccacctgtgtttgtatagcttgtgagctaagcatgttttcaggcattaccaaatgattgaaaaaattttaaataattttttgtgacatgtaaaaattatatcaaattcaatatcaaacttcaatactgtgttcataaaattctgttaaaacatggccattctcatttgtttatgtagtctatggcagattgagtatttgtgacagagactgtatggccaacaaaacttaagttatttatcatctggccctttacagaaatggctgctttttagtacactctagacataggtcctggttaagtttgaatcccttgacactgtgcttgagttgaaaatcaaatgatgggcacctgtcaagggctggagaggatcctcacatttagagatgagtgaagacataggccttctctcaaggagactctaggcttgtggggaacactagagggccaaccaaataagaatttaacggagtggttcagaatgaaaggctatgaagttcgtcttgggccacaggaagtcattggagctcatcctatttggtagaacaggaacttcttgatgatgatccaagggctggatctttttaggagtgccaggctcaggtggacattgatgtattgcgcttcctgagaactgagaagtttcagctccaatccttccaacagttatggctgctgtggccacttcagtactgtaatgccactttcaaacacgcatactttgttcattgtgattttttttattcttcagttatcaagaagtatgctaatttaaggaaagagtggactcatgtatcagaaaagtattcaaagcaaaccatcaacctaatttcagaaagtagagaccagtgagagtttcctaaacatttataaagggtagaatgcttggacatttctaggttgatcgtgaactctgccagcagtgttcacccacttgctttgccctctgaaggtatttcaagtaaaaggaa

SEQ ID NO: 1883253 - DNA, 4001 bp, Homo sapiens
ccccagcaagctcacgtgtcccaggtcgacttcagaatgctgtgctggcagcgagaatttcaagccagtggatcttagtttgttgggctccatgggggtaggatccactgagcaagaccagtcagctccctcgcttcagccccctttccagggtagtgaacggggttctgtctcactggtgttccaggcgccactggggtatgaaaaaaaactcctgcagctagttcggggtctgccaaaatagccgcctagttttgtgcttgaaacccagggccctggtggtgtaggcacctgagggaatctcctggtctgtgagttgcgaagaccatgggaaaaccgtagtatctgggccagatagcaccgtccctcatggcacaatccctcatggcttcccttggctacgggagggagttcctcgaccccttgcacttcctgggtgaggcgaccctgcttctgctcaccctccatgggctgtaccccctgtctaaccagtcccaatgagatcaaccaagcacctcagttggaaatgcagaaatcacccgccttctgtgctggtctcactgggagctgcagaccagagctcttcctattcagccatcttgcctggtccatccaatgctcaataaatcttaaagcgaacttggaactgagctgttcttcctacctaaactctctagttatttaaaagtcaaattcaatatgacctcccacacaatggttgactatgacttgggataaattgttttatgcccttgaagcagccaaaataaacaactcatcattaataaaaatgctcatagccaggtgcagtggcacatgcttgtaatcccagcattttgggaggccaaggcaggaggaacatttgaggcaaggagttcaaggccaacctgggcaacatagcaagcaacattagctgagtgcagtggcaccacctgtagtttcagctacttgggaaactgaggtgggaggatctcttgagcctggggggtttgaggatacagtgagctatgattgtgccactgcactccagtcagggtgacagagtgagattctgtttcaaaaataataaataaataaaaagatgctcacaagacaggtgaaaaaaagatcccagaccttttgggataattccaaagtagattcttagattattttttcacccaccttcctttccaaaatatctcaacataagctttcaggaaatttcactgtctaataataacaaaaacaaaaaaatacagcggtttccatctatgaaatccttaccaggcacccaagcaaagtgctttccatggattatttgaatccttgttgcagcttcacaataggatcaaagagaaggcaagttctatgtgctttgatgcctagcaaggcagctgcccagggtcccttagctagcaagccacatatccaatccagaaggtcagactccaaagccaggactctctgccactgcacctaccttcctcccagcctagcatttgggcttcctaaaacctattccaaagatttcacttcacacgtaagttttttccttccatgtgccttttgcttcagccaggaggagctacttgctctttaacttacactctacacttcccaaactctgccatggcttaggaaacacctgcttcctggagtgcttttcccatcttctctgcatatccaatcccaccaaccttccgggtcaaacaccatctcttccagaaaatcttccttatcaccctgtactcaccaccactgcaccccaagccccaacaggtgtctccactcccttctctaaactgtcagagtgttttctcagcactgctcctacagcacttcacaccttgtccctggttctcagtgatgtgtagaggtcccatctccacttgatggtgctcaccttggaggcagaatccaggtaggatccagactcatctccccacaacacccaggacaggagatggtgtggtggaagccactcccgtggcagccccgtgatccggaaggatttatctgacaagcaaacccaggcagattccctgccccctcccagattttctcacaccggccaacttaattgatttaatgggcctttgtgggactcaccaaccaagcataaaatggacccacctgcagcccggagccacccaatcaatcaaagggagacagaaaaccgaaaatgctgcatacgagtaaaataaataatggccaattagtcaccatctgggccttgctgtcagcggacaaaacccacaacaatccccatttcacttcctgcctggtcagattgcacaatgaattctcaacagaaaggcgggaacaaggagtctcaactccttgttttaaaataggatgtgcctgtgaatttgctttgaggaaatttcatcaactcagctgacatttgttaagcacctactgcatacctgatgctctgctgggcactggagatacaacagtgacaaagactcctctgccaaagagctgagcatgtgaataacctcataaagaaatgggtacctgggcatggtggtacacacctgtaatcccagctacttggaaggctgaggcaggagaatcacttgaacctgggaggcagaggttgcagtgagttgagatcacgccactgcactccagcctggcgacagagcaagactccatctcaaaaaaaagagggagagggagagggaggggaagcgggggggaggcatagggggagggggagagggagaaagggaagcaggccggttgaggtggctcacgcccataatcccagcactttgggggactgaggcaggtgaatcccttgaaaccaggagtttcagaacacctggtcaacatggtgaaaccacgtctctactaaaaatataaaaattagccaggcatggtggcacacacctttaatcccgccacttgggaggctgaggctggagaatcacttgaatccgggaggtggaggttacagtgagccaagaccgcaccattgcactccagcctgggcgacagagcaagactccattaaaaaaaaaaaaattagccgtggtgtcatgtgcctgtagtcccagccacctgggaagcagaggcatgaaaatgacttgaacgcgggggcacaggttgcagtgagctaagatcacatcactgcactccagcctgggtaatagagtgagactctgtctcaaaaaataaataaataaaataaataaataagaaaaagaaaaaaaaatgggaagcagaaaagataggcagcttcatcttcatcatgtagcctgggaaatgccagctctgctcttggcctcagacttggtgttttcacctgagagatggaatgataaccaggttagggtgaggaggaactgagagaacatttgcataaagacctgcttcctggtaagtgtgtcctcatggtctgctccctcccatccgtgcctcagggcccataaggataatttctccctaacacaaatgcgaatgggaaacgaggattaagcataccattcagagaagcaagtccatgatagagtccatataactgccttccaaaagcaaaactgagctaaatcaatgttattttcttcatattttccttgtgaaatgattcatttcagcatatttctttacctatgagtctcagatggtggccccaaaaaagaaaatatcctcaaaattatccaagatctgagtcttagtttccccatctgtgaggcaggaaggataatattcacctcataggttcctcctgagaaatagataactcacgtaattacttactaaatatgtactagatacttatgaagtgtcggcaccgttctagcttctggggttacagcagtgaacaaaacagacttaaaaatcttcatccttttggtgagtgcagaaaggtaacaaatatctacataaaatatacagtatgtcaaatggctaaatgcatacaaagcatttagtacaagacatgacttgtacatatcatgcagcattcacactaatgcagataatgatcagcaccaagagaaataagcttc

SEQ ID NO: 1883254 - DNA, 4001 bp, Homo sapiens
taaaaaaaaatatctattacttcattgtttgtcaaaatagccttgggctatgtctctaggatgccaactataagtcagttaccagctaccaggaaatagatatactcacttaggcttgagtaattgaattctttaatttgcatccagatgttcttgtgtggaagctgcctatgaccaggaaatatgtacagtgcagatcaataacttgacaggttagcattattttgaatgtgtggtttcctgtgtacagcaaaaagaatgaaatgcattatttagtatcttgcacatagtaggtgcccaatgagccttgttgggatgttgccataaatacagcaggctttaaaacagcacatcttctgtccattctatatgtctattcagtgcttttctataaatagcctgcactgattccaatccataaccattgtgtgacttgattttaagtgcctttaaacttaaataatgatgctctacaggaatatttagatgaggttcagttggacaacatgaatgctgataataggagagttaatgaagtcataggaactatcttgccactaattcaatgtgatagacttgggctgattaccctatccaagcatattgctggaatttctcttttaatgcaggcagagttttctaatctgagatagagaaactctttccaatacaaactagacaagtgtagctggtatttgcaaaaggaatggactcaagagggagatgctgagtgagttctcccaagaagcggaggctttctggatagaactgtgctgaagaggtagcaatgtttagccaaacaaagaagaaaacagtgcttagaggctaacaaaatagtgtacttagaaattgaacttattacattcctaccctgtgagttagggctttcaaatccaaaatgaagccttttttcttgcgtgtgtataatctcaattaatcaaaactcttaattaagccttcatttctagaggggaaatcatataagctttgaatcagacagaaaagtgttctaactacattcatacaaacaacatagtctctctgaacctttgtcacagtatttgtaaagtgggtttattgtaaaaattaaatgagacaatgtaggcaaacattagtcactgcaaattcctggcacatggtaataacaatgcaaatatttgttccccaaaaggaaacttctaagatttgagctagaattacttaagtcttcaatactttcttgtgcgagccatgcggtattgctctgcttttattttcttatctataaaatgtggaaaatggtagtaccaatattatgaagtttttttaggaatagctgagaaaatacatgtaaaataatgataccaatgtcaggcacaaagtaagtgattgaaaatattgggtgttttaattattattacatattttttacaacctccactatgtgaaaatataaatctagagaaatcttaattgagatagttgctattagttgaatgtctcctatgtttgaggcactatgctaaaagttaataagtatatttcaatttaatctttacaactacatagcaaaagaggtgttattattcccacttcagatataagaatacagggctcagaggtgttatgtaatttgccagaaactacagagttagttaagttagagtgacaatgttgagattgtagatcttcatctaattctgtagctagaactctttctgctgtaccacactaccaccaagtccaagtgtaactctgactggataaggacgcacaaatgactctgagttgtacataaggggtcgcagataatttttggaaagaatattttcaataggacagagatgagaacttgttagatctatgcatagggaaggtgtattagtccattctcacgctgctataaagaactgcctgagactgcgtaatttctataggaaagaggtttaattgactcacagttccacatcgctgggaaggcctcaggaaacttacaatcatggcagaaggcaaaggaaaagcaggcaccctcttcacagggcggcagaatggagtaagtgcaagcaggggaaatgccagatgcttataaaaccctcagatatcgcgagactcactcattatcacgagaacagcatggggaaaatcgcccccacgttcctgcccttggtcctgcccttgaaacatgggaattattacaattcaaggtgagatttggtcaggggcacggccaaactatgtcagaagacatgtgtgtgagtttgaaattgttgaggatgggaacaagaaaaggaaaaggaaaaggtgagaattctgaaaacaaacttaccatatatatattatatatatataataccatatatatataatatataccatatatattatatatatatatacatacacacatataaaattacattggactaaatataccatggtgtttcttactgtgtctttcaaattatggtgcagtttagttattaagaagagggaagactctgaactcaaggtgggtttaaatctttgctttgcctctcaccagtggtatagtcttgagcacattaacttctctgtgccttagcttcctcctctgcaaaatgaaaagaggaccccagcatttcattagaattactccaataaatactgatgtctgtctcaccccaagaaattcttatttaacttgtctggcatggagccccagcatcggaatgtttaaaaactaccagaagtgactgtaatatgcaatcagggttgacactcatcagttaaacactagaatgtaagttctctgcagggaagaccagcctcatgatggccccagagtctagttcattgcccagtacacaatacacactcaataaaaattcagtgagttaataattacacaaatacaagaatgtatgactgggcttagattcagctctgaggcctgattctacatccagtgatccttctacattctataatgctgctacttggatatttacagaagactgctagtttctttggacaatgtgacccacccttagttattcagataatccaaaccaactggcttaagcaaaatgcaaatttttgactcattaaattaaagagtccacgggtggcctacctttaagcatggtagaattccagaacatagatggtgtcctcagggctgtgattctcccccttcttctcttgactcctcttctctattagacacttttcccagatgtgctgttcccttgaggtgtcaggatggcacccactgtgtctgcttgactcggagctctgtgttagctgtcccgtcctaggagccagggatgggagctcactcaaaggccacggactgggaacaggaggagttcactccctgccaaaaagaatcagaattccactgtcaaagaagtatggcttcttgattaccaaatccaacgtaatagatggaaatatctagaacttgtctatccatatggttttaggagaaaaaaagtcattgtaagaggagtctatccttcttctgaggagccctgcccccacaggcagtgcacctgttgtgttgcacaaggacaaatggttgctttcggtgggaattcactttcattcagtgtccttggtatctgactcattctctcatcctaataaccatcttatttgattatagtttattactcattgcctggatcagtgattctcaatggagggtaattttgtccctcgggggatatttggcaatgtctgacacaattttggtgtccaccttagggacaaatactataggcatcaagtgagtagaggccaggggtgctgctaagcatcctacagtgtaaaaaaatagctacccacaacccacaaataaataattatccagcccaaagtgttaatagcatagaggctgaaaaactgtgaactagataattctagtagcttcttaaaagttctacacacctttattctcctcccatcctgtgatctttccactacctggcaactgaagtgactttcataaagcacaaatctaatgctaccatccccctgat

SEQ ID NO: 1883255 - DNA, 4001 bp, Homo sapiens
ttttgtgcttcttatccaggttgacgagcacatggttaacagaatgcgctccagagccagaatgttcagcttcaaattcgaacgttgccagcttctagctatctaacctagggcgacatcttatctctattctttcctttcctcatctataaaatgagaataacagcataggccttgttgtgaggatcacacagttaatgcattttaatattatttttattttattttatatgagagaggatcttgctttgtagcccaggcgggagtgcagtggtgtgatcatggcaaccttgaactccttcatgcaaccttgaactcctgggctcaagcgatcttcccacttcagcctcccttgtagctgggactacaggtgtgcaccaccacacccttctgattttttgtagtgatggagggttatcactatgttgcccaggctattctcaaactcctgggctcaagcgaccctcctgcctgggcctcccaaaacgctgggattacgggtgtgagcctctgtgcctggcccatttttagcactcttcaaatggtctctggcatctggaggatgtgaaatagctgctagttgttataatgatgatcatcaatgtcatagttacagcatccttatttcttactccacgaaaaagatttattgtcatctctattttggaggtgacaaaactgaagctcacagaggtcaattgcatgcccaaagccacatggagagcggatcagagatggctttcaataccagagctctcttttagtgccgagcaatttctgaaactttattttcctctgtacgtccaggacacacaacacttgggctgtctcttcccagtgatccgattcccaggcccttgggctctgtcagttccaattcccagcatgctcagaggctctgtccttcgataatgagttctctgtcaattaccagctcctgcccagcagcctccggggcagtgtgggccaattgtcctgtcaggctgggggctgagcagagcgtctcaacttgggcagctactcagtggtcaatcacaatctaaaacagagacatcagggtggccttatgcccggtgatttctggaaaccagccagcccttctccccaataagacactcaatttctcagcatgcagttttctaccagactttttatgctaagccaggctagtcctgattgtaattggttctggctagttcccgtaggagctgttaaatcttttatttgctcactatctggggaagtcctccacctttgggaactaacccttacacccctaagaaaaggtgtctcccctgacccttgctagaacatattctttcactcctgtcccacctcaccccaggcatcagcagtatctttaaatggacattatttttaatcttctagaaaaactagtgtgccctgatttctttggtagactttaagcctagggctccaaacatctgcttctctgtagggagtatttgctggcaaatcaaccttctattcaataagaactagccagtagaagccctgccaaattatccttgtgctttctacaggtttcattggaagtttatggtgttcaacatgcgtggtcactaagtttaaatggtgcattgatttaggatttacctcttagctggagatggtttctcatcagcccaggatcctagtaacggcacagagctggagctgtctgtggtcacaaaacacttgtcacagctatgatcctatttggtcctgagagtaagtcttcaaagtagcggttatttttatctctgtttaccagatgaggaaatggggctcagaatggttaaataatttgccccaaggccaaagagttatgacagacccaggatttgaacctgatgtcatttgaatgccaagcttcttgttctttttactgtgtccattttcaattgtctgttcatttattccaagcctatttattgagagcttaccagacaatgatctaggccccaggagcccagcagcaatgaaatggtttccaccctgggggagaaaagcaatgaacagacaatattggaaagtggtaattgctctgcagaggatttaaataaggtgaggctggtggaagtgtaaactgggacaggctctgtaaagagcaattgggcaatagctatcaacatttaaaatgtgcatcgactttgatgtggcagtttggctcctaggaaatttatcctacaaacatgttagcacatatgcaaagcagctcatatgtgtacaaggatattcactgcatcactgaactagcaaaaaaaaggggaaataatgtaaatgtccatcaatagagaatacagtgtatccctacaatagagccctctggaactattaaaaagagtaaggcaatttctaaatagatagatggatagagatacaacacaacatctaagatgttttgtgaagtgaaaaaagcatcttatagaacagcatattgagtgtgctgccatttaattatgggaaaaatcaaacaaaagaatacatgtatgttattaatcacatagcccacatgaagaaagactatttgagaaagtagggacaagagttacctccagggactattgggatggctggagaaaggagaaggaaaaaaatgtttgcttttttccctccttgtataacctttggtatcttttgaatgtgcatgcactgattattccagaacatacgttaaatttatttgttgttattattatttcaataattttcggagaacagggggtgtttggttacacgggtaagttctttagtggcgatttctgagattttggtgcatccgtcacctgagcagtgtacgttgtacccaatgtgtagtctcttattcttcacctcccctcccaatcttccccccaagatttcagaggtcattatatgattcttacacctttgcatcctcatagcttatatcccacttataagtgagaaaatatgatatttgattttccattcctgagttacttcacttaaaataatggtctccaactccatccaggttgctgtgaatgccattattttgttccttttaatgactgagtagtattccatggtatgtatataccacacattttctttatccatatgttgattgatgggcatttgggctggctccatatttttgcaattgtgaattgtgttgctataaacatgcatgtgcaagcatctttttcatatagtgaattcttttcctctgggtagatagccagtagtgggattcctagatcaaatgatggatctacttttagttatttagggaatctccacactattgtccatagtagttgtactagtttacagtcccaccagcagtataagtgtttccttttcaccatatccacgccaacatctattattttttgattttttaatatggccatttttgcaggaataaaatgttatcacattggggttttgatttgtatttccctgataattagtgatgttgaacatttttttcatatgtttattggccatttgcatatcttcttttgagaattttctattcacgtccttagcccagtttttgatgaaattatttgtttttttcttgctgatttgtttgagtttcttatagattctggatattagttctttgtcgaatgcatagtttgcaaagattttctaccactctatgggttgtctgtttactctgctgattatttcttttgccgtgcagaagctttttagtttaattaggttccatctgtttatctttgtttttgttgcatttgctttttggttctttgtcatgaactctttgcctaagccaatgtctacaagagtttttctgatgttatcttctagaatttttatggtttcaggtcttagatttatgtctttcatctatcttgagttgatttttgtgtaaggtgagagatgaagatccaacttcattcttctacctgtggcttgcctattatccaagcaccgtttgttgaatagggtgtcctttccccactttatgtttttgtttgctttgtcaaataccagttggctgt

SEQ ID NO: 1883256 - DNA, 4001 bp, Homo sapiens
actttgaaggggcagatttagagggaaaccaggaaccttattttatatgtgttaactttcaggtgattattagacacccacatagatatgaattcagggagagctacatgagtcgaaagtacaaatggaattagagacatgcaaatgtgattgcacagcaagtgacactaactagagaagagggaagccacaggaatgcagccccagggcattccagcattaaaagcttggaagatgagaaggccccagcacagcagaggaggaaggggaaaacaaggaagagagtcaatagagaatggagcccagaaatcaagtaacgatggagttttcaggagaaagtgatcaacgatttcaaattatactaataaaacagcactcagagtctgaatgttgatctttagatttggaatgttagaggcagtggtaacaacagtaagtgccattttagtggcctggagaggagaagagcctgatttcagtggatggaggggagactggtgaggtcaattccaaagaagtgtgaacaactccctaggaatattttctgcatagagtaacagaagaatgggaagtagctgtcataccacatgtctcagaaaaatgaacagtgaagtcaaagcatgagagtggaatgcctgcagcataggaggacaacacaggcttccgcaaagacaaatcaatggaatttttctccctaggtacagatttcaatgggacatgcacagtgagaaattctagtaccaaccattttttccaaggtaaaggtaccactgaatgtgctatgggtctacacacatggtatatacgcaaaaaatgataattttcatgaggacgttttctttacaatactctaaattagctaagttgtgttttcttttcttctccgttttccttcctccctccctctttcttcctttggtcttttctttcttccttaaatcttgagcatatccatctacaatttagtatagaagtatgcaaatataatgcgaatatgaattaccaaccttagtgtattctgtttcaaagacattaatgtattctaagtgtcagggtttgtggaacacagagaatactgtgcagaattatgaggtctataaaatatttcaacttgatcttctcaggtaaaggtgagaaaacacaaattgctgtcattaatttgattgtatcttctgacattcttaattgccttttggaaagttgaactaaatatcattgatgtcataaaaattttttgtttattaaaaataatttaaaaattggagttcaaaagtaaacctctattaaaggaagacaaataatgtcattagtactcaatgagaaaagaagctaaaaaataattatagaaaaggagcacaaattttcattagtttgcattctgcctttgatagctgttctccaatgactgcttgcaattcagtctcagatgcatgtcctatttttgcattccatctacctccagtttctttcttgtttaccgacagaggcatgaacatattttttctttccagataattgaggcttcagtgattctgataaagtatgctgtctttatatgcaaaatttagaaataattttaaaaacttgaacagaaggctaaaaaatagggaaaaaaatagaggctaacttgatgagaaagcatgtaattaaatcttgtgaaatataacttctatacagaagaatgcaaatagagcataatgaatattataaacacttttgttgacaagaaaataatgtgaatacctcacattttctgctgtattgtctttccgatctcatatttctttgcccctaaaagtgaccataaccctgaatactacaaacacttccttgttataaagacacttttgccgcctacatattcatctctaaaatacacagcttaattttgtctgttgtaaaccttcatataaatgggttcatactgacctcacaccagtcaaatcgagcatctgaggaagagcactgttggcgttcagcgaggagggaggcgccaggagagagcgctgaggcgccaggagagagcgctgaggcgccaggagagagcgctgagcgccaagcgctgaggcgtggagactcgaggtggcggccgagagtaggaagcaaaacaacgggacgggactgactcggggcaacaacgactacccattgtggggaaaggtaagtgagaagtcccatgcagtccacgctcccaccagggacatctacaagttggctgcaggagtgcctcttggccctcacagtctacgagcccagagcagggagatgccagcctcgttccagagggaaccgtctctgttcctctccacccccagcgcagtgccatctggcggtgggggccgcatcactgcatctggccccggggccccacagcccctgcctctccacatcccgggccggacagcatcctcctgagtccactcaaccctgaacctatgaaactgctagaagtaaacaggggaaacacgttaggacgttgtttctggacaaatattttatgggtgagacttcaaaaacacaggcaacacaaacaaatagaaatagggactatattaagctaagtagcttctacaccgcaaaagaaacaatcaacagaagaaagagaaaacctgcagaatgggagaacatatctgcaaactgttcactgccgtggggctaacatccagaatatgtaagggacccaacaactccacagcagaacagtaattctgttaaaaatgggcaaataattggtataaatatctctcaagagaagatatagaaatgtccaacaaacatgaaaaaatgctaaatatcactaatcaggtaaattaaaattaaaaccacaatgagatataatctcactcagaatggctattatcaaacacacacacacagacacacacagagataaaggcttgtggagatgtggagaaaagggaactcttatacaatgttggtgggaatgtaaattagtacagccattgtgaaaacagtatggaggttgctcaaaaaactgaaattacatctaccgtgtgatccagcaataccactgctgggtaattatccaaagaaagatatatcagcatatcaaaaataatatcttcttccccatgtttattacaacagtattcacaataaccaagatatacagtcaacctcaacacccaccaatatgtgaatggagaaagaaaatgtagtatatattcacaatggaacactattcacccataaaacgaaatgaaattctgtcatttatggcaacaatgataagcctggaggatgctgggttaaatggaatgagccagacacagaaagataaatactactttttcactcatatgttggagatttcaaaaaaaaggtggagctcatggatatagagagtaaaattttggtcattagaagctagaaggggtagggttgaggggaggttagagagtagtttgttaacggatacaaaattacagctagaccgaaacaataagtgctagtgtgctatagtcctgtaggataaccatagttaaaagtaactaattgtgagttttcaattagctagaagagacgattttgagtattcccagtccaaggaaacgataagtatttggtgcgatgtatatactaatcatcctggtttgatttttacacattgtatgcatttatgacaaccttactctgaatcccatgcattatgtgcaattattacatctcaactaaaaaataaaagaaaaaataaaggagatgccataggtgcaggggaaaaatgaaaaggaaatatgaaaaaaatcaccactttatatcagtttataaaacgattcaaagaagcattgtctttgcaaaatacagattttatatgaaatgataatagagaaatgaagactcaaacagtactgaagtatcaccccataatacctaggcctcaaattatacaaaggaacataaatagtgtgaaaccagcagagtcagaagtgatattcacacacagcggactctgcagagaaagaggcacttgggacagggat

SEQ ID NO: 1883257 - DNA, 4001 bp, Homo sapiens
atcttacaataaagctcaacattttaatagaaataccaaaatatgcaccaaacaacaaagtaaaaatcacaatgattggcatgcaatcaaagattactaggcaggaaaagaagcaggaaatacaatccagaaagagaagaaaaattgacccatcaaaactaatccaaaattcgcaatgatgtgctttacaacaaaaaggaaattaaaatatttattatgatttttcctcatttatttaaaaagacggacataaaaattatacaacaaaaaacccaagtcacatttcaggaggtaaaaactaaaaagtctgatatgaaaatatggtggttagcatttgtgaaacattagatattgaagaggaatatattattgaatgggaatatacagcaaaagaaactatgccaaataaaatgcagatcagagaatttttaaaataaaaagagcattagcgggcaatagaaaatcttcaagtggccgacagatgtgtatttctgtccattaaaaagaggaaggagagatcatggcggacgggaggcaagactagcctgcagctctggacagagcagcgagtgggagctcgcattgtaaactttagctccagatggacggcaaaaacaaaccagcaatccccagaggacccacagaccctctgaaggaagtgggctgctcctgcaggacccgggagacccccaaaactgtgagtgtccagctgccgaagtgggaaagggaaaccctcctctccggaacagacaccccctgagaagtctatttgtgggagaagtttccgactttacctggagctgagtcagtctggagagctgactgaaatacagggatagaggaggcagcagcaaggccctgggagctgaatgggtccccgggcagcccattcctgcctggcaccacagggatccaacgggagaggaacagagggtaaaactacacggagagaaggaaatctctagctgaactttgtaacaattcgaacagcgtgagaagtctcctggccagaactcgggggaggacacaaatctcctgcacagtgagtaaaatttatatatgtatattcaaaataacttcagtattcgaaattgcttcggggaattttgaaaactcagactctttccatactgttgtagtgatcatatagataagtaggtcaccagcatcatgaataaaaatgcacgttgttgaggtggttctgagaggtgacagcgtgctggcaggcctggcaggcctggctcgctctccgcgcctcctcggccttggcgcccattctggccgcgcttgagcatcccttcagcccgtcgctgcactgtgggagcccctttctgggctggtcaaggccggagccggctccctcggcttgcggggaggtatggagggagaggcgcgggcgggaaccggggttgcgcgcgccgtttcccagccagcgcgagttcccggtgggcgtgggctcggtgggcgccccactcggagcggcaggccggcccgcaagccccgggcagtgaagggcttggcacctgggccagcagctgctgtgctcgatttctcgccgggcctgagctgcctcccctcagggcagggctccgacctgcagcccgccacgcctgagcctcccccgccccctcccggctgtgggctcctgcgcagcccgagcctcccccacgagcgcggctgcctgctcctcggcgcccagtcccgccgaccgcccaaggactgaggagtgcgcgcgcacgacgcgggactggccggcagtggcaacccgcttgggtcaccttccacactgtggaagctttgttctttcactctttgcaataaatgttgctgctgctcactctttgggtccacacggcctttacgagctgtaacactcaccgcaaacgtctgcagcttcactcccgagccagcgagaccacgaacccaccagaaggaagaaactccgaacacatccgaacatcagaaggaacagactctggacgcgcggccgttaagaactgtaacactcaccggacccgccccctttaagaactgtaacacaccgcgagggtctggggcttcattcttgaagtcagtgagaccaagagcccaccaattccggacacagtttctgccaagcccagatcaaactccctcttggacttcctgttagcaccttaaagtgtatttgccattttgtaagctccatcagatcttattttgagctatttaacagcctttgcaccttatgcaacgttgtaagcaaacagtgaaagaaatatgtcactttggaaaatgcatctgaggagatttcaaaagatgcatgaaaaacgtaatgtaaagataaaagtatttaaaaataaactgtatttatcaacgtaaactccatcaagctcaagacacttttgtatcttgtgataccactatttagtctattcgtaaagaaatgagggtcctgagaatttaaccaaatcaatgcagtcttttttacatgatcatctaaagaaaaatgggtgccatttaaatattttttaagagtaggaaacaaaaagagcccagaaggagccacgtcagttctctaagatggatgcctaatgatttccctctgaaacgttcaccaaattgcccttgtttaatgagaggaatgagcagaatcactaccttggtggagaaggaatctgtggggaagctttctggcatgtttgtctgcaagagctttggctaacttttttaaaacactctcataataagcagatgttaccattctttggccctccagaaaatcaacaatcaaaatgccttgggcatccccaaaaactgttgccatgacctctgctctggacccacccacttttgctttggctggaccacttccacctgtgggtagccattgctttgattgtgctttatcttcaggatcttactggtaaagccgtgcttcgtatcctgttacagttcttgaaagctgtgcttcaggatcttgatttcacttcttttaaatttccatcgaaagttctgccctcatctgcaacggatcttggcacagtggttttggcactcaagcgaagagttgagcatactttagtttttaaaagaattgtgaaagctgagccagttgagatgtctatgatgttggctattgtttgtgctgttaatcatctgtcccattcattagtgtacaaacaaaactaagatttttctcacaagtgaataaggttttcttcacaagactgaagactgctgcttcagtcttcacttcagcaacatttcatgcctccttataacaagttatccatttgtaaatggctggtttatttggggcattgtttccataaacttgttgtaaaccatcaatgatttcactatttctctaccaaagttttactataaacttgatgttagtttttgcttcagttttaccagaattcatattgctccgacaggggctctttttaaactgataccttgcttttcttagtgcctcaatctagatctttttcacatatatcataacaagttagttcaagtttattttgaaaaagtgtaaaattcatgcataggttttcgtaacattcattttccaacagctttttgaagatcccttatatatgttttggctcaattaaaaaaataaatatttcaagttgtgtgtctcaaattatgaaataaatgcatagaacacagaataatttgttcaacgaagtcagtatgatcatagcaacaatggaaaaataattttgaaatagaaaggagaaaacagaaaagtgaacaactgcaaatatgttggaatgtagttcagttttaatttaaaaggtggataaaggcgttcaaatgaggaggcttcttatatgcagaaaattagaaacaaaagatgtttaggagaggggaaaagaggaagaataataagaagaaaaaggaggataaagagaaagaatggggagaggaggagaagaaaaagccaggaaggagggaagagagagaggggcagagagagacagtgagagagaagaatacagataatt

SEQ ID NO: 1883258 - DNA, 4001 bp, Homo sapiens
gattataggcatgagccactgctcctggctaaaagtaaagactttctatgagaatggaatggtaaatggaattggataccacagagaagtctgatagagtaataaagggatgtgtttattaggttttgcaacaaagcggtcaatggtttcccttgttacaggggtccccaacccccaggccacggaccagtactggtccatggcctgctaggaactgggacatacagcaggacatgagtggccggcaagcaagtattacccccgagctctgcctcctgtcagattagtggtggcattagattctcttaggagcgtggaccttattgtgagaggttgtatttgagggatctaggttgcttgttccttatgagaatctaactaatgcctgatgatctgaggtggaacagtttcatctcgaaaccatcccccatactacaatatatggaaaaattgtcttccacaaaaccggtcttgggtgccaaaaaggttgggaaccactgccttatcagacacatttatgttggtaggaggataaagacacaaattgcaatgacttcatgaaggaatgagagggaaaaaaatgttgtgataaaaggtgtagatccttatttcaaagagcctagcacaatgcctggctcacagtggactctcggcagataagagttaatgaatgagggtcgaagcaagagccagagtgatgggtaaggacccccgtgccttagtttgagaacatgttctgaggatttttctttcaaaagtagttaacaatctaactaagaatataagcaagtatattggtaaaaattgcaatatgaccttcaaaaggtatgcaagcaagcagtaaactgggtgtcatgtactgagtcataagaaactgaggctgtctctgtgtttcatttacaagcaaatgggtgaagttttcctggtgttcgtacaaccccaaggtctgatcttcaagtcaaaatctccatttgactagtggagaggcgacctgtctcttgctgttaatttacaactattacattatgtagagactaatatttattcacttattcattcattcattcattcattcaacagacataaactgagcttctacaatgtagaaatccttatgtcctaccattaggtgacagtggctggaaagtgtaactaagagaaaaaccagaatgagggcatctgtcgggtagaacatctgatccctggaaacaaagctacattcagatttgttgttactagtttgaaagttgctgcccataagctgtggggttaggggagttagttaggatcttaataactacagacttggagcaatagtagtctgatgacccacgtttgcctaaagattgaacttctcagttaatcagatactgattgccagacaatcactcacattttgagaatattactagagaaaccaaaaaccattcttataggaatttctttgcaatgaaagtccaatagctgtgatgctgtggcatgagggcagagatcacccacatagaaggtatgaagtcaatatttttgaatgcgtgaatatataatgggtttcatgcaatgtgacagtgagatggagccagatgttcacttttgctaatcttactggttccagctgtctttcttttgccttttttcctccttacctgccccagcctagactgaaatggtccaactcaagtcttgctgtctgtccattctccaaaactcccaagagaaggatgatgtatatgtgtgaatgtgtgtgtgcacatgtgtgtgtatgtggaccaaaagacagttataagttcaagtatccatcaagaaatatctaccaaaaatatctttgccctcatattaaaggttaataactaagtaataaaaataaaaaacgacaatagcaacaaccacggagtataggtttgttatcctcattttacagaggaggaagtcgaattccaaagagagtcagtgacttacctgaggtgccattatcaggaagtggcaggaccatggttcaaactctggccaatttgactccacatgcagcaaatgcccaatgcatctagcacttagttttctcttcagtaaaagaggagattcgccttaaaagtttcttttaatcctagcagtccctgaaagaataatgttgcttcctttccctcagtgccttgtatagcatggggtcttgcagtgagcgcttgtgcatttattcaggtgatttacacaaggtccagtaggtggagctagagagtagacacaaacttctgtggctgatgaggaggagctaatatctggatattgtcctcactcatcctgtttgttagttgatttccctcttcagaataaaaatcactactatgagctaggcttggggtgaagggagatgagtctcccaaacctgaaagattaaggctaaactggaatttgctacttaaactaagctctgggagtaatcttctatgagaagggaaaatcagtagaagaaacaaaaatactttgtttttcacaggttataagtatagccttacttaaaggtgcagccctgggtgtgagtcctggttctcagtctctctgtctctctcttttttttttttctcctctcctctcctccctctctcctctctccccctaccctctctctttcccctccctccttctccagtctctctctcttgctctctctttttgtctctttctcactctactcccccttctctctctctctgtctctctcctctctctccctcctcctttctctttctctctctcactctttcgttgctgttgtttgtttgttgtgaatcaaggtccaaattaggaagttcaagacattactataggctgatgtttgataactgtccgactttcttattcttctaatagactttatgctttagaacagtttagatttacagaaaacttgagaaaatattacaggtttccacttactccacacccagtttcctctatttttaacatcttacattagcatgttacatttgttacaattagtaaagtgatattgataccatattgccaactggagtctgcagtttattcagatttccttagttttaacctaatgttctctttctgttccagcattcatccaggataccctgttacatttacttgtcacatctctttaaggctctacttggctctttctcagacttaccttgtttttcttgaacttgactttttttttttttcttgtttgcttgtttttgtggtttttttttttttttaatggagttttgctcttgtcgcccaggctggagtgcagtcacacaatcttggctcactgcaacctccgctgcccaggtacaaatgattctcctgcctcaccttcccaagtagctgggattacacgtgaccgccaccacaccaggctaattttgtatttttagcagagacagggttttaccatgttggccagggtggtattgaactcctgacctcaggtgatccacccgcctcggcctcccagagtgctgggattacaggcatgagccactgcacccagcctgaccttaacagttttgaggatggtttgtaagatgttccactactgaatttttttctaatttttttccttatgattggactttttgggaggaagagatgaagtgccatttttttcacatcatatcagggtacacataatcaacatgatttatgactgttgatgtttaaccctgatcaccttgttgaggtagggtttgtcaggtttcttcactgaaaagttgctatttttccctctttccttactgttctctttagaagaaagtcaccatgtatggttgacacctaagaagtagaaagttatgtttctcttcttggaggatggaatatctacataaattatttgaaaaatttcctcattcattaattcagttatttatttatatgagcatgtactcatgaatattttatactttgggtttaatccaatattcattcatttccttgttcatattgttccagctttgggcatcaggaggtcttccagttggttcttc

SEQ ID NO: 1883259 - DNA, 4001 bp, Homo sapiens
gcacactgtgttcatagaagggtctctccctggccagcagtcatccagtatgatggcaacaaatccaactaaaggatccatgggattaaaaaggtcagattgtgtggatttcagatgattctcatgctatcaatcctcccgccataatttgcacaaaagcctggcagtcttgctccatttctcagagcagaatctgctggggatcgggagattaatcagacttcattaattctgcaaaataaaccatgacatgtttacccgtgcacttagaggcattatcataaatcaccaaaattaaatctcacctgtctaagtagaggagcagcctgcaacagaaggtcacagcatcaatggcttcttgatggcttcatttctttctggggccttcctgtgaccagcaggaccagctgcactgtgctccagtttggtcattaacagaatcatgaacattattagcccagtggttttgaagacactctagtgtgtgtgtttatttttgcataaagactaagctacattcagaggagattagaattttgagaggcaactatttgttttttcatgccatagcttcttaagttaaagcctgcgtatgccttagagatctctagaacaaacatgaggcccagaaggggctagtatttgtccaaggccacacaagtcattcatggcaggtctgggactagaactagggacttctgattctcagtctggggctcttcccattccaatgcatctgcatagggacttggggtaaataagaacatattcagaaatatttactccctcctggaggactgtactgcctagcttttgtcttggccatgtgacttccttcagtcaagggaatggaagcagacccacgacaagcagcagtgagatgtgcttctctgcttttggcatgagaaggctctaccctggtaggcccacaagtctgaggaagatggagaaccatggagcagactcagacccagctgtggcttgggggagtccagtccagcccagcctagagcagctggtctccagttgacttgtagacatggtagtaaaataagtgtctaggtctcagagttttgtggttgcatagtatgcaacagtagttggttgattcaaggctcatcctgcaaacacatgtgggattcctgtgatgtagaatgacgcattagaagcctgggctttggcagggttgagtttaaatcttggttggggcatttagttaccgagagatctcaggaaagtcactgaagctctctgagactcaatttcttgaacacagaaatgaaagaaataatacttacctgtagaggggtgatcagaatttgaaattcagaattttattgtaatttcctagcccattgcaggttttagattgcaaacctctggctggagagttgggaaaggtttgctgtaacattaaaaatcagtaatgtcagaagtgcattctcttctgccttgatcataaaaccttgatttttagctgggcatatgacaccccaaataaaaactatattttccagatttctttgcagctagtgtgatttgtgaggaagttttggctaagaagatgtaagtagagtgtcacatacaacttctgagatatgtccttaaaaagagagaagacatcctttcccccttcctctttcttactggtttgaatgtggacatgatggctgtagctcaagcaaacattctgaaacatgagtaggaaaccaaatgccatttaaggcaggaaggagagggggaaaagcctaggttctgaaaccttggtactaggctggactacctgcctatggacttcaacataagaggaaaaaaaatcctattatactaacttgactgagcccctactatttgtggcagccctatgcagcatcacttgggagcttattagaaatgcaaagtcccccctccagacccactgaatcagaatctcaggtgaggggaccacaaatctgtgctttaacaagctctccaggtgattcttatggtcaccggagtttgaggagcattgatttagagttttccagcacatacacctcacctgctaactgatagagccgtccttaattgcaggttttgtcaagaacttggtgaaggtttaaaaggcagatgaaataaagccaggaaggatggcaaagccaataactgacagtgtcaagatggaaaatgattctgacaaggtggaacactggaccaaagccaagcagatgaaatttaatggggatatatataaaaatcaaataaaaaggttcttttttattgaaggaaatataaaatgttccattctttgacttcttaaattaaaaagagaaaatgtaaaattacatattttaaaatacaacaaataaagctataaatcaatcccaattatggctagttaaaggaatgagaggaggaagatcaggaaaggaaaagtgagaaaaacccaaagtaataaagagacacagagtcaatgacagaaaggaagaggactgggaatccactttcaaatcaatctgtggatcctgagatgatcttcacacctagagggaaccataattacaagtcagattttattgagacttaccatgggccaggcactacattatgtgtgttacgcacatttatcctgtgaggaactctattattatcattgtttttcagatgcagaaactgaagccgccagaggttgagtatgttccccaaggccacacagctagcacaagtggaagcaggatatgaaccccatggccagatttcagggctgtgacctgcagctgccctggtattttctactgtctgatgctgcttcatgaagcatgcttcatgcttgatactgatcagtttcacagaaactggttttcataagaataaggaaatcgattgcctcacataacattaagtccagaggtaagaggcatccaggtgcagtataattatcagttcaaagatgttatcatagacgtgagttctttccattcctgtgctctgctgtcctcagcacctggcttcatcctaaggctgggtcccctcatagtgccaagacagcagctaaaaaatccgtggtcttaaaagctttgtgctccatgttcatgtcagcaagggtgagaaatctttacctgaagcatgtaaattactgaagtatatatcctttaatttagtcttattgtatcgatttaggcaaatgaccatgcttaaacaataggagacattaagaagactgctacgagctgattgggatagatgactcaggacttaatgctgcagtcagggatggggtcaccaaccggggatctctggtacccagaacagataggctctgttattagtcatagtgattctctctctttttttctccaaaacaaatcaagtttcctcacttgtttgaatcctacaaaattatcaaacagtgagaaaaatcataaaatattcattagaaagcactttggatataaaacaataaacccctctttacaactcttcaacagccttaccacaccttcagaagcatcataagggaagatactttggggcagtaaaccttgtgctttgctttgacaaataaaattctaacctgtaaaaggggccagcctgtagaggtggcagatactggaggagggaggcagccagcatttgctgaaagtctatttgccaggaataatgctacattcttgattattttaattattacaaggaggtactattgatgcaggattttttgggtgtcgcttcaccagttggtgacctctgcagccagcgatgcccctgcccagtgccatgcttggctctgggctcaccacaagaggtactccaccacttggcccagcagctgtgtttggcctgcactccagcctgtggatgggccaggcatgtcttgacctgctcccacctttggcaccagcatatggacgaagggaacatggtggcaaccgaaaaactcggatgccagctaccccaaagcccctaagggggtattacagcatgttaacagttctttcagtcctgtcccaacaaactggggc

SEQ ID NO: 1883260 - DNA, 4001 bp, Homo sapiens
ggccagagttccaggggctctgggagtggctgccaggtgagttgaacagtccgatttccagtggggtcttgcacagatgggacacagcttaggaggaatcctgggctgcgggcattccttggcctggtggccagatttctggcacttgtagcaagctcctgggggaggcggttctggaggaatgcctggccactgcggtttaggtgtttggaagttcttgtgtgctggagatgtggctggggtttgtctcacagtggaggcaaggaattgcaactcagaaatatgttgctacttggctgcctctactctattattgtacaccctgaaggcaaggttaattaagtcctgttgtggggtttgagggccggaatttaatttttggagttttatttaatgtcgggagcagattgggtgataaaatgtatattgagaataagatggccttttgaccttttagggtctagggctgtaaagtgtctcagggttgctgccaaatgagccatgaactgggctggatttttatatttgatgaaaaagagcctaaatgctatctgatttgggaaaaagaaaaaggagcattaaccttgattatacctttagtagctccagccacctttttcagaggaaattgctgggcaggtgggggagggctagtcacagaacgaaactgtaagcgagaccaggtgtgaggaggggaggtgataaaaggattataggtggaggagcgaaggctgaggaagaattgggacttagctcagcttggtgaggaggggagaggtcagctaggtatgcagaaaaggaagatctggaagactcagtgacacttggggttgggactgaggggacaggcgggagggaaagaaggaagatttgggacaagttgcattgggaagagagactaggaagggcccgacatctaaaagaatgcctggacatcaggcacctcagaccatttgcccattttatgacaaagaattatttagatcttgtaggatggaaaaattgaaagtgccattttttttggctatttggaactactgtcaagtttgtattgaggtcaagtgggattgcagaagaaaataagacacttagattttaggtcaggcgagagttgaagaggttttaagttcttaagaacacaggctaagggagaagcagaaggaatggaaggtggaagcttgcccatagtgaaggaggcaaacctagagaaaagacagtagagacacggagaaggcgtggggggttcttgccttccagaaaagcagagaaggggtcagggcatggaaataaggggttggggcacagagataagatgtcagggtgtggaaataatggatggggcacagagataagaggttggggcatggaaataagggattggggcatagagataagaggtcagggttcctgcccctccctcagaaaagcaggactcgccactaagggtaaaggaccaaggcaggtgtccctgcatggtctgacacctctgaaacctgggtgaataataatcagagaggtgtccctgcaatgattaaacaccaagggaaggctgccttccctactccgtgaccagcgccggaattttgggtccacagataaaacgtgtctcctttgtctctaccagaaaatgaaaggaattgaaattaagagaagggagagattgaagtgtggcgccaagattgaaaggagaaagaggttgcgggatagtgagagaggttggagaagagagtaaaaagaggctgcttaccagatttaaaattggtgagatgttccttcggctggttggtctgaggaccagaggttgtaggtggatctttctcacggagcaaagagcaggaggacaggggattgatctcccaagggaggtcccccagtctgaatcacagcaccaaatttcatgcgtgtccccgtgaagagaccaccaaacaggctttgtgtgagcaataaagctgtttatttcacctgggtgcaggtgggctgagtctgaaaagagaatcagcgaagggagatggggtggggccgttttataggatctgggtaggtaaaggaaaaaggggggttgctctctggctggcaggagtgggggggcggtcacaaggtgctcagtaggggagattttgagccaggatgagccaggagcaggaatttcacaagataatgccatcagttaaggcaggaacagaccattttcatttcttttgtggtggaatgtcatcagttaaggcaggaaccggccatctggatgtgtacgtgcaggtcacaggggatatgatggcttagcttgggctcagaggcctgactatagtaatctataattttaattgaatatcattagggaaacacaaaatggacaaaatgagaattccctaataatatgtttaaaatgttataggtaaaatccattataatcaactttaaagcattaaaataaaaattcacaagaactttcaccacaaaagcaaggaaggccacaatataggtacatagatacatgcatatatataatacaagtaattattaaaataacacaaatattccaattaaataattggtaatggagctgcaatataaacaaaattaaaatgcaaatggtcaattattgtatggaatatgactgaggtcatataaataagagaaatactaaatgatagtgacatatcagtatgctcctctacatttagaaaatatttaaataaataaaatgtgtattgagagctaggcaaccagcaatcatataaacaggtactgacatttatatgaagggatgggttacccctctacacctgtgggtgtttctcagtaggtggaatgagagacttggaaaagaaagacacacagagacaaagtatagagaaagaaaaaggggcccagggggccggcgttcagcttacggaggatccacatgggcaccagcctctgagttcccttagtatttattgatcattatcgggcatttcccagagagggggatgtggcaggacaataggataatagtggagaggtcagcaggtaaacacgtgaacaaatgtctcagcatcataaacaaggtaaagaaaaaagtgctgtgcttttgattagcatatatataaacatctcaatgccttaaagagcagtattgctgacagcatgtcccacctccagccctaaggccgttttcccctatctcagtagttggaatatacaatcgggctttacactgagacattccattgcccagggaggagcaggagacagaagccttcctcttatctcaactgcaaagagggattccttcctcttttactaatcctcctcagcacagaccctttactggtgtcgggctgggggatggtcaggtctttcccttcccacgaggccatatttcaggctatcacatgtggagaaaccttggacaatacctggctttcctaggcagaggtccctgtggccttctgcagtgttttgtgtctctgggtacttgagattagggagtgatgaagactcttaacaagcaggctgccttcaagcctttgtttaacaaagcacaccctgcacagcccttaatccatttaaccctgagttgacacagcacatgtcttagggagcacagggttgtgggtagggttacagattaacagcatctcaaggcagaagaatttttcttagtacagaacaaaatggagtctcttatgtctacttctttctacacagacacagtaacaatctgatctctctttttcccacatttatgtaagttggatttgaaatataccaacatttgtgcatttatacattcattccataaatatttattgtgtttgtgcatggatgaggtactattacaggtactgtaagtgtaaatataaattttttaggcagctgtgttctgtggaagctttcattctgattatacagtctataactgtgctgttcagtgagatagccactagccacgtatggctattgagaacttgaaatccagcaagtcaactgagctatgatttaagtgtaaaacacttatt

SEQ ID NO: 1883261 - DNA, 4001 bp, Homo sapiens
gcttccttattcataaaaaagtcaatatttaaagttaaaaaaatgtttatttctcaaactgaaacattatttctctatctcttgaccttttagtacacgtttttgtatattcggttttactaaatcaagtcaaacctgttccaggtaatgtgatgttatacatgataggtttcatttagggtggggtggctaagttgcaacccttttaaatcaaggctccacctcaggaacctaggaatgttaggtaggagatgaggaagtccacagcttgccaagaacttcagctattccataaacaatctgattacatatcccgactcttgcacacgaaacaggttatccaagtcttaaacttgatgcttttgtgcagtatgaaccaccctttccgtggacataatcatgcatttgcacatttaaataccattttctatgaacagatcagtatgccaaaaaccactgcaaagtctcctacacacaccttgccttgactttctgtacatttctagtattaaagaatggtgtaggcaaaataaagatatatgtgtaagaaaaaaaagacatgcatgaaatggtttaattttagggaactagatttatattttatctgaaaagagtattaataatatataatagacctttgaaagttagacgcatagttctgcgaaagtggtgcctaagaatagtatgtcaattgacaaattttttccataaagaatctgattttgctagactacctaatcaccaattaacatcctccagtagggaaaaaaatatgcttggtgacatgtttaaatcgctctcaagagtactgaagatgaatgatcttccaatcaagtagctatttgatttagtaataacaactaaaagatgggaatcctcttcttcgcacactcattttaagctccaaggtaattccatagattcaacatttaacacgtatattcaatattacacattttttttccggagtgaaatggctctgaatgccttacagaatttgccctgctctccttaactaaatactttgtctattaatacttctttcttcttttccccttgttctttctgtgccagacccacacacgtctgctgtaattgaacatgccaggcacattctccatttaaagccttttaacagctgctgtctctgcctagaatactcttacttgggcacacacaaaactagcttcctggtctccctcaactgtctgctcaaacttcacctccttaatcatgtctatctgtccctcttatttaaaattgtaactctaccacttctgatctccacacttgatgcccctggcctcccttttcctccactgcatttgtcactaacatcccgtataattttcttaggtattatgtttattgcccatttctcaccgagaacatacgcctcagggtggaagaagtttgtctttttgttgttgttcactgcttatccccagtgtcaggagacatgcttggcacattgtaggtccgcagtaaatattttttgaattaataaagaatatttctaccatctgctagcttactgttcatgcaggagctcaaatgtgctttaagcatgtgatatgtttcaaaagtcaaacttcatccttagggagaacactgtcatcttctcctcctttaaaaaaaaaaaataggaaaaaaagcaaaacaaaacatcaccttctcatttccccacctccaacaaaaagagtgttgagttttctaaagaaataatacaaatggataaaactgcaatttgttgtcctttctctcacatgcaaaaagaaaagaaaaaatactgccgagatttcggcagcgtgctgagcttcatcaaagcattaaaacaatgctgcttgagacgtcagaggctcatccaggaagtgcaacccagagggcaggatttcctgctggactttgaaatccaacccggtcacctacccgcgcgactgtgtccacggatggcacgaaagccaagcgagtccccctgccgagctactcgcgtccgcctcctcccaagctgagctctgctccgcccacctgagtccttcgccagttaggaggaaacacagccgcttaatgaactgctgcatcgggctgggagagaaagctcgcgggtcccaccgggcctcctacccaagtctcagcgcgcttttcaccgaggcctcaattctgggatttggcagctttgctgtgaaagcccaagtgggtaaccaacagcttggaggacccgagtggattcgattctctctcactcctcggccactcaactgctccttgtccctgactccgcggtggggatgaataactcaactcatttcgggccgcttttctcagagggcaaagatgggtcagggtgggatgttacattagtgttgagactctttggatccgtttcgtgggtaccgaggacgcctgggtacgcgggacaggctgcacccgcctgctagaggcgccccatcgaggcgccacgggtgaagctcccggccccacctacggggcggggctccggctcggtccgactattgcccgcggtgggggagggggatggatcacgccacgcgccaaaggcgatcgcgactctccttctgcaggtagcctggaaggctctctctctttctctacgccacccttttcgtggcactgaaaagccccgtcctctcctcccagtcccgcctcctccgagcgttccccctactgcctggaatggtgcggtcccaggtcgcgggtcacgcggcggagggggcgtggcctgcccccggcccagccggctcttctttgcctctgctggagtccggggagtggcgttggctgctagagcgatgccgggccggagttgcgtcgccttagtcctcctggctgccgccgtcagctgtgccgtcgcgcagcacgcgccgccggtgagtgagcttgagccgaggcgcagagaggggcgtgcaggtgcgggcgcggatggaggcgcaggtgtggcggcgcgagcgggtacaaggaacacctcgtgctgggcagcttctttacgggggtctgtggtttcgtgcacaggggtgtgggtgcagagcgggctggcgaaccccgtcctcggtagattcggtgctacctgcaactagaactcctttaaaggaaatcctagtctctgcaggatacctgggtgtgattcgcacattcttagatttgagtgagtgtacttgaataaccagttccaggcccttgcattttgaagtgtttaaataaaatgttccggtggacctgtgtgcattactcaatcaaggacagactgcctgatggtcaggtgctttctcccgaagaagttcaggagttcagcccaggatactgcagggccgtgggaaacgctgagtggtcccaagcttgggcggtgcgagcagcccagagcaggccccaaagggccccctgtggccttttgcacccaagtcatgggatcgcctgtcccgtggctctttcccacgagcaagtcacagggctacggacttcctaactgcaagagacagtgagggacgagcgtgactctttcattttacagaagaggaagtagacctagagtgagaaaatatttagccagaggttacactgttgtttactgaacatgcgtaacgtccgagcctcttgacgcccagtactctttcataattcatttctttataaagcaatcagactgcgtttgtctttgccaacagaatcggataagtaggaacctggcgcatctggcctgaggctagatggtgatggtcttgaatagtttaggtaggttattgaaagtggaagcaagatgtgcattgtcttcttttatacctgtaaggagaaattctttaaaatcatggtgggatatgatttagccattaaaattgatataatgttcagcagataaaagtagaatccagaatagtatatacagtttttcctgtaataggaaaatacacagaacatgtatgtggacacgattaaaggccttaaaataaaattgctccattgtgggtagggaattaatttgcttgacg

SEQ ID NO: 1883262 - DNA, 4001 bp, Homo sapiens
ttgactcacacacaattcctgttgctagatttcccatggctttcctttctcattgaaggattaatagattatgcttaaccacagtcgttaagaaggcagaggtgtaggtggaagaggaagtgcagactgtattaaaactatgttaaaaaaaactcctttgtctctataaatcctagactgaaccacggggctccagacaaatcagtctgtctcaattcccacctccttcagatctgcagtactgaagcagagtgcatcattctgaattaacgctattcaagtcaatgatgaaaaacacaaacaattgtaaatcccttttgagattgcaacattctacaagagctgctgctgctgctgctgctgctgccgctgctgaattgtggttcaacagtaaagtgagaactactcaaggtcagaatatgagtaaggcagggagggaaggctggaaaagataattacatttttgagggtccttatgtttttaacaccattagattctcaaaaggcccaaacttaaagcacgtctgtggttccttaaaatatatatgctctattaaagactgtggcaagttttcagcaaatacgtaggaagtgatctataccaaataaaagcagatttttagagtattacatttctctgataggatgatcttagaaattacctctctagaactaaggaattcaaagaacacatttaaaggctaagttagcctttcacacctcctaagagtaagattacacttgaggaaaggatggaggatgggagggaggaaagaggaaggaaaggatggaggatcagagtacaatattatccttagtgcaaagaagaaatgtgatgaccaagctaactttttaacagcaggcagcatgttattgatccaaggcttgccagccatccaaattattctttggtcattgtgtctgaataatagagatagaaaaccatattatccataggaatggaatattttatctcaatcccacataggaaatgtctaggtataacactacgggagaagtactggggagaaatgaatccaaattttgtggtaatcaggacagaagctgagcctgtgcaagcaattgctcacaaatcaatcccatggcagttatggaggccttcagctccccagagagggccacagtgattggggaaggtgtcccccgggggtggtggcgagcactctgtgacgcaagggatccctggggtgtggaagatgtagtaataatgaaaatgcagcaattaacatttactaaggacttcctatattccaggcactatgctcagggctttacgtacatcatctcattaaacccacacaatgaatgggttaatgcaatacacacattatctcattttacagattaagaaactattagcggtggaagagatccaagttacctgcggcgtacctgtactggtcagaagcaacttcagtccttgcctcctcagaagaaagaattcgactgagggccataaagcagaatccaggacaggagtggaagtttatttaaaaagcctttggaacacgaaagagcggggcgcggtggctcaagcctgtaatcccagcactttgggaggccaaggcgggaggatgacgaggtcaggaaatcgagaccatcctggctaacacggtggaaccccgtctctactaaaaaaaaaaatacaaaaaaattagccgggcgtggtggcgggcgcctgtagccccagctactcaggaggctgaagcaggagaatggcgtgaacccgggaggcggagcttgcagtgagccgacatcacgccactgcactccagcctgggcgacagagcaagactccgtctcaaaaaaaaaaaagaacaggaaagaaaggaaaattcgcttggaagatacccaagccgtcgcctgaaggtccaagagagaagagagcaaaaaagggcctttaaccttgatcctaaaactttacaggctcacctctttcccatgattcttccctcagcgtgggtttcccgcatgcgcaatgctttccttagcctttggaattgagcacgcgcagtgcgtttagggagttacacgcatgcccacctgagactttttcctttttcctgtggcgtgtaccccggaaagtcatactttgccattttatctcttaacacacatgcccaagaatctgcttctccctgggatctgtattcagttaacacttttaatgtcaaggttatggaccatcaggagattgtctctccctggctgctgaattatgatttttagagaggcaatgcgataactgtggaactgtcatccgacatttctagtgcgtcgggggagagcccactcttgcctatctacctgtaacaaaactaggttttggagacaaagaaacttgttcaagatcacacagctagctatgagcacaactgttcacggcagaacttgctggaccttcttaatagtagagcgtcaaagctctgaaattccgccatttgaactctatgttccagtccaacaagactgttgcatcccccccacccccacttccgccaccacaccattcagaagagtctccccccatctcaccatggctgctcagcctttattcaccgttcaatttcagctcaaagccttccccctctgtaaatatcctccttggtattcccattgtttctttctcttccctgtaacagaacttagctcccagcactgggagtgcctgattatttgtaatgtccctccagaagactctaccctcttcggaaggcacagatcttacctatgctgctcccctttgcacccatggtacgtggcaccgggtctgatgcagagcaaatgctcaaaactatttctggaatgaatgagtcatctaactcctccatttactgttgaggaagtgaacattcagaaaggctgtgttgattgcccaatgccacacaggaagcaggagcacaggtataataagtcaaaagccaggtctcggactgggagtggtggttcacacttacagtctcagcactttgggaagctaagggaggaggcttgcttgagcccaggagtttgagaccaccctgggtaacatagtgagacctcgtgtctacaaaaaaattaaaatagctggatgtggtggcgtgcacatgtggccccagacactccagaggctgaatcaggaggatcccttaagctcaggagagtgaggctacagtgagccgtgatcacgccattgcacttcagccagatctcctacttcctagagagagctctttctactttgccaacgtcactctcagctagaatgttccagttctgttctctaccatctccatcctctcatccttacagccccagctcctgtttcctcctcactcacactgacttcagcagacccactgaaggtcaaaagcattcgttacgcaatttaccacctaacaccttgtgttcaaaattccactgttgtttccaatcgccttttacatcttgcccaaccatgtttaatgctctccagtatcctcagcagcacccacactttgcttggtagcctgtagcaggggctcaggtcaatgttaatttgattttgcagtgccacacagagcacaggtgacccttgctttttcatagggtattaacagtgaaacaataaacgatagtccacaccccaagatagccagagaagaccaaagagattctcattccccattcatgtcacaattctaacaatgccaaaacttaatacccagcaatcttattcctagtgggccaatgtttcctgatgcctgtctcctcccccactgtatatattgattcaatgaaaggccccagctacctccattattcatgctcctcactttccctgcctgttagctattctccaaatcgagctattcaaaccaattcatcagattacctccggaaacattacaggctggtcaagggatgagagcaaataacaaacactaagattgcaaagccattcttgaacagtgtgctaaaggcagaaaattgaacatagaggagagacagcaagagcttca

SEQ ID NO: 1883263 - DNA, 4001 bp, Homo sapiens
ttttctctcctttatttaggaagtttgttcagaactgttttcagtgtgggtctttctacagtcatttatctgagcctttgcctgcctagaatattatttgtcatgccatcatattcaaaggactctggccaaatataatattctaaatgttatggttatttttctgaatacttcgaaattattactctattatcatcttggattcagtgttgctttttataaaatctgtttcttgtttttagatttttgttttttgaatgctatatgctcttttcctttgtaaatttttataatttccacatatataattagggatatatccttaaactttttaatagtatgtctgaatgtgggcttttccttatctcttcctttatggatttttttttatctgagatctttatttaaaagacaattttagaaaatatagctcactattcaaatattcaaatattttctcttttctatttgtttctctctctttctggtacttctttttaattgaaatttcagcactttaacttctattctccatttctcttaacttcttttatattttctattagtttgccttttcattcttcattcattcagtctgctatctcctatcttcttttatctctctctctttttttcttttgtgggaccgagtcttgcactgtggcctgggctggagtgcagtggtgcaatctcggctcactgcaacatccacctcccaggttcacatgattctcctgcctaagcctctcgagtagctgggattgcaggcacacaccaacacaccaggctcattttttgtacttttagtagagacaggatttcaccatgttagccagggtggtctcaaactcctggcctcaagtgatctgcccacctcagttgcctgaagtgctgggattacaggcgtgagccactgggcctggcctcttttatctctcttaagaaaaattgtctgaaacttggaactaaggcaaaggaaaagcgcaagtccttttagtgtcatactggagcattgtttagttccgttcaaagattatctaactcttaggataattgcttttgacttattccttataactgcttagggctcatattgtgtgaagctacaggttaatctgtcaataattgatacataaaaactaatttctgtctagtagaaaagaataccttaaaggttttatttttgttttcttttgctctgtaagacattaactgatttggtgtctgatttagcaatcatattctagtaatctgtcttccattgactatacatatataccccatctttcaaattctcatttgaaccaactttagcattcttttggagttaaatctgagttaaaatacatttcactatgatttgtatgagagtcatatctttaactgtttgaaaattattctttgcaacctccttttaagtttttttggctaatttaaaatgattggctttctaattattttgcttctaattattttacttccagtgcacacaataacctaacatgtttttgttttgaaatgattgggccttacaatgtctttttattttgacatacatgcctttccctcaccaacagagatactgggtattttgtaaggaaatgagtattcagggaaatagaccctgtaactgtgagtccctgtgagcttagtgtggatgtaatggagaagatatgcctggggaggactgtccagcaccagagagctggagtgacacctccaccccggcccctaaataactcctcaagtcaccctgtcaccttcttctgtccttacgctggggagaagcagtatcaggagggaaccctccttacatttgcatcctgactcacctgcactgagggtttagatgaggagggtagcagagactgattttacctagatccacctgttttcgtcagtctgtctcaagcatagggcctctgggatgccatcacttgcttcctgaaggtgctggattcagagcttgagtccttccaggtgtgggggccatcgctgtatgtcccaggaggatgctgggggagagggagcaacagaactttaacggttcgttttcttcttccccgctccccacagccctctctggtcctcttgtgccctgtttctcctctgcagctcctccagggttgatcttagggagggatccagatgtcctaatggtttaccatcttggaaggaatgacaatcagcactggcacctcaaagtgggatcctgcggcccactgccttcatgggcagatattcctaagatacgacttatccccgggtcctgggattcgggtgtgctgtcatagccttgcctattgctttactcctggtgccttgtgagacctccactgtgccgagttgttcccccagctctggctgtaggggaaggaacactgctctccactagtccagtttgtctccaaggtggtgcagtttctgtcttgaatttcccacaccacaatgatagcacgttgaatggacctgcctcaaaaaaaatcatgtccgactggaatctgtgagtgtgacctttggaaataggatccttgcaaagtaatgaaattaagcatctcaagatgagatcatcctagattaccagggtgcactctaattccagtgacggtgttcacataggagaagaagagggaaaacaggcacggaggcaaggccacgtggagacagacagcgtagagtgatgctgccacaagccaagaacacaggggcctaaagcgggagacagaaagaaggattctccccaagccgttgtaataagcacagtcctgccgacatcttgattttagcttttggcctccagcactgcgagataacaaatttctgttgtgttaagacaagtttgtgaatctgttcagcagtcattggaaactaactcaaataagaaagaccaggctgtaacctttaagtgtctttagtaaaagcctgaggataggcccagcgcggtggctcacgcctacagtctcagcactttgcgaggccgaggagttgggcagatcacctgaggttgggagattgagacaagcctggccaacgtggtgaaaccctgcctctattaaaaatacaaacaatagccgggagtggttgtgcactcctgtaattccagctactcagaggctattgcacaagaatcgcttgaacctgggaggcggaggttgcagtgagtcgagaccacggcactgcactccagcctgggcaacagagtgagactccgtttcggggtttgagggggaagtctacggataatggaaggaagaagagtatggagaataatttgtaagcacaaaataggcccagagccatcctgggaccctcccaggactgtcccacaccagggatacttcctgcctccctgtggccagagcggcatttggaagttgtcggggtgtggagatactggcccaatttctacccctcagcctagagagaggaggaagttcttttgctcacagctgaccaagactggcctttcaacccctcccagtcccaggattgacctttcccttgtttcaagagaagcttactcccacctgcaagctctgagctccaatacaaccaatcatcaaattacccaaaggtagggttttctagcctaaataggggcacaacaccctgtccaggtgaagcagctccaagtcagcccactgcagtttgaatttccaggtttcaaaaaaaaaaaatctcaaaattggtgtcacttgggttcatcttgttatactgagttcatcttaaaatgcttgaaacctgagtttgtaggaatagatgctcttcgtgaaatcagttttgctaacaattacagctacgtgaagtcagtgcatgagtgaagacttggagggaatccaagaattgctaatgattttgttaggctgggaagagtacgttaggtttaaggtgatattacaggtgagagttttggtgtttatcctgtcttgacttttagagtgcacaatgttgtttttatggtaaataagtatagacaaagttctggtgccgtaagaaaattt

SEQ ID NO: 1883264 - DNA, 4001 bp, Homo sapiens
gccgaggcaggtagaacacgaggtcaggagatcgagaccatcctggctaacacagtgaaaccccatttctactaaaaaatacaaaaaaactagccgggtgtggtggcgggcacctgtagtcccagctactcaggaggctgaggcaggagaatggcatgaacccgggaggcggagcttgcagtgagccgagatcgtgccaccgcactccagcctgggcgacagaccgagacgcaagactccgtctcaaaaaaaaaaaattagccaggcacagcagcccacagctatagtcccagctactcaggagacagacacaggaggatcccttgagcccaggagttcaaggcagctgtgagctatgattgtgtcactacattccagcccgggcaacagagccaaagataaataaataataaatgttctgtgtgcatttactcattaaaaccctcaggacaactgtctgaggctggtattgctatgattcccatttaaatacggtaaggggaataccttgcccaaggtcacacagccccaagtggtggcccagggtgaaggaaaaggaaaaggaggtatggagcaaggaaggcactgcagccagggaaggcccttggcacgccgtgtgttctgtggtgtgctggctgaacctggtcattgccaggaactttatggttagctagaacctggtgccagaggagaaagccactcacgggagccaagggtagtttctttctacctatccacccatgattgttttctaagaaagaaaggagaaatcaaagaaatcacagaatttgaacgctgtataaaacctaatgtttgtggagcaattgaagaaaaataaacagtgtggtgaagtaaacagttaacaaaaggctagcatatgtttacctagaagatgtgaagaattgtttccagattaaatggtttggaatgagaacctccacaccttgaatataaactaagatttgccaactgtgagaaacatttaaaatgctaattactttaaaggatgagaaacctggaaacatgttttagggaagaaaagaactggaaggacaatgggcacatataagccatggtattgcacaggttcagcagaacaatgggcaaaaaaaaaaatcaaaaagattggtctacacggagacttccagcagccccctctctgaggccgaggagtcttgttcaaatactgtctgactgagagataattatgggggaaatgccaattccacatttcatatctctgcactttagtactgtcagagccccacggagacgggatacgaaaggaacagtctgacaggcgagggaggggagccgtgcagtcctggaactgcgccaggcaatgtggaagtcattgagatttaccagcatcatttccataatcgtttttggatgcacaacagctgaagattgtgcctggattcccctttgcaagcattctggagtcacaacatcggcatagaaggtggccagccttcggcttttgcagtcgtttgtggagtctttatggaagagcagcgtggtcaagagaccacggctgcgtaaccccgtctgcagtatgtgaggccggagtgctgaccctggacctgcccagtcatgccttctcggtcagctgttcatctcatctgctaccacggtaagaaatggttttcataaagccatttatgagttatgaaaatccattattttccaactgagaaggtagacattaaactgcagaatcaatgaggcagtaacagttttgaaacctcagtacaagcagtgactccttctgccgtgtaagaaccgatcaacttggcccatttccccttctctagaacactgaactacagcgttagataactagatggtgcccgtgaccatgggccctttacctgctccacagtgaatgaaagttcaccccagagcagggttacaccctgcggagggctgggccaggtccacagtcctcagagatgccctgagttcatccagaagagctcagccatttgcctacgccaggccaatgctctagtcagcgtggaggggagggttacgccgtaaccactgagtcagcacattgtggaccaataatagcgtaataacagcgtctctccaacagggaaaagaaatgccctgaagactgctggccgtgtgttcagtgattctcacagagcacagaaaatgaaacatcagagaaactgcccttaggcggggctggcaaatatctcccctactgggcgcagggcagacttcacctcaaggtcttcctccacacacattccacagcccagccagtcctccagggcggaactcaagataaatctattcaccatctctgttctcttgggagtgggggaggatacgaagctgaggtctagcatccgggccagggctttctcggccacggctcctggcctgggtgatggtgggagggaggaatgtgatgatcaacactccagtttcttgtccaaggctgcctgtggccgatgtgctgcctatttggggagaaaagagaaacacgtaggcttgtctcgggtgttcctagaggatgtgggatggccacccatggcagaaaactaacttggttcactagagtgtgtgacatcgggacctgagatccaacttaccaagtgctatctacgtgacttcacccctcagtgtattcatctatgaaatggggataatactagcactggaggataaataaatcgatcaacatgtgtaaagtgcttagaaggtgcctgccatgcaggaagcaagcactgggcactagctatcgctatcatttctgctgtcctcgatgagtgcaactagttgctgagctggggtagctgaaagtgactggtagtagagggggtgagaacaggtaaaaggccacgacgcagagaagccagaggccatgcaggttgaactccaacaggagcagtggctgtaggggagaggcttgaccctggagctggtcatgatgtgcaggtgggatgggctgggggctcccgtgtgagagcacaggaggagaggctgtgtttcccaagcctgcaaagggctagagtgaaaagagacctaggtatgactaacaaggcctggcaacttggcgttctccacatatgtaattcttcctatcaaagcaggttcccaaaccctggtttcttcctgcctctcagcttaacattatcattgctccttcatccatcagagagcccggagtctcatctttcagtgacttatcaaggctagactattcctcagaatctccactgtgaatcagaatactgttaagataaacgttaatgcttaagtcaaaaatattggactcaaagaaggagtcaacatggtaagaggcccttctggcgcatcatcccagaaacttcgtctgacaccctccaccacgggtcctccacacgggaggggatgcctggacagttgtgcacacagaaacaacatttgttctcactggtttgctctgcagtcccagaagcccaccaaacagagtgggaaaaaaagacatcttggggcaaaagacaaagtgtgattcgatacactgatctcatgtaagcatagttctaattagctaaatcattccttcagcaatagtaaagagagactgcaacagatctgatactccaataggctttgtccaatctggcagagtggattctttatctgaaatcatccacaacaaccactttcagaatggggccaattttcagacctaaattacctctggctccacagtagcatctgcccatgaaatcagtttctaccaaaagcttaaactctccagcagcaattatctggaacagcctcaaaactgcatttttgccatttgagactgttttccacaattgccagccatcttgcctgttagcatgcctgtgggaaggacgggctggtacttacggcattgattccctatttgaagttgttgtccttgaatcctttatgaccatcagacataacacccagtgaaaatgacgccacctgcatttagaattattcaaaacctgccacctcacagagga

SEQ ID NO: 1883265 - DNA, 4001 bp, Homo sapiens
tgaaactttgggagctgaggtgggaggatcactttagcccaggaatttgagaccagcctgggaaacatagggatatcctgtctctacaaaaaataaaaataaaaaaatttagctggatgttgtggcacatgcccgtagtcatagctacctaggacactcaggtgggaggactgcttaagtcagagaggcagaggctgcagtaagccatggtcacactattatgctccagcacggacaacatagtgaggccctgtctcaaaaaaaaaaaaaaaaggcagaatctcagactcaccctaggcctgctgaaccagatgtgcattttaacatgatctctgggtgactggcgtgcacagtcatgtctgtgaagtattgcccaagggagtctgctgagacactgaaggacaagatggaatgggttacattggatcaccttcttttaacaagtgcaatttccactccagctggccagttaaaatacaaacaagattctgtaattttttttaaatcccaaacttaataatattctttttcagtagatgatctccattaatatttcatagccatatagaatgctggggttgaaacaaaataggaaaccatcctgcattcaccaaaaggcagagtcccttctacaatattcctctgtggcctctaactgagcgtttccaggagacacctcattgtaacagaagatccaacgataactaaccatttaccacctgaaccatggcaacaggccataaatgtctgcttcgatcttcttgaccatcttagagacaaaattacctttctgaaatcatataccaacacaggaggtgcttgaaaaactctgatttccgactaattcagtattctccattctatataactaccttccactctctctggcataatccaatagatctgctaattatcctaagatttttgtgatcctgccttcctgagtccagtgccctacttttaaccttgttccctatgtcacaatgtcacagctttcctgccttggctgggaaaattccattcacttgcctcccctcaccccctcagtattcactgatagctataagcatccttttgtgtttcttctaacttttatgaaactagggtttacctttttcatccagattcctagttaaagggagaatttcattgtaaacaagaatctagtccttcaattgcttttcttggcacctgagtggtgctctttttaccttccttttatgtaggaaaggcttctgtgtgcactgtcacctgaagtttactggagagtcactcacccaaaaacatgtctttaccatacttaaaagtgttatagctaagagcttattagaactcccctggagacagggatacttgaattaaattttgcaaacatctatggagccttaccatactcacattattttgcgaggtgctggtacgaatacagaaatggatataataaaggcaaccttccagtgtgtgcactgtggtggagaaaataaataaaacctttgccttgttgaaggcatcccattatttaaagaggtaacattttccccacaactattttgtgtggggtcccacaaaaaaaccgatagatagcagacctatcttctgatatctatctactatctatctatcatctatctatctatctatttatctatcatccatttgtttatctatctcagaaagcagaggtagggtacgaggaagagatgggacattacaatgcaaagtcctcccctccagccaagtttttcaaactccttgtccatacaacatccatgaccctaagttcagctctttacacatttcttttccccgtgaggctgagctgcttgagggcaggtcacgtctttccactacccttcttgccggcacctagggcttcctgatggagaccctacaggtaatccacgtgagcttatgctccgcggcagacacgcccaggcgggctttactcacatcaatagcttagtacgcacactccctctagccaatgagcgaatacgtactcctttctccacctcccgcagggcggccaccgccccctcagtccctctttctcccgtcacctccccaggttgccccgccctgctccgccccctcgccgccgcgtgctcgaggagcgagtcgcgcgctactgacgtcaccagcacgcgccccgtccgctgcagtccgccggcgagggagttacgcacgtcctgattctcctggagtctccagcccgcccagtggccgcagtcacccaggtccagaggcggcggtatcacaggctctccgacatgtctatgctggctgaacgtgagtgtcggaagcggaggcccgacccaggcgcgttggtgaagatgccgggtgacgcgcacggcagcccggagtggctgggagctcgggttgccggcgcgcctggcgcatgggatcgggggaccggggagccgagcccggctctgattgtcctgctcgccgcagagctccccgaaagttggccgcaggtctgctagtgagagagaccgcaagtgtctcccggagacgccgttctcagaatcaccctgggtcgcgtgcgaagtgggtcagaacaccgggtcccgggactggccccgccgccgccctttgtggggtcccggactggttgcttcacccaccccggacctcagcttcctgaggttaaaaagagaaggttgagcagaaggatcacttgaaactgtaatcacattgtccaagatgtcttggacccagaaaaagaaaaagcaaaggagttagaagtctcaaatatgggacgtcagccacttagcgagggagtgcagggctaatgtgtaattctaagtgagactggcgtttttgaccttgttagttggccacagcgccccgtcctgcctgtttacctttgacatttatcttcacttggtggagtcggtgaaacccctgtctctgtagaggctgctgaacttctgaattgtacctgtagcgaaggtcgcttgccgccagatggcagtcatgctttgatcctgaaaagcgggtcctgcttggcgagttgtacagtgagcaaagaacagaaacagcttatttaacagatcaagcagaccagcacagggattttgtgaaataagtgctgttagcactctcttttctaagagggtggaggacttaggagcacaaaacgaaatgggtcaggcaccatcccgattttacaggggcagaaattgacgttcaaaggaaaataatttgcccctagtcattgaggtagaaaatggcaaaattgatccagttatctctgtatctttatgttcttgccagtaagaccagcggagacccatagaaatgagtatgttttagactgaacccgtcggttctattttttcaccagtaaaaaatgaggagtcagggttagagcctagatagctaagatctcttctggttttcgtattctttgatgtttgcttaattcagcatgcacttggcgactttggccctagttctgctattcatttatgtctgttcctttgatcagtgtttgtgaggccacaaaatcttctcttaatatttttatccctaggtggccttaaatcagtgagatggtgaacatgaacatagtttgaaaagtctgaagtatagaggtgtaaaatgctatttgtaggcatcagtaattcagattacatgatttcaagagagtgttttcagttctcctcttcccaacgttattccaaattgtcaaatccttgtcattataatatgtaatatttttgtgttttctttttcgtaatttgctaaatgggtatagcatcttctgtaattagatacttaggattggtgttgttaagaagaaaaaccttagacaaattatacagagtttgattgagcaaagaatgattcaagaattgggcagccttcagaactagaaccggttctaagaactccaacctgctatgtggtcaggcagtatttatggacagtaaacggaagtgaggtacagcgacaacttggttagggttaccgctctgatttgccttatttgaatc

SEQ ID NO: 1883266 - DNA, 4001 bp, Homo sapiens
ccgccacaacaaaaatggtgcttaacacccttttcccaaatgcaacatacccctctgtgtgccatagaatcttaccatattttgccatgaaataaacacaccagaaaatttttttcttctgtggaagaggatggagaaattttggtaattaaaactcccatcgatcaatgcttagatctcagagataattgcattgctgctgcagatgtttgttgaattacacagttttattttcaagcgtgtgtgtgccttaaggcctgaaatcacacctcccccggtgtgaagcacccctgggcaggctccctgtcctccccgaccctcgaccctcgtgggataacgtggtgacaatagcccggtggtagtcctggctctgcctccaattagctatatgggaatgagcctgtgatctatcctatctggacctcagttgcttctgtagattgaagagctggaattggaaaatctcaaggttctttccctcttttgatgtttcttggagtcaacattccttttgagaggtgttcttctctccccactggcttgaaatctcatctctgctactcaccaattcatgcgttcacaagacgtttactgagtgcccttttttcggcaggtcccattgtgaggcttgaaagtacaagggtgactaagatatagttcccacctctggggcgctcacggcctggtgggataggcagtccagaagcagacatgtcgcaatgcaatatgttgagtgctgttctgtcaacattgagagcgttgaggccacactctcgttctgtggcctcacacagatcagttaaacctccatgtctggtcttcatcgtcactggggatatttgcttcccttcctagctgagatctattcactgtgagtgggctctgagatgagattaggatagagcatagtaaaatgtttcccatggggaagggcttgtcctctctttcagtctctaaagagatgaaggaacacagaggagataccacccgccccatagccacgctaagctgggaacaagaactataatttttagctcatccccctacccggtgctctgtgataagaaaccagcccaacatcattctggatgccctcttccagcctccagggtctgcccgtggtggcttaactgtgatgacagttaaaatgcaagaatactttcaaaaggagggctattttccccttggcatccagcttggcctagacatccagtttgctctctgttccctgagctccaagcctcctctctgatgaagccagggaatgcacccctgtttggagatcctgtgctctgccgacttgctcaggctggccagtagcagagtccgagtgagcatcccagaggaaggaggccagagtacccaaacccagaggtgccaggcccggagagggaagccctccccacctgtctgcgctttgtgattagatatgagcaatagggtaactcacaggcagcaatctcagtcacttggtgtgtcaggtaaactgacgggcagaaaagtgagaaagcaccacttggaaacccaaggccactgccacacggccgggtcctgccacctctcagagccctcccactgagcatgcactgaccctccaccctctcccgcagagcccatgctggtctgacctgcaggatgtgttttccgtagaggcccccaaataccatcttaccaggccagtcccctactatattctctaaccttaaattccagggattccgcccctccctccctccctccctccctctccccctccctctccatgctcaccctccaccccctttccctcaggagctgctcctgtacctggagtagattcacctgcaaacactcagcttgcaggagcacagcagactggggagtttcctttcccagccaagctgagtttggaggggggtgtgggaggaggtggggagggctggggacacaggttgagtctctaaagaatgaggactgcattgccttcttccctgcctcctggttacagctgagaaagtaaccaacttcgtgtgtgtctgtgtgtgtgtgtgtgtgtctgcgcacgcgtgtgcagtgtatggatgcacagacggcccctccatggtggggtggggagccgttctctcaccctgcagctttctgcctctccctccaccctcctccgactccctgcgtcccacactgcaggtgtctctgaggcagtgtttatgtaagcagctcatgttctgccgagcgacagcgagaagctgttgtcaattcgaggaaagcccccggctgcccacatgtgtggttgtccccgtgggtttcataacaggagggggaggtggggaggtggggtggtgggcccctggggtgagggtggctgggctcagcccagcccaggagcctcctccccgctgccaacagtgagcccgcccgtgtgttcacaagctgctggcctcacctcctctcctcccagctagtttcccagccatttggctacggagagacaaagtcagtgcctcctggctctggctggctctgcccaagaatgtagtacttgggtcgtgctgggctactggagtcagggcaaataacctgacattttgaaggcacaaaagtcccaaggacctgccaaccaaccaggaggttggtttgattctgacctcagaatcaaaacatggacctgacgttttgattcacaataaggacacgtagccccatcatctttctattccaaagtcagctgtcctcacctggacaactgaggacagggagagactggacaaaaagggctcttagccattacagtagaaatggctgggacaccttatccctgaggctgagggctgtttgaggattcccattcagcacagcctggtttgaggaggaaagaaaagaccaaaacatggtgtccacttgatatgtttataagggtggaataaactccctgaaacccaaatcataattcaaatagctaatatatatggagtgcttttctgatccaagcatcatgctatgaaatgtacatttcagtcctggcaaagacttaatgaaggaggcactattagcctcattttaaagataagggtccaaggcccagagaggttgaataactagtccagcctcacacagcagttaagggagaggttctcctttctaccctgaacattaacagaaatgtgtttacattttctggctaaccaagccagattttggctttgctccaaggaagctaatgtcccacctgagaagtagctttgtttaaacagtggagaaaataattcctaactcatttatttacttctaattttacacttcaagtgctgtttattttcacaacaacacaagcgctataaacatacactgtcatcgatgaagcacgtttgtgaggtgcccctgggctgcaagttgaggtagagacagaacatgtcatcactggtagtgccttcatcactggatggtgacctctctcctgagtttcttgcttttcaagtgctcccaagtattgtcctgccaaccctctcctggaatgaggccaaaaagaaaatcctgagcactggaagaatacgctggatactgtctcttctgggtggttcatcctttcagtccttcaacacacactggatgctgttaatttcaccatgggccgtatgcactggtgatgcagaaagtgctgagatctgatctccaccctagaggaggctggcagagccagtagacacgccaccgttgtacgcatggtacgtgttagcagctgcggtaataagggaagaagtggttgcaaaacaggtgacatctgtcggccaggcccagtggctcacacctgtaatcccagcactttgggaggctgaggctggtgtatcacttgaggcccggagttctagaccagcctgggcaacatggcgaaaccccatttctactaaaagtaccaaaataagtcatgtgtggtggtgcatacctgtaatcccagcttactccagtggctgaagtgcaagaatcacttgaacctggaaggctgaggttgcagtgagccaagatca

SEQ ID NO: 1883267 - DNA, 4001 bp, Homo sapiens
ctacagatcttggctgctaaaggagatttaaactctttcctgctctctaccagggtaaattctaaccaaacctcaaactcaaaatcaaatctacagtcctctgcagaggacaagcttccgcagggatggcccttgaacccagagagaccctgtccacccccagtgaggtcaatgactggctgatccccagcactgggtccattccacagttttggtgcctatcagatgtcccaccacacttccaattcagaagtgctaaaatcaaactccttgtctttcccctggaactctcttcattctttcatatcctccatttgttaactttagggtaatggtctatttatctggttttatttaaatcaaaactcagaaaccccgggcttcttctcctttctccactctgaagtccaagcagcaactgagacctggcgctctgcttcttagagaggactctacttgccacctgccaccttcctccaccttccagggctccgtgggcaggaccgtcttggcaagtgtgtgttttcaggccaatcaccactgccacctttaccaaagggcccctcaggtccacccctcagccttgcccactctgcctggtgctctgaggccactccccactccccttggctgccccgtcctccagcttcccatgggcagtgcagctcgggcgggaacctgctcctcccaccgtgcaccccaggtcctgcactatttcttctgctcttcctaagcctgctcacagcttggtaaatattcccttcattatgctctcttcacaccgcccaggttgagagcattttctgccaagaaaactcatgtcctgactgatatacggtaccctgagtgagcgagtgagtactcatttgatatttaagtaccttttgtaaaaatgcaattgtataagttttggagggatgtgacccacagagcatctaacagtatgtcctaaacgtgattggtgcctaatagccgcctttttttttttttttttttttttttttgagacagggtctcgctctgtcacccaggcagaagagcagtggtacgatcttggttcattacagccttgacctcctgagctcaagtgatccttccacctcagcctccggagtagctgggaccgcaggaatgcaataccatgtctggctaatttttgtacttttggtagaggcggggtcttgctaccttaccagggctggtctcaaactcccgggctcaagcgatcctccttgccttggcctcccaaagtactgagattacaggcatgagccgctgcacagagccccactaactattttttgaataaatctgagttcctgaaagattgaatacaatctgtttagaggaagaagctgtaaaactgtaataagatgaaagaagaagaaaggaagaaaaggaggagcgaaaggaggaggggaagaaactgattcatgcaggttaaataatatcataattattccactgtaatttttttgcactttaaagtactcacctgtctattctgtactggagttctgaccttgtttctggtctaccacaccactgcattttcaaaccaagaattcactgagagcgaataggaaggctcgtgcaccagagagactattctcatttatttcttaattatttatcaacaaaacttcattggcacacttattgagagagtttcaaatcagcgtgctgggcgctgggaagcgcactgggtgctgagacacgggaagccacagcttctctggagaagctcgcattctgaaaggaagcgttgggagaggacatggatgaaaacatacaagacaaaacagtgagcattgtgataagagataatacagtgtcacagcagcaagaagaaggaattcacgactctcaagaggtcgagatcatccttgaaccaccactgacctcaaggcaaggcacaaggcgaagagcccccgagtggcacagggagattgagggtctcatccccactcataggaattcagcccatcagtggtctagactgagacaagaaattaagtaaatttgactcctatgccacttctatatttatccattcattcgtgggaacactgagattccactccctgtgcctgacagtttgaactaacattcttacatgttggtatcactcaagaatcacactgggagaaggtgggtttaggtttctctagctagaaaaagactcaccacaaggaatcgaatgtaatcctagttctaatccaatctagaccaaaagggtccagttactgtccacagagggctgcgtccaggaaggccatactggtgtgctcccagccacagccccagcatggccgacacacaggaatgaaaggtcatgccagctcctgctccttccttatcctaagagcccgaggcccacaccttcccttaaacagacccagggcacagcccttccttaagtcatcccataacagtgctggactaccaaagtccaagccaccacacagggatgacataagtgaggtttccatctgccaggaggccagaggaatgcaagtgtcacgtcatggggaaggaaggcccagtagtaacagtcacctccgaggggccttccttgtggattgagggtgtcttctccatgcagttagcttaataacaataaacaggtggactaggttcatgattgataaattccttctctacccaaccctccccctgccctagacaatgttggtgtctgtacaattagaaggatctattctctttttaatgcggaagcaaagcagagtgataggagcttagagaaatcgcagcacagatgtcaaggccgtaggcccaagggctgttaaaaaaagaaaactctgtaaatggaagtgaggcttagtaaggcacagcccttaagtcttggctcacaatgcaaaggaaaaaaagaaaaaagaaaaaagactggtgggtgggggagtttcctgaagccatgagtaaaatctggcagaaagcattctatacagccttttttggtttcaatccgcatgacatcacaatctgtgaattttgctgtgattgaatttgaatgaacttgtagattcaaaacaaaacccatttgaaacaagctccacaaagcaactctagcttccctgcagcagttaagtgcatttcctaactgccttcttcttttctggatggcaaggcccgcctgggataacacgccaagtccaaaccacacagacacatgcatgcacacgcatgcagacacatacaagcacacacagacatatgtgcacacacacatgcagacatacatgtgcacatacactcattcacagaaacacacacacacacacacacacacagtgggagcagcaggtccaagagaagtggcaggagcactggactggactgtcgattctacctgggagaacctgcccatccttttgttctgcttcccctttttattcctattatcttagttctgcccagtaaaggcaagaaggaagacctagaccagccctgcaaacacattgtgagcttagagaaaccagggcagaagaaaagaaaaccacacaacagtactggtgtgacgattaaagtattccactattccaggcttctcctcttttgttgaatttgtttctacagaactggggatgatatgggtaagcatcagatgtatttacacataacaggtttttgtaaatagtgagaaacatagcccaacatacctccaggtgtacaagatcattcaaaaaccaaacctgaattaaccattttgtttttctataaggacagctatgccacacattgaagaactatgctgctaacatagccaacacaggtaatcagaatgtgttttaatatgcaaataaccctatcaaggaatgcctcccaacctattccatgtctacctagcctgggaccctaaaatcctccatgtctctgatcaccctggaaaagcctaagactccaggcttttaacacagtggtactcagttgtgagtgatcttccccccaggagacatttagcaatgtctggagatgttttt

SEQ ID NO: 1883268 - DNA, 4001 bp, Homo sapiens
tttctctgacacaagtggaagagggagactgaagtataaacagaccaaataaaaaagactactttggtggtttctggactctaggagaaaaataataatgagggtttcaaggaaggcaaatgaggttggaaaggaagtgacaaatttagaggggacagattttcattagaaatccaatgttaattataaggtaagacttctgagtgcttatgaagatagtggtagtattaatacatataaagagtatagaaaaatgaaataaaataaaaacgtgtcacctgtggggtatatagagagatttgtttcgaatatgttgaatttaaggtgctcaagtgacctccaagtctagatgtctggaatgcagatctgtgtgtgggtttgtgacgcaggtggaggtagaaggtgagacgggaaattgcaaatcactgtaacagaaacaggagtttgaaccactagagatggagagcgtacacaggaagaacaccgtgtgagaagacaacaaaaatggaacccaggtgcactcatgcataagaaaaaccactgtgtgttcaattaaaaagaaaaggcttatgttatataaccccaactgttcctaagcaggatgaattatgttagtaagaaaagccctgttttgagagtacattgataggtttagataagcaaatatgagatatgcaaatctgctaaattactctgcaaatgagaacaagagaattgaagttctttagagaaaaatacagacaaaagaaccaaaaaggaagactagatgcttagggaaatcagaaagcgagattctggcaggaactttagaaaaaatatgtttcaaaaacatttgaaattctatgttgtgatttacactcttcccaaatgaaaacttcagtaagtccacagttctctaatatctttttacacctgtggattcactggtctgggattgtgtggagggggtcagttctctaagagctattgatttccacttttggctacttagtgcaattaaaagacaatgtttataagataagacagaggaggccatgagagactaggcagcaataactgacacacaaaaaaattgtgaggaggacttcctacttcccccaggggctagaagtttcctgttgacccatgtgctacacagtatagatattcataaatgatatataccaacaaaacacatacaacacatttagctagctagctagctatgtgatcttaggcaagtttccaatatttacccatatacagactcacttacatatgcctctgtattcttatatcaaattcaaattcaaaatgatagcctcattgacatgcatagcatgtctatatatttaacctcctttctattaatacattccctaccatgtgcatatgcaaattgttgcttcactgtacatccccaaaaatacaggaacagtatatgtattgttttttgttgcttgttattttaagctacatattcgccaggtgtggtggctcacacctgtaatcccaggactttgggaggctgaggtgggtggattacctgaggtcaggagttcgagaccagcctggccaacatggtgaaaccctgtctctactaaaaatacaaaaattagccaggagtggtggcacataatcccagctactcaggaggctgaggcagaattgcttgagcctgggaacggaggttgcactgagctgagatcgtgccactgccctccagcctggccgacagagcaagactctgtctcaaaaaaaaaaaaaaaaaaaaaagctacatattaatctctggttttagaagaagataattttttaattttatgaggttttgtgttaggcgaatcatgcaaagcagatataagaaacttaaaaatatttccataatgcaaaaacataaatcagaaggcttttttagaaaaatcaatacagccaagcaaaccttatgtgcattctgcaggcagctgctgtcaagtttccatgttgccctatgggtctcagaggacgcccttattctttctgcagatactgcagagatgtgggtgtggtttccaatacagaagctaactgtctatgaatattcataaacacactctagctaaaaccttctaagggttttctgggaacagttaaaatagcaacagtaaattttaatctaaccagataaaatagataaggaaggatgctgagttatttgaaaatgaatatataaagcacccactcccaaagtctgttcagcacagagccagtttcctccaaatcagtcccctctgagttatgagggcatgttacttgaaacagattggtaaggaacaagaagcacaattcacagaagctacaaaacaataggatccaatgatatgttaagacagtgtctataattggttatttctgaatccctaggaaaagttccaaaactcagcctcaaactttccttacatagtattgattttttacaaaattgtgcacttaagcattgttttcccaatcatgagctgatctttgcgcaacatgtgaaaaatacaaagttgtataaagaaagccaaaatacatttaattcctcaatccaaaaattataaatgctataaacatagagacaactattttatcttacataaaactctatgtgcaaatttatctgtgtatctatctaccatctatctaacctatctatacatatatacacatacatatcacataaatctcttcatacaaatttatccatatatccatttatctatcatccatctaacctatctatacacatatatacatacacacaatatttttaaatggatattttatatatttaaagacagtggtagtttatctatatactgtttgatatctctcttttcaggttatatcaaggtcactttgctaaatttttacaaatgatctaaaatcccatattatggatatgctatcatgcatgtaaataaactttaattgttggatatttagtaatttttattttttgctatcataaataagagtataataaatattactgtacataagtctttatgggcatttctgtttatttcctataaataaatttcttgattaggattagcctggtaaacttccacaaaattttagagaatgtatagaaatttttgctcttaaacgaatattgcttattttgccctatagtcacaactaagataataagtattatcacaatagcaaaaaatactaatctgcattattggattactaacaaagggaacattcccatatgattatttatttcttttcctattatttggtaatgatcatattatatccttgatcatggtctttaatagtgcaaaaaataatttttatagtatttatttcactctctgtttctatcattatcaaatacagttttagcaaaatgtaaatttttgttaaatgaattggaaagcttttgatcttattttcttttaacctggcataattagttatggacattaaatcttggaaattcaaaataaagatagacctggaattactagttgcggcaacagtatttttcagatgtaattttttggccaaaaaaaaaaaatctcatatttgcatatccatgatcaattcctatcttctatttattcttaaatcaaatgaagtcataacattttccagaaattatgtttattctgtcaagaattcaaatgaattaaaatttattagcagagtattctacatgttagttatttaaaatatattttttattagtcacatatcgtttttatttataacattgtggggtttttttcctctatcttttcttaagatagataaaagtttagttaattagtactttattttctgggaagttatcattttaatttataagtgatctttgtattcccacttaaagtttttgccctggaaccctctagctgtaactaatgttatttacactttgctttagtattttataaatttttcatccaaaatattctctccaacaagttactgataacaaatccatttcaccttattttggaagagattactgaacaacagaattg

SEQ ID NO: 1883269 - DNA, 4001 bp, Homo sapiens
atatgaaaaaagtcaaataatttgccaaaagagacaactgattaactagtatagtcacaattctaagccaggaagtctaactccaaagagtatgcttttaatcattattatgctactgatattaatacaactttgacaggaagaatgcacagccctcacccccaaaattcagaactgtgtaaatatctcactcccattctcgtcttccatctaccatccaccatacttcccaaccacagtataatggtgcgtgagttaacatatcaggtaggaagcgcaaagctaggcagctgtcacctcccaattcagccagagcatggctgagatgtttttgtccaaggaagaactgtatttggggatggactaaaacttaaacactctttgaagccctcattggccacttcctagcagacactttgggatccttgaatctttcccttgtgttatagtgacctcaatttctggatgatcccttcttaatagaatagacctctacttgggtggtgctttaattcagcttagtgtgtttgggcaagctgtctgttgctgtctctgccatcactgtgcataaaagggaagacggtgggtcaggggatggcagcggccaatcaagagataacagccctctgctaaagcttccttccttgctttaatcaaatgaagaatgcaccagatgagggtcacttggaacacatagggaaaggtagaatgcctacaaagaatcttccagaccccatactactgcatttccatgaaatgcacaaggtccatgggaaggattattttacaaatgaggaggctagggattaagaggtcctcaaacacacagccaagaaatggcaaaacaggaatcacaggcctcagaccaaagccaccatccgaacagtaactcattccagttttaaaagtgacagcatcacaactggccactggatgacctcagagttcaatcctgctaaaagtagctttggattgagaccatcctggccaacaaagtgaaatcccgtctctactaaaatacaaaaaattagccaggcatggtggcatgcacctgtagtcccagctgctcgggaggctgaggcaggggaatcccttgaatccaggaggcagaggttgcagtgagctgagactgcaccactgcactccagcctggcgacagggccagactttgtctcaaaaaaaaaaaaaaagtagctttgatgttgaaaggggctgggtagtagagatcagttagtgggccctccccaatcctagccaaaaggagcacagtatccatttcattttcacatcttcaggttcttcaaagtcatgcctaaagtggggaaagaattaaaagatctactgtcattctaacaggattcaaagagaggaaccactggatggaaaaatgtgaattattttagacaaagcctttagcatttaaaatactcctcatcccataattaatctattcctttctctcacgttatcagcatcagtgccttgatatcaaagtgtatgtcaataagtcacagaagggaagataatagttggagtgaccttctgagcttctaggttgttctaccctctcccttaaagtcctggctcaggggtgtgcctcctcaggtccaccagggaaagcagctgtagagtaatctgatcctctccaaaatgtccgtgacgctgtctctgaagaaggacatttcccaagtttaagctatcattacctactgcagtcttctgtctggctgaaggaaggaagaaataatctcctaaagtggcacattgtgcaaatctgatgcgtcaatcttgaagcactgccaagcaattcagaagagaaataaatcaattcattccatctccttaatgctgccgtgtctaacaggtttctatgctgaaaatatcaccagctggacactgtgacacttaatattgcaccttcagaaatgaattatcaggcacaagcccagtctgatgtcattctccttccctggttcacttgaatcttcaagagaaagaacactcaggctcagaaggaacaatgataaaatggtagaacaacatgacatcacctccgcatcacaaaacaggcaaagttataatcctcttcactaggatccctctgtgactcctctaaacagaaacaataacaaaaaagcagaggcagagattaagcacacttacagatttcagaggggaaaaaacttagaaaagtaaaaaacgaatgtggactgatgccatgtaggttctatttacttatccattaacgtctttgttcaacatgtactcatcgcatactggctgtgttagaggtattattctagggacatgtagatatgtaggtgtacacagccctgccctgagaaaaccaagctttgtgagcaagcaaaacaggcttctaaatggatggtcataaattatgtgatgtctgtatcaaaacatctcatgtatcctctgaatatatatacctactctgtacccacaacaattaaaaattaaaagtttaaaaataaaatacattgccacatatacatgaaaaatgaaattctggaaaaaaattagaaaaataaattaatgtgatacatggcaccaaagaggaaggcagtaggtgaaattgcccaggggaatgaagaggaggcttctaatgcttgttggaatggagaaggcgtcagagaggtaacttttaatcaaggtcttaacaaaggtacaagggtttgccaagcagagaattaacattccagggagaagcagcgagtctaagcatacctgagtttggtaggtctgatcacagaaagtaggttagtgtagttatatcatgaggtatataggaaagcatggtatgagaggacattaaagacaggctgcattggatattctatgctgtggttatctgttgttgtttgagacaaggtcttgctacatggcccaggctgaagagcaggggcatgatctcggctcactgcaacatctgcctcctgggttcaagtaattctcttgcctcagcctcctgagtagctgggactacagacgtgtgccaccatgcccaggtaattttttaattttttgtagagacagagtttcacaatgttggccaggctagtctcaaactcctggcctcaagtaatctgcctgcctcagcctcccaaagtgctgggattacaggcatgagccactgtgcctggcatggtgtggatatcttaaaggcaaatgacttggtaaaataacttaaatgaaagtaacaaggtaaaatttgtgttttaggggggagaactgcatgattttgaaggttggataaaagaaggctactgtactgtccaagttagaagatatgaaacctcagagagactggagtagtagaaacatagattaaaggagggctataagaagttcttttttgattggataagggaacagggatgaggtcaagggcagagttgatgctgtcttccatgtttctgatttgtgtagatgaagttttatgggttccttaaccaagaaaagaaagtaagagagaagcaggttagattggagatgacaatggagcttaagtttgatgcatttttaactttcttatgtaaataaatatagtgaattaatataacaataaaagtatactggtaagtttatgtaatcaaattggggtaactgagatacctatcatcttaaatattgtctttttttaatgcgaggaacactcaagttatttttttccagctactttgaaatgtacaattgatgaatgttaagtgtagacaccctactaatgtatcctgaaaatatgtacacgtatatcaaccaaaaaatctaaaaaaacaagtatactaagaaatactcagataagttttcctaaaaaaattacttaaaaatacgcattcaattttactcagttattgtgttaacagttgactatctagaactttggactaggagcagagggtatatagtacagtgtaggtttatcaaatattgttttagatttaaaagaaacgtgttccttttataggttttgaaaacaaagccca

SEQ ID NO: 1883270 - DNA, 4001 bp, Homo sapiens
tatagtgccaggcacaaggctaagagatttcgtccactatttcatttgattctctccagaaccttatgaatggcatattacctctgttcctatttttcaaatagggaaactgaggcctcaggcaatgtaagcagcttgccgcttagcaatcttttgcagagccaggaagcgggaaagcgtgtcttaatggacagtaccagcctccacagtgtgccctcggccccctcccggtggagaagaggttccaagccccggcgtcccgggtagggtgtccctcatccctccctccccaccacactcctggcgcgctgacattacacccgccccggcacccccctctcactgatccaacacccccggacaccctggacagcgctctcaaggcagtaggtcttcgacttgggagccccggggagctggttaaacacggatcctctcccacagtggctgaaaagcgcgcagtcccggaacctgagggtttacctgcttctacgcttggccaagggtctctaactggaaaggtgaaaattctgtcctgagattttaagattcccagaaactttcaatcgttcagttcctgtaaccattaattgagcgcctaaactgcgcaccttgacgctgttagatgctgcagtaaggaactcggagtcaagtgtgggggacaggttggtcaataaatgacgacattccggacggctgtgcttggtgcccacggggacccgcgagggggcccagggaggaggcgggaaaggggcaggttcaccggcccgctgggtctccagcacattccagaagtctaagccagtccatctatccttccaaacgcccccacctcgcttccctccctggagcccgcatcccacggtgcaatttcagtgactttatgcggagaaacttgatcctatctcactctccccaaacttcctaactgccttgggtttgtcacctggccgtgtggggagccaccgagcgccccctgtggcccccacccgagctcggcggggggagcggcgcgcgggtgctgggggaccgacccctcccgcgaaggcgtcggcgcggggctggcgtagggcctgcgtcagctgcagcccgccggcgattggggcgcgcgcgcctccttcggtttggggctaattataaagtggctccagcagccgttaagccccgggacggcgaggcaggcgctcagagccccgcagcctggcccgtgaccccgcagagacgctgaggaccgcgacggtgaggccctacgtccgccagcacacccgggcccgcttctccccgacgcccgccctcctcacacttgccttcttctcttccctctagagtcgtgtctgaacccggcttttccaattggcctgctccatccgaacagcgtcaacgtgagtgaatttgcccgaagcttgtctttgctgagcgggtttggggacgtctgcccgccctctttcccttcacatttcattgcatgggttccccaacagcgttccctggttcttctttgtgaccccagtcaatgtcctgcctcccccggctcccgctctctcgcccctggtctgcggcgttctctccggaatcttgccctgggccgcggacgcccaggaaaagagccgggtgccccaggcagcctcgcgttgggggcgaccgcgccatcccgggaaccgcgaggcgatctgagtcgcctccacgtctacctaaaagctgtcggccgggagggcggggccccagaaaggagcattcctgcgggcttttgctcgacgatcccctgctgaggctgtcgcggcgagggtcctgccgagggaccccgttctgcgcccaggcaggctcgaagcacgcgtccctctctcctcgcagtccatggcgcggttcctgacactttgcacttggctgctgttgctcggccccgggctcctggcgaccgtgcgggccgaatgcagccaggattgcgcgacgtgcagctaccgcctagtgcgcccggccgacatcaacttcctggtgagtgttgcgcgcggcgagtgttgcgcaccttgtgagacagagtttccgcaacagtacgcggactgcctccggcccaccgcgcggcgcgtatggcggttcgcaccgggtcggagccgcagcggcgcgagcccgtggtgacctgggtgtctcagctgttcctggaacactgactgaagtcctgccctggctcttagcttcggggatccgcgactatctggggaccggtaagggtagcggtgtcgccgcacaaaccaagtttgttttaaccctgggaattcgggaaccccgagaagtcctctgttcagcacctcggatagcactgggttctctcctgggctgtcagaaggaagatggctgtcaccacaactcctaacatatcccagctaagggcccctccacacgcagtcatcttcccatctttcccacaaataatgtaattttttgttagtgacatttcggtgcctttctttagatttatgttccccagctctcttaacctcaggtccctcattccctaccctcacctgtaaataggagagagcaaagggatggaaaaggggtacggggagaggaaggcgaaataaccgtagacaggaaagagttcaaactgtctcactagccagtgatgctggaattcaacttctgtttcaactgccctttgtaatagtaactaaaacaacagtttaatttggctatgagaaaggaacaagagaagtggccagtgtccaatgggtgacaacagtccaaagatacactgcactacagggggttggggaaagaaaaagctgaggacaaaataactttcattctgatcatggttccccatgggctgtcgaatcacctctggtgctctactgagtctgaatctccaacctcgagactcaggtagcttcacttttaccagctcccctgacaattcctttgcattgcttttgaaatttgttgaaattttatggtgacttaaaaagctcatagagaataatgtattcatccaagctgctttgggttccacctggaattgaggaaattttaccttatgtagatgtttgaaatggggagaaaaccaaggaacagtttccaaatatctgtggtatatatttcaggttaaatgtttgtttctttgacctgtgctaacttggcattaaagagaagacacataggaaggttgtatatttaaactatgagaaaaatgtttcatcttcaataggagaaacaatccccttcacccatctttcttctttctcctgtagtcatgagcttttaacctatgcctaaaaattgagccagtgctacaaatataaggatagatcttgtggataaagaattttagacacagaaggaggaagaaaaatccaaaacatgccacatagaagactccactttctgaccccataattccctgtgcccagtcacacatattttgagctttgcctgctcaacatgtcaggggctcagccccctcccctagctttctctgccatctgaataaaggttatatggattctagtctaatttttctaatcacacagactgaccccaaagtagtatcatatttacttaaattatgtgagttagcgaattaatatgactgacttttaatcatgcctattcaaatgggtttttttcatacttaatctatttgattcaccaagctcccaaaatgctactaatcttccttttgcattgttgaggaacttgagcagagctcactgggtagcagctagctcttccctgggtatcacctcaaatcttgacttctctccctctctcaccctcttctcatcatgtaacaggattgtgggggaggagaagaggaaggctgctctttccagaattttccatactgctttttatgctcttgttgttatcacttattactattatcattactttaatccaggtgatggaatggcacgtgtagtgttagcaacttgaaaaaaatagataataagcaaccatcaataaaaatagtcttatagaaaggcattttgcataataactgattt

SEQ ID NO: 1883271 - DNA, 4001 bp, Homo sapiens
agatgagactagcggagaacaggggagccagtcttggtagggtcttgtaagctcctgagtgatttgggaaaacactgaaaagattttggacaagagggcaccatgatctgattagggtcactctgggagctgttttcagactgcagcgcctgtaaacataaatgtaaggaccccagaaataggggcgtcaaggctggagatggcaatcataatcagggagaggagccattggggaagctgaatctccagaggcaagagcaggacccacggagtccagtctcctttacccacacagtaattctcctacaccaccaaccttggaggatggggtttggactcttggcagctgcgcataaggtgggctctcagtaaggcttgtggataaatggaagaagaaagagaaaacaaaaaggatcctactgatggaggctgctggtcaggacagcgatgggcaggcccaggagggagacaggttgcaaacacaggttccctgtgcagaggggagagcagcctgcagagctcccatgtaggggagagcagagcccttgaccccacaggggtccaggtgcctgttctgatcatctccccaacatgcatgcttcattctgtcatctggacccctggggacttcctcttggctgctcattatggttttacttctctttaattcagctttagagctgtaaggagagacatggcataattaatgagttgagcttttagtttttgtcccagctgccaaggctaccgaggtaaagatgcttttgcagtttttttctattgttaaatattggtttactcttcaaattttcccccactttccaatatctatagaatgtacttatgtatgtcctttagggtttgccatctgtcaaaaagcaagtacagatgaggaaggagaggaagcaaagatcagctagggcacattgtggttggaaaatatgccagctgtgattcaattctaaatttactacagattcattgcagaatccaaatcaccttttcataaaatggagaaatattatcttctaatctaacacagagagatcccgtaaacacccagagagcagtcgctgccttcctgttatgaaggcttatgttttctacactattggtcatctatctccaagggcttctggctgtccaagaaactgtgatggagccaaaaacactttccaccagagtccccactatgatggtcacaacatttacttactggttaagactgcaacttccagattgcaactgactgctggtctgtggaatgatttatatatatatatatatatatatatatatatatatatatatattttttttttttttttttttgagatggggtctcaccctgtcacccaggctggagtgtgcagtggtgcaatcttggctcactgcaacctccacctcccagattcaagtgattctcctgcctcagcctcccaagtagctggaattacaggcatctgccaccaggcccagctaactttttgtatttttagtagagatggggctccaccatgttgtccaggctggtctctaactcctgacctcaggtgatccacccacctcagcctcccaaagtgctgggattacaagcatgagccactgtgcccagctgatgattagtatttttatgtgttcttaaacagatctgtattaatttgctatggctggcacaaaaaaattccacagactgggtggcttcaacaacagaaaatatatttactcacaattgcagtggctggaagtccaagatcaaggagtctgcaggactggtttctgctgaggactctttccttgttttgcagatggctgccttctcagtgtgtcctcgaaaagtctttattctgcatgcaaccatgtctgtgaccaaatctcctcttcttataagaacaccagtcatactggattagggcccactttaaagagcttattttaacttaactctttaaagactgatatggtttggttttgtgtcatctcccaaatctcatgtcgaattataattcgcagtgatggaggtggggcctggtgggaggtgattggatcatgggggtggtttctaatggtttagcaccatccccctagtgctgtcttgtgatagaattctcatgagatatgattgtttgaaagtgtatagcacctcccctcttctctctctctctctgtctctctctctttctctctctcctgctctgccatgggaagatgtgcctacttcccctttgccttccaccgtgactgtacatttcctgaggactccctagccatgctttctgtacagcctgctgaactgtgagtcaattaaatctctttgtttcataagtacccagtctcaggtagttctttatagcaatgtgagaacagactaataccaagaccttatctccaaacacaactatattctgaggtactggaggttaggacttcaacatatgaattttgggaggacataactcagcccatgatgagatctaattgtttatttgacaagcacctgctgagtacttgatatgagctaggcagttagcctagctggtcagggcacagtcaaaactatactgattatgttaatgagccagttggcataaccctccccaaggacagacaagagagtatagcagaagtggggtgatgcttccatcattcttgctgaagcagccccaagcacttgtggtaggtgcaccagaagatcatcttcaggaagaagaaagacatgctcaggttgggagactgctgttagacacagtgggcaaacccaggactatggtgtccagagatgaaggcttcctctctgagccactgtagggggcacactccactggtgttggactctgaatagacttggggaatatgggcttaaaggtcttaaagtgaaagggccatatgaatactttgaagatgctaagtgatgacatgattcagtgcttggaatggctcagccatggccatatgagtagcagcttttgatcaagtgtcatgggaaggtgaatgcgggcagggggaccaatgcctgacagttgagggtaaaagacaggacagcccagacattcagtggtggataagagcaatacctaactccaaagcagaagcacatgaacacattgaaagaacactggacacagtcatgggctttatttttatatgccttaaacctttcatatttattatgtgatcttatcctcccaacaaacttgttgagtaagtagggcaggtattattaatcctataagttaaatgaggcaataaggcccaagtcagtcaaatgagtggctaagaccacacactacattaaatcaaaagctgtttcctgactcccattcctgagttcactcacctttcagcactgagactggttgtgggatttgtcagtagtgattttttaaaaagctcatgcagttctttttggctttgtgacagaagatgttttggctgggtctgagccttgcccagctgcttgtcatatgtcaagagtcataatgcaggagtgaaccaaaggcaccccttgtccttgaatatgctgagtggtcatgaactagaatggtttttgaagggagacttatggttgagtcacggcaaggcaaaaggaagccttcttccctccctcccttcctttcttgtctagagcttaaaggcaatgtcaagcagcctactgtccattctatttcccctgggccacccccttggccttccttggctcctagactcaaagtctctcccaagcaaaagatgcaccagcatttccaatctaactccaaagtcctgaggctacttcctctgggaagcccttcttgagcccccagacctgaggcagggatctatcccttctactccacaaaccctagcactgtcatagcaccagaagctttgactagcaattgcccattggcctttctgggttccctatgagattgcgcttctcatggacagaggctagtccttttggactacaaatttattcccagggtgactacagtgacccaggatactcccttgaagga

SEQ ID NO: 1883272 - DNA, 4001 bp, Homo sapiens
tttgttggcacctactgtgtaccaggcaccagaaacacaaaaatgaatatgacccatccatgccttccctcaaggcacctgtatgctagtgaggaaatagagcccaaatatgaaagttccccatcacaccataagtgcttttgtaaaggtgaactctggtgatgcactctctgatagaggagagaaaactaaaaatctgagagaactattgagtaacacaagcagaaacaaccaggtcctaaaatatgtgctaaggacgatggcattctagtagtgttgatcaggaaggatatagatttctgcaggttcaacatgaaaggcaggccttatttgagggagtcgatcttaaaagctgagcagaaatgcagtggtggaaggggaaggtggtaaaacatcataaagattttgtctgaaatgtttaaatgaaggcatctagagattcctgtgtcagacagagttgaagaaaagagacaccttcttgagttttaacccttactgcagaaggtcaagaaaagctctttaaatgtctttcatggtccacttgtaaaagttctcagcattccttataggtttttataggttcataataactccataaagaagggaagaaacgagagagaacctggagctcagagatgttagggaagctggcctgggtacaccttccataagagcacagccctgactcaggcattctggcctcagatcttgtgtttcttgcaatgggcctgactactcttgaaaaaggaaaaatcaaaattcaagctgggcttggtagctcacacttgtaatcccacactttgagaggccaaggcaggaagatcgcttgaggccaaaagcttgagaccagcctaggaaataaagcaagacccctgtccctacaaaaaataaaaataagaattagctgggcaaggtggtgcacacctgtagccccagctattcaggaggctgaggcaggaggatcactcgagcctaggaattcaaggctgcagggagctatgattgcgccactgcaatctaacctgggtgacagagtaagaacatgtctctaaaataaataaataaataaattcacacaatctgagcagaaggaagtggattcggagtgacccagcagacagaagccaggggctttaggacagggacacccagcatggtgacctgcctctaatggctaatactccttggctaggaggctcaagtcttgaagcttaatcctcagaatgtccaattatatattcctcagagccatcttcaagactgaaaacaaccaaaggaatcatacaaagaaattctacacttgaagattactccgtccctggaaaggaattctttgggagattgtctaattctggcagaaagtctacagctttgagggatggtgaaatctgctgcggggcatacaggacaggatgccctcttgagacttcaaccctgtgataatatgagcccattgccatactgttgctaggacaagtgaccctgcccattgtcacccaggccatagcactctctgcccacaaagagaactagttcacaggccactttctctttaatcgatgacaaaaagcagcgtgatagggctgtgggcagaaatccaattttaaaaggatttcaaaggatgcaaattgtttcctggagaagggctaatgacagctaataggccagtcctggttaacaggcagatgacctggctgcagtttcctatttctgttggccataatcacaattcacatctgctattttcatcctcctcccatattatcggcagtgcagccacattttcactcctacttctcccaaaggacgtcagcatgcctattttacataggtatacaaaagcataagctttcctttatcagcctaatgggaaacaaacctgcccaggtctaagcttgttatcctacctgattgttccaatgtatatccaccatctagtttggattgttcaaaagcaaaggaaatggagttgctttaaatttatgaactgacgaggttctgagtaatggtgaatcacagctcgatatttcacttaaacctcagacacggagctggctcctgctgcagctctttctgggtcatacgaattcatcagagaattgctcatggccctcagccccgagctaggatggagagctggatgaggccaaggtcagccatgcccaaggagagaggctgccatgcatcggaaagatgcttcagaggacaaagacatcagcccaagtgttgggcaagcaatggaaggcagtgggggtggatttctgagaatatagaaaaagagaataaaaattctcgcttgattgtgtaggaaatggatgcaataaaggagtccaacagcatggacccgggtagacattgtcttggattcacctcgaagtcctattcttatcatcctcatattgtctcactccctggacactttccccacctagagccctgtgtatgcttagaagactccaactcatctttcaagaacctgcagaatgtgacctttcttgagatccctgcctcaatttccccagaactatttagtttgaatccatttttaccatgatgctttataaagatttgtttttatttctacctcccccactagacagtgatcatctcaaaagcaaggatggttctcattcatctttataccaccaattattggcatagtgcttaacaaatgccttttggatagagagctcagagtgaataaatagaaaagggaaggaaaaatgaaaaaagggacaaagggaggaggaaaaaactgggagagtttcatttttcagcttaacaagattatttcttaaatcagatgagatgattcaggctgggttgtactagcagggagaaaagggtaattacattttaaatctgctttgaatactattgataagactctacattttatgggctttactgacaagaaaaattaaaaaaaacctggtaaaagagtcaaagaacgaatttaaaatgagatgatcttgttgtagataatatgctaccctgcaaccttagctgcctgcctgcttgaagattctcagtcctttgcttgtccgttccagtgaagcaggatagaaaagaactgtgcaattttgctcaccactttgatccctcggggtgctgggagactcccctattgaaggaatctgagggatcctgacaggtttccaaacacctaccttgctactgtcaagatgggcccagaccctcctggagagatgaaatgaggcaatagagtggtttggaagaccatactaaaactcttttcaaggggtggcatgtggaatgccacagcccctccaatttgagagctttgtccttctgtatgcctgaatgagttttcctcttctcacatccaattggaatgagggtgctccagaaggcatttctactcacaagtcctgccataaacacagagatggctctgcattagcttctagagatgctaaggagaatagagactttctaccaccttgatgtgtaaccatggagcaagggtccaacttgagaggaagtaaaagtcactggctcaccttgagattcatgagtgagggtttggggatgtgatagttaattttatggatcaacttgctgggccacgtggtgcccagatgtcaggtcaaacattacagtgggtgtttctgtgagggtgttttagatgagattcccatctaaattggtggactttgagtaaagcagttgtgggtggtcctcatccaatcagctgaatgcctgaatagaacaaaaacactagtgtccccaagcaagagggaattttccagcggactgccttcagactccatctgcaatatgagttcttcctgattctatagtagactgctttcagactggaactggaatgttggctctcccatatctgcacccagcagaatttggacttgccagcctccataatcatgttatccaattccttataataaatctctttctacacatataacagaaccaatttcctattggttctgtttcttggagagccctaatatgga

SEQ ID NO: 1883273 - DNA, 4001 bp, Homo sapiens
tacagtgaaaaaaatgaataaactgaatgtctgatgagaaatggaatattcagtctcaatataccacctcacaaaatatttatttattacaagaggaaaagagtaactttacagagaactctggaagacaccactttaaacgaataatcaaagtgaacattagcattcaagatgagccttggcatcacagcaagaccccacctctaaaaaaaatagctgggtgtgatagtggtgcatctgtggtcccagctcctcaggaggctgtggcaggaggatcacttgagcccaggaggttaaggccgcagtgagccatgattgtgccactacattctagcttaggtgacagagcgagattctgtctcaaaaaaaaaaaaaaagaaaaaacagaaagaaaaaaaaagaatgcttacacagggcaaactgaaatcaagtgcagtggaataacgcttctgccatgttcctgccatcaaatcccaagggatcagcacacactcaagtgaagggacagtccacaagataaccagtccttcatctttgaaagtgtcaaggttatgagactcaagtaaagactgagcacagcctcagactggagactaagagatgtgacaacaaaatgctgcatgccaacttgaactggatgcacttactgtgaagaaatcactgggcttggggagactgagcggcagtgatgcaccatgtgaccttctcagttgtgactgaaggttgttcggactgaccatgtaggagaagatccttatttgcaggaaatacacaggagtgttgggggtgatgacgcattggagagtaagtgttgataactcgccctcagatggttcagaaaacatacattatttgtgctgcaattgaagcttttctgtaagtttgagatcgttttaaatttaaagaaaattatacacacacccacaaaactatctcttgtaaatgcctgagaagatcaggactttcttcctgcaatgagcaattctaaccaggaaaagctctctaatctgtgtgtacctgtcttcagaatctggcccacagggtgtgcttccctgaccctgccccatcttccctgaaattctaacagcatggatgtcagggaaacaggatatcagcacacctggctgcccagccctaaagagcaccagtacatagagtcatggctggcttttactgagcccttattgtatggatggggtttgatgtcaagctgaccaggcattggatcttggttcacattcgctgtatgatcctggacaagtcacttcacctctctgagtctctgctgtctgctgggtaaattaaagacaatagcctctgtcttgccaggtggtggtgcggattagagagaattgtgcaggatgtcaggtacagtgatagtttctagactttaggcctttgggaagtcagcctcataatcttttgggaatctccttatcaaatacagattcctgcaacctactcccagagtgatcccagctcacctgtcctgtttcagctccagctgattcacttcccccgcctcaggcttagaccaaacacttcacaatttcccacatgcaccatagcacctcttgctcccatgcctttgtacacacagttcacccatccggaatgcccttccccctttgattggaaaactcctactcctccttcaaaacccaggcgaaatgtctcctgatttttgaagccttttctgatcacgccccacctcccaattcccagtgctctcttctttgaccagttgttatgacattaataagtataattacctctcatttagtgaatctattatatacctgcaatttcacacgcggtatgtattttaagccaaggactaatcattagccctgttttcctgtttgctcatgaaaaagctgagcctctgagagtttaagtagcttgccctgggtttcctagctgatacgggacagagccagaaccccaggccggagtctctagctctggctgttacggttttggctctgcctcccgcccagcgcacgcgctctcagatgcagggttcccatcagccagcacagtccctgaagcacaaacatcagggagcagtgtcagtcggttcctatctcccaggtccacacttccttcagtcacaccaggctctctctgggcaggctgagagaatggagctaggagcctctgaggctggtaagccaggtgcctttgggaagtggccaggactgagagtgggttaaccaagcaggacctctcttaaggagggtattggccttccacgggatgcagcactgaggtctgccaccagggggcgctgctgctttatttcaggagctgcctctgcccggcgaaggacgggagcgttttccactgtgtgtgtctggggctgtgattgtcagaatcctccaactttagaattcacagactgaagaattcatgctcacatgactgaacaaaaatatgtggagcatgaaatttttactcaagaagtagggaacctctctctcccttgaggaaaagcgtcctccctactttcctgggagttaacttgctgaggctcgcaggagattccacgcagctatgcgctctgctctcttgttagaaaaaagatgccaagattgtagaatttgaccacaaacaaccgagctccacaacggagtgtcgctaatgtgccaggccctgtgctggggggtgcaaaaaaccccagtgtttagatttgcagtggtaacttcagggtcccttcagcaaactttagctacagttgttaaatcttgctgactgatatattctacaactatagctccatttttccagcccaaatttagtacatatgaagtgacaaagcatcccagaggcaaactgctttctaggaagtgtagctcaggcacctaaatgttggcattttagggataacggcttatgggacctatgagcagagcatttgaaaatagacctgtctgaaaagcccaggtcagaggctgccaagagcagagcagggcaggccccagaccacatggctctggggtcttttaccctcatagacccttctccaggaagcttctaccaggggtcacagcaaagcccctcttctgtctggcattccactccaggccttctccttttctctctctgcaccttctcctgggaaatctcatccaaatccatggccctaagtatctattaaagatgcccctaagaaaccattactgaacatatagaccaagaaataatactgataaatgattgctgcggtgattacacaaatctacacacgataaaatttcatagaaccaaaccacacaccacacacacacacacacacacacacacacacacacacacacaaacaataaatccaaaagtatgagagaggtctcaatcaatttggaaaggtttttttgttttttgttttttgccaaggttaaatgtgtgcccataacacagcctcaggaggtcctgaccacagatgccctaggtagtgggcgcacagcttgttttcctacatttgaggggggcatgagatatcaaccaatattatcagatgtacattggttctgtgcagaaagacaagacaactccaagtggggccttctaggtcataggtggacaggaaacctaaggttgcattctttgaggtctttgatcagcctttccctgaatacacaatttacatgtgggaggggatagaataatagtcacttatgccttaatctgactcagtgaatctgcatctttacaaaagcaataaggcagaggaagcaattagatatgcatttgtctcagatgagcagagggatgactttgagttctgtctgtcctttgtcccacacctgtgaacataaactatcaattcacattgccagggtgaaattcaacagaactgttttcaggtaaagatcttgcgatctacaaagaatttccttgtgggcaaatcgtgatggaagaatgtagctttaaaaaaatatattttgtagctatcttatttaggactaaaatgggaggcaggtttgcctgactcagttcct

SEQ ID NO: 1883274 - DNA, 4001 bp, Homo sapiens
aaaatattattctcgtcttttctgtctttcatgatttctgataagaaagtggctgttaattaccattgtttctttgtatttaatatgttagttttcagtatttactctttatatttggctgtcaacactttaatatgatgtgccttagctttagcttgtttgcgttcattgtgagtattgtttgtgcagcatctagtatttaaacatttttatctttcaccaaatttgggaaatgttcagctattatttctttaaaaaatattgttctacatcattctctcatctccttctggcattcctattatatgtatgttttcttgttttatccagtctaacaggacactgttaatttcccataatcaggtttttcaccttggacaatctttattgctctatatttgagttcacttactctttctctgttctatttgaccattaagtttttccaccgactttttatcataattataaattttagttctataacttccagttgtttcctattttattgtttttaattttctgctgacatttccaacttctctgccaagatttctattcactgaaatcatgttctgttttatttcattgactattgttataacagctgtcttaatttctttatctgtcagttccagcatctggttcatctctagcttgaacacaattaatgtttttttctccttagaatattttccattttcttggatctttacatgttggataattttggacagaacgttagtatcatggatgttaacagatcctagatactgttatttttatctgatagagcatttttttttctttttgcaggtaatattcttagttggtcttcaactgaatattgatttttgacagcagttcagtttcagttcagatctttaccagagctgctttgtgtcttttccatgccatatgcttctggattcagtcagtgatatgatggacaggaccagggatcccctctctgatgatggacaggaccagggatcccctctctgcctctttcccttctaatattaccccactctctctccaacatttacaattttctggcttcattttgatttctcagaccagaaaaattaagttttcctaatggaccactgccactgctgtctgagccatgaagacaacacttagcccaggctaaaagcagtggagttgaaaacttacttgtccagatccatatctctcctccttcaagcaagcatggactcccccattagatcctgtcatcttctcttcagtctccagtactatcatatgattacgtgcagtctcacagttgttgtatgcagggtgaagaaatcatccaacagggtcttagtctattatacccataagtggaagtctctgtttaagtctattttttaaataattttgtaccaagataaaatacctctattaatagtgtctttaaaaatcacttctgtaatccaactacaacagaagaaaggaagttttttaaaagtgctatctttttcacttgctgaaagaaatcagtaaagataacaaatcaattaataaggacttgggtggtgaagcttctgtaggtaatccttgcttacacttaaaagtggaggcagtagaataattataataataaaagagcaaatatttattgagtgctggcaattaatctgcagaatggcacaatgatttcagtaccgctttcattcctattttacagctgaggaaattcaggaagagaaagttaagtaacctgaccaagatcagagagtgaagaagcctgggcacttacagggaatctaagaactgccagggatggaatcacatcctccgcgcttagctttgaaagactgttaacattgcagcatgatgccatgtccaacaagcagaacagcggggaaaattaagagtagcttgtaagggtacctcagagtagtctcacagagtgccaccaactgtcccagggagcacagaaagcaatctaggacccactgaaaccatcccagagatgaggtgcagaagtcacatgtggaggcctgaggttgggacaagaaggccacagagagcagaaacctcacaaagggcattgtgtgggcacagtcagcactgagccccagcacaaggctcaaaccatgcagaaggcaccagccacacctcaagggacaacaaaggatgcccagaagaggcaggattcagaacagagaccccttttgctacaaccacaaagtgctcctaggctcagatgccttgtgggagacaaggagatcctgaagagaagaaccctgagagaccagaggcagctctgaagggagatggagctttgaattgactaaatattttcaagattttttaaattaaaagtgatacacgggatagcaatttcaagggttttcttccacccatttgtaggtgacatgagaattttaaaataacatgaggtcctttacagaaaaagtttcacttgatgatttttttgcccctgagtctgagcacgcacattttgaccttcctctctcacaccagtgaacgggcagttgcaacacaatgtgttagggtgcccttggggaattgccaagtcttctgagaagatctaagctgatagtgggagggtaggcatcgacctgggaagggtgctgggagaggggagggttccgtgagcctatctccaagcctctcagctgattgaaagataaagatggaacatgatgtgtctgtagaacttcaaggatactgttagagctggaattttcagtaaaagggggaaaacagaaatgagggtagaagtcagcgggaggtgggccatgatggaatgtgtgctcagttctaattaagtgaattcaacataatcccccataaaaatacaataggattgttctggaactagaaaagctggttctaaaattaataatgaaaactataaagcataaaaaccagaacatttctaaaaagcaagagtaataagggataatttattataacatattacaaatttctatcattgttctctaatataataaaaaatagtatggaactggtatatatagtaatttagtatatgatgaaagtagcatttcaaatcaatgagaggattaataattcagtttatggtgtttgagcatctagaaaaaataataaagttggatccataccacacaactgatgccaaaataaatgtcacagttttcgatgagtaaaagtttaaatgtcaaaaatgaaacctttaaaattctagaagaagtcataaaattaaaaaaatactaataatctcagactaaggaggatctttctcagtctgatgcacaactcagaagccaggactttttgataaacttgataacataaaactatttctcatagagaaaaatgtcacaaaaaaagttaagacaatgacaaatgaaacaaaaatgaacaaacaaaacttccttccacaaggagctaatttctttaatttataaagagaaagaacaacagtataatgacccaaataagaaatagctcacaaaaaaagcaagtgtgaatggtcttagacatataatattttcaactgcatttgtcataagagaaatgcaatttagaattaccatgacacagccgggcacagtggctcacgtctgtaatcccaacacttcaggaggctgaggtggctagatcaccagaggtcaggagtttgagaccagcctggccaacatggcaaaaccccgtctctactaaaataaaaatagaaaaattagccaggcatggtggcacgtgcctgtagtcccagctactcaagaggctaaggcaggacaatcgcttgaacccaggaggcggaggttgcagtgagacgagatcataccactgcactccagcctgggtgacagagtgagactctgcctcaaaaaaaaaaattaccacgacacacgggttcttacttgtcaggtggacaacagttcagtgagggagctccctggcttttgcagggcagagatacacagatccttcttggcagagccaggacctgggcagctgatggctcttgaaggcaa

SEQ ID NO: 1883275 - DNA, 4001 bp, Homo sapiens
agctcatgaaagcacttattgtaaatgagataatttaatcaattacgtttcctaatgtactaaaccgaatgtttcattttctgcttctgcacatcttaaattatcttcaggtgctttatgagatttaatcatagttaatagaaacttcattaccatcaaatgtgctttcaataaatgttgtgtaacaatgtcaggaggtgcggtaaaatatagtaggttctgaatggcaaacacgcacccctagagtcaaactgaaaaatggttgccttgagacaataagactccttggaggcttggagaatacctttttctgaaaggctgtgagcttctgagtagcagctggtttggtaagttcacctgaaggggtgaaaaggatttagcttttccctggaaaatgactcaatactatacagtctctcttcatctcctttccatgcagttttgtacctaacagagatgagtgttcagcacaaactcagttaatagttctagagccagctacctccaggatatcttcagttgaatatgtcctaataacctgaatctcaacttcctcaaagttgaaattatccttctctgtccctgtccttaatcaaatccttttcccatcttctctatttcagggaacagtataccatcaactcagtgtgtagggcagaaacttggagagcctcctagagccctcttatttccttcatctcccttttcctgctcaatacccaacaattcatcacaatctgactattctgccacctactagatctcaaaagttcatcagctgatctccatctccactctgctcaaacccatcccttctttccttcagcaacttactgagtgctgaccttatgctaggaggtgttctgggtggtggagaatcaacactgagcaaaacacatacagcttctccttctatcaagcttacgtgttagtgaggaaggacaggaaaaaaccagaaaatgcatagtgctgaatggtattaagtgttatgaagagaagcagagcagggtggggggctctgacagggttagagtgagtgatgctttttgatgtaaagtgttcaggggtttctataataaagttatgtagctggacgtggtggctgagtcctgtaatcccagcatttggggaggcctagacaggtaggtcacttgaggtgaggagttcgagaccagcctggtcaacatggtgaaacctcacctctactaaaaatacaaatattagccagccttgatggtgtgcacctgtaatcccagctactcgggaggctgaggcaagagaatcacttgaagccgggaggtggaggttgcagtgagccgagattgcaccactgcactccagcctgggcaacagagcaagactgtctcaaaaataaaacaaaataaaataaaataagttatgtttaagaatagaactgaggggagaaaaacaaggaaacaaacattctgggtagcttggggatgagcagtcaaggcaaagggaacagcaggacacaaatgctatgaggtgggagtttggttggagtctctgagggccaaaaggagaccaggatgtctgcaacagaatgagaagtggagaatagtaatagctaaggtcagagaagcaaggtgagggaagaaaactttgttttgttatagtttgagtttgttataggtcactgtaaggactttgactttcactctgaggaagctgggaaaccattcagggcttttatttagagtgacatgacctaatatattcaaggaaaagctcttaactgctatgttgagtgtaaacctatagggaaccagggcagaagcaaggagatctatcacaatgacctattataacaataatctgttataatacctaggctcttaatctagctctaagatgattgtggcttgagccagctatgtagcaagaggaattgtaaaaatgggtcatattctggatgtcttttgatgtcagagtcaaaaggattttctgatgttttgggtgtagagtacaagagaaagaaaaatgttatggatgattccaaaattttggctatgcaactggaagaatggagttggccattactggtatggggaaaacttggcatagcaaaactggagggagaatcaggagttcagtgttataaatgctaagtttgagttacctattaaacatttaaatggagaggttcagtagacagccgacgttggccagacagtcgagaagtcagagaagtgcaggctggtaccataaatttggggcttgtcagtgtcccgatgatatttaaagcccttaggttggatgagatcactagataatggcgtgaatagagaagagaaaagacctgaggatggaccctgacggacattaacatttagatgtagaggaggtcagaagtcactacagagaagaaagaaaagtaacagctcaaggagtaagagaaaaaccaaatgaaaggaaaatggtgtcccagaagaaaagtctaaaaattcaggccatcttcattcccacaccaggatttctagagttgcctctttgtagccagtcttgccctgcatcagtttatctgatctatctaaaacaaatcctgatcacattacattcctgtttaagcctcttcagtagctcagcattattcttttttttttttttttttttttgagacggagtctcgctctgtcgcccaggctggagtgcagtggcctgatctcggctcactgcaagctctgcctcccgggttcacgccattctcctgcctcagcctcccgagtagctgggattacaggcgtgagccaccgcgcccggccagcattattcttaaaaggaagtctagagcacttaacatgtatatgatctggtcccggctttctgtttttgttttgttttgttttgttttgttttgagaccaagtcttgccctgtcacctgggctgaagtgcagtggtgcgatcttggctcactgcaacctctgcctcccgggttcaagcgattctcctgcctcagcctcccaagtagctgagattacaggtgtctgccaccatgcctggctaatttttgtatttttaataaagacggggtttcaccacgttgcccaggcccgtcttgaactcctgacctcaggtgatccgcctgccttaacctcccaaagtgctgggattacagacatgagccaccgcgctggccccagctttcttttctttattaccgttaagtattttccttcctaccctctcaccattgctgtattcctcagcaaaacaaagcccctcagtttgaatgcctggtgctcatgttggcctatagtttcccttatgtgttctgttacttctgactaagtctctttccctcatcctaacacttaacctgcttaacttattcttccttcagttttcaacttagatttcatgtctgcaaggccttcaacctaccaccctaagtgtgagttagttgctcttgtaagttgcctccgtatcaaactatcccgtttttgttctatattttcattgcctttattctggtctggattccctatctgatagacatagtccctgccatctgacatacagtatagagttttattcatcatcacacctgttcaatttaccagagtctagcatgtagatattcaattaatatttgttgtgctgtggttttcattcttcctgctaacttctcactggaccttttggtgttaaagaaaaagaaaattggccatgcctgtaatcctagcactttgggaggccaaggtgggtggatcacaaggtcaggagttcgagaccagcctggtcaatatggtgaaaccccatctctactaaaaatacaaaaattagccaggtgtggtggcaagtgcctgctgtcccagctactcgggaggctgaggcagaagaatcgcttgaacccaggaggcagaggttacattgagtcaacattgcgccactgtactccagcctggacgacagagtgagactccatttcaaaaagaaagaaaatcaagattttgcttcaatatagtcaattttattcatt

SEQ ID NO: 1883276 - DNA, 4001 bp, Homo sapiens
attcttttttttgagacagggtctcactctgtctcccaggctggagtgcagtggtacaatcacagctcactgcagcctcaacctcctgggctcaagcgatcaacccacctcaggctctggagtagctgggacttcaggcatgcgtcactgcacctggcaatttttttttttttaatagcgatcgggtcttgggatgttgtctacactggccttgatctcctggcctcaagcaatccttccacctcaggcctcccaaagcactgggattacaggcgtgaaccatcacacctggctgtgtttcttgtagtagcaaagtggacacatgttgggactaccagacactaggtaattgggtcaggcctggcttttgtgtgcggcttcttgaccatggcatttagagcagcactcctcatacttgaactttactcaggggattttgtcaaaatgcagatttagagtcatggatcgggatggggcctgtgagtctacattcccttttaacaagttttattttttggctgggtgctgtggctcacgcctgtaatcccagaaatttgggaggctgaggtgggcagatcacttgaagccaggagtttgagaccacctggccaacgtggtgaaaccctgtctctatgagaaatacaaaaattagctgggtgcggtggtgcacgcctgtagtcccagctacctgggaggctgaagcacaagaattgcttgaacccaggaagtggaggctgcaatgagcctgggccactgcattctagcctgggtgacaaagcgagactctgtctcaaaaaaaaaaagttgtatttttaaattgacaacctaataattgtacatgtttatggggcccatgtgatattttgatacctgcatacaatgtgtcatgatcaaatcagggtaatctgcatatccatcacctcaaacatttatcatgtctttgtgttgggaacattccaaatcctctcttgtagctatttgaaaatatacaatacattcttgttaatggtcatcaccatacactgctatagaacactaggatttattcctgctagttcctatgtagctgtaactttgtatctgttagccaacctctccctccccaacccctgccctccccacccctctagtgaccacagttctactgagtctgtatttctaaagggcttccaggctgggcacagtggctcacgcctgtaatcccagcgctttgggaggccaaggcaggcggatcacctgaggtcaggagttccagactagcctgggcaacatggtgaaaccctgtctctactaaaatacaaaaaaaattagctgggggtggtggtgcatgtctgtaatcccagctactcgagaggctaggcaggatgatcacttgaacccgacaggcagaggttgcagtgagctgacattgtgccattgcactctagcctgggcgacaagagcaaaactctgtctcaaaacatataataaaataaaataaagggcttccaggtgatggtgacactactggtttgaaatccatgcttagaggaacgagcctttcaaaggggagttcgtgggaatgaatttatcccaaacctcacctgaataatggtcttctcagtgctttccactgaaggtcccatttttcggacccctttgcatggtccctgccttttctggatgcttgggtcccggttgacccctccgaggacttgcagcactcactctctgctctgctcacttggcccctcagcatcccatgtctatgctgctttgagtcccttcgttatcaatacttcccccttgaggtggctggctacctgtgcttcacttgcttctgttcttgtaaggttcagccacgacactgtggggacagccaggatcccatgaacactgattccttgactccatctgcccttgtgcaggcaacagctcctttcctgggccctgtcaccttgctcagttggcccagagagcccctgctgggccagtctctctgtccctgttgcctgggactctgtttttagaacaataaggtgaattctgttcatctcctaagaaagcgttgagttccggaatgggggaaacatacttctctcttggcagaggaggaaccacccagtcaggcgggccaaggccccattgatcagagtccagtgaaaaagtggcttctcaggagccctggatgctggcccacttcgagacaacttcttctttcaacttcctttcatgtattttaacttcacaaacatgccagtttccagctgcccctcagacagcagcagtgatggtggtgggaaggacaccgccgtaggggtcagatggagtggggtggggagggtggtggtgggaggtttcaccctattagggatgtttctgttggggaccaaggttatatcgcagatgactcatgcgataacacagttacatgcattaaaatatagatgcccacaaagggcacaattacagagacctcgcccctttcttttgctctttatatctctctattctctctctctttctccccacccccccgccccccacacacaaatacttaaccaattaagtccgtcgagtgctatttgcagatgatggtgtggaattgtgctggagttgtgtccggcctcattaaatgtcaggattaacaatacagcagttggcaatcaaggctgttctgtggctgttagtcattaatcaccatctgacagtcctgaattggaaacgaggagcctgttcacatgtgctctgtgtacctagttaccctcttggtaatcagtcttggaaaagttttctttgactccctgcctgcaaaggcctctgtcctggcgaggaggcacagggtcactgggctttctcccctctcctcctcctcctccccctcactgggaaaagaagttgaggtcctgtaaaaacaaggggagagagaagcgtattgtttttggcctgctctttccctcttaggcctgttttatgtagccttgtttttatattctggcccgatggccaggaaaattctttttctccctgaagaaatcctaaaagacagcagggagcccggtcctgttccaagagctgctggggtaagtttgtaaagtgcagtccttccccagctgctcaggtgtggacctctctctgcaagaagggccacttgactcgtttcaggtattgctaccagcaactcgggcctgacttcgggcaggtcttctggatctgtctgcagaatcgagaggaaggaccagtttctttttggggtccattctctagaccttgctttattcattcattcatgcattcaagaaatatctattgagagcccattacctgccaggcacagactgggcatggaggctacagcagtaaatgcacaggcaaagcctgtgccctcatggtggttgcctttgcgggggagataagcttctgccacagaaacccatattgtggctgggaagcgctcgagccctggactctcactgtgcattgcctggctgccaggcctttccagggtgccaatcctgaagctgcccttcctgggaaaatgttcttatttcagagcctgcctgacctggctccttctccccttcaatggtctcctgtctcattcccttcagacgctgcctctgtttttctagatactggctattcccaaacatgttggggtgacactgatgtattaacagggctgtcttctccccccatccctttcctgggcatggattatggtgtttttgcaggatttcattccttaactccaaggattgacttgagggcatcatttcagctgccatggggagttggtagagatggaggtcactgaccaccctgtccccagggggtcctctctgcctacctctagggtttgtagccatgcccagagtccttagtgtgagtcttctttccccaagaccttccttcctgttctggacaggggaggctgactggagaagaaagtcttctgcaacagccaggccctgggccctcggtaggtggcgtgccctcttcctctccttcctgatcaccgt

SEQ ID NO: 1883277 - DNA, 4001 bp, Homo sapiens
cctttaaatatgaagactcctgccctagcaaaaatttttaaattattattttgatcatttcttccctgtttattttttgttctctttttctaggactcaggtttttaattaattgactggataaacatgtcaggcctctgagcccaagctaagccatcatataccctgtgacctgcacgtatacatccagatggcctgaagccactgaagaaccacaaaagtgaaaatagccagttcctaccttaactgatgacattccacgattgcgatttgttcctgcccttccctaactgatcaatggaccttgtgacactccttctcctggacaatgagtctcaggagctccccactgagcaccttgtgacccccacccctgcccgcaagagaaaaaccccctttaactgtaattttccactacctacccaaatcctataaagactgcctcacccctatctccctttgctgactcctttttcgaactaagtcggcctacacccacatgattaaaagctttattgctcacccaaagcctgtttggtggtctcttcacactgacgcgcgttaacagaatgaatggatagaaaagtcttctgagtactttttaagaaaaaagcttattggccgggcgcggtggctcacgcctgtaatcccagcactttgggaggacaaggtgggcggatcacgaggtcaggagttcgagaccagcttggccaacacggtgaaaccccgtctctactaaaaatacaaaaattagctgggtgtggtggcgggcgcctgtaatccaagctacttgggaggctgaggcagaagaattgcttgaaccagggaggcagaggttgcaatgagcagagcagagatcgcgccactacactccagcctgggtgacagagcacgactccctctcgaaaagaaaaaaaaaagcttattaagcaataaagcacagagtatcagaccatatgtttagtgctgaacattttattataaatgatcaaaaatgtttaacatactattgtttacaacctcccactactgtaaaatctaacattgctactttcatttcaggtaatgcaaaaatacaagaagcattagctgtctgtaggcagaaatctgttcgagtcattccttattactgaatccctagaattaattaaacatctagtatggagttggtattgtatataacatttgcactcacgtcttacaaaatagtcatctaagtagaaaggtattcaaggcagaaggatggaaaaacgtttgcagtcttttttggttggcatgaaacactgactgcattcctcccagatttataagaaagaaatatttgcagtcttacctggagttagatggatggactctctcaaggttatttttcaatctctgcacatacatacttatggaagtaagaaagaagagggagaaaaggcagatcccccataacagcggttaaacacctgaacttgctccactatgacagggtttatcatccacctctcagtcctcaagtggctggaaatatggaaattggagtccaggtagacaggtgagtgtacaacctcttaagtgtggagccctcggaattcacaacactccccaaatcgcttcctgcgcaggcgcggagtcggaagggagtcggaaagcagaccccggtgccccctaataaagcccccagccggacgctgccgctaccggggtttggcaacttccggaagacctgtggcccaaaggagaatcctgttgggggaggcgggggccggtggtcgctaaccaatccgacacccgccagcaggctgaagagaggggctttcccaaaaggaaaactttcccaaacctgggggatgggaagagaagacaaaaggagctccctttcccacttcccagccgcccgtcccagccctcggcctccgctgcgcgacccgggcggaggatcccggccgcaggccgaggcgagagccaggcgggagggccgcgagcgggctgcccctctccccgccttgccgtccgccgctgacgtaacctgcgaagtttggggagggaggagctcgggcggccggagctggtcgctgcgcgcgccggggggagggccggggctgcgagagaggaagctctttcgcggcgctacggcgttggcaccagtctctagaaaagaagtcagctctggttcggagaagcagcggctggcgtgggccatccggggaatgggcgccctcgtgacctagtgttgcggggcaaaaagggtcttgccggcctcgctcgtgcaggggcgtatctgggcgcctgagcgcggcgtgggagccttgggagccgccgcagcagggggcacacccggaaccggcctgagcgcccgggaccatgaacggggaggccatctgcagcgccctgcccaccattccctaccacaaactcgccgacctgcgctacctgagccgcggcgcctctggcactgtgtcgtccgcccgccacgcagactggcgcgtccaggtggccgtgaagcacctgcacatccacactccgctgctcgacaggtaggcagtcactggggttccctggaagagccctcaactcctgcatcccctcaagccccctgacaagcgggctctagagcccaaatggcagtgaccgcttggggccggcctcacctcgtcacctctagggagcccttcaagcttgggagatagggagcacccacccttcaagctctggcaccgtagggagcacaggcttctctggagatgcagcagttgcattcctccacacatctctccattaccctttctctccttccctcttactcctaggcgttctggctccgtactccaaaaatcagcaatcactgcctaactctaaacgctgggtttactgaaattgatgtgtgtttatatatagtgggtgtgggttttgtttgctttgttttttccttatttttgaaattgggctgtagggctgcactgtccagtaggtagctcttagccacaggtggctattgagcacttgaaatgtgcccgtccgaattgaagtgtgacctaagtgtaaaataccagagttcgaatgcttagtatttattaaaaaaagaacttataatattttattatttgtttattgattatatgctgaaataacatttttgatatcttgggttaaatataagattaaaattcattttatgtgtttctttttactttatgtggccacgagaaaattttaaattgtatgtggtggtgttcacattatatgtttattggaccgcactgctttagaatcaaggatgttttgcttcttattgtttttattttggttttggtttattatgtgttgtcaggaacgttttatatcaaactcaatactagcagttcagtttctcccagtctcagtttctctcacagggaagattaagtagaggaaatgtgtgctatttttgccacaataaattgaaccaaaagactgttaaatggccagaaattgtaaatggctttcacttattggtttgtacaggttttaagggaaggttagcattagtttctgttttcagaagaacattacaaccgcgtgccatagacctgtgactgtgtattagtcaatgggtcactagtcttgtgtattttacttcctacagggatttaactaggcccagcattcagttcttagtgagttaacatccatgattacaacattctcttctcctcctcctatatctaatgtgaaaatacgtcatccccgatgcctgattggccagaagctgtgagtatccagcatcagataaattcctcagcttccgccctgccaaagttactggattttcacctgcctgtggcttttcttcattgtctctcactgtcaggcttcgatggcctaaatggcacaggagatttgggacacttctagagcttgtttccacttcttgtctatcataatccagattcagtgatatacaaggtgtggtgtctgtttactccaggccttatattctgtggagcaagtgctggacaagtgtgtatatgtgtctg

SEQ ID NO: 1883278 - DNA, 4001 bp, Homo sapiens
actcatgttcctgttgcttctggccttgaggctgagcttgccatttagctgggagtaatcaagaaataccaggccagaagcggtggctcacacctgtaatcccagcacttagggaggccaaggcgggaggattgctttgaggccaggagttcaagccaagtctgagcaacatagtgagacccccatgtcaacaaaataaaatttaaaaattagctggtcatggtggcacgtgcctgtaatctcagctagtggggaggctgaggcgggaggaccccttgaacccaggaggtcaagactgcagtgagccgtgatcctgccactatactccaaagtgggcgatagagaaaggccctgtcaagaaagaaaaaagaaagaaaaggaaagaaaaggaaaggaaaggaagaaaggaaaggaaaggaagaaagaaaggaaagaaaaaaaagaaagctagcagctgggaagggaaggggaggggaagcgaggggaggggaggggaggggaggggaggggaggaaaaggaaaggaaagaaggaaagaaggaaggaaggaggagagataggaaggaaggaaaagaaggaaaagaaagaaaccaagtagccgggaagggaagggaaggggaggggagtggaggggaggggaggagaggggagggggaaggaaggaaggaaaagagagagagagagaaagaaaaagagaaaggagagggaagaggggagaggggagaaaccgagcagccagcgtgcctagcacagccctggacaccattgacccctatgtttgggttgagatctgtccctgagttaacttcaaccccagggctgtcaggcactgctgctatcaatacctcatttgtccctcacaacaactctggggtggcctcctttctatgactttctatgagcccgcctgtccccctgctattacaatgaagcagatgaaactgctgatctttgttactgatgttttggctgttttcaatttccaaaaaatgacaattaaatgcaattcaacctaatattgcctaaattttaaaagaggaaataggttctcacagtgtttaagtaaccagcccccgtgcctcagaggtagtcaacagcagtatctggattcaaaatccagtttgcctccttctgaacttcttaacatgctacttttagccacggattaagaacccgggaaccagttgctagggtttgagtatcagctcatctacgtagcagccatgtaccttggaaataataataatgcagaccaggtgcagtggctcacagcctgtaatctcaacactttgggaagcccaggcgggtggatcccttgagcccaggagttggagaccagcctgggcaacacagtgagtgagaccccgccaccaggtatggcggccgcgcacctgtagtcaggagaatcacttgagcccaggagttggaggttgcactgagctgtgatcacaccactgcactccagcctgggtgacagagcgagataataataataatgatgatgatgatgcagtattttccaatttacagggttgccctgaggattgaataaggaaatctaagtacagagatttagaacagagccctgcactgtgtaagcactctatagatgtgagctattattatcatcttcaggttcctttggtagtttttttctgcttgaataaaatatagcaacacacacacacacctcctttgtccactaatgtaatcccataaaacggagaaactcagcagtgaggacattctgattccaagcaggaaggagatgaacgatgaacctcaggctgagcgcctcacggtttcctcatgtcaccggggctgggggtgcagtttggcttcacactgctaggtcttttcttgtttttaagggggcaggggctgtcacctctgaggagtcagctgtgattgatccttctccacacccagccaagcaccccccagacaggggagcgcccgcagtagggcggtaggcaagggcagttctagccaacagtccctaaatcatcccagcgggggcgcgggaaattccaccgaggtgaaagcctagggggccgggtgaagaaatccccatacccgggcccagaaaccgctccaggtggaagtaacttgtctaaagagaacagggtgtaacgggggtcatttcagggctgttcttttaaatcggtgagcacggtctgtctactttccctcagttgtctagagaccacacgccacccccgccccgggggagtcgcccggtcgagggtcccgggacaggcgcagcactcgcagcatccggacctggtctgcctcgcgccgggagcggcctctttaagagcggccgcggccaacgtgctccgtgacgtcagagcaggaagtgtttgaggaagtcgcgccgcgctgcccgcgttaagattcccgcattttaatgttttcaggggggtgtcatagccccgggtttggccgccccagccccgccttccccgccccggggagcccgccccctgccccgcgtccctgccgacaggtgagtccccctcgtgggtgcggcccgggtgccacctgcaggccccgccgccccgctgcctgcaaggcccggaagacccctctgtgccgctgggaagtcgcagcttgcggactggggagcgtttcacttgtgcgggttggagttcgggaagccgggagaaacagctctccctggggtggcttcttgggggtgggtggctttgaggggaacctgcgatttatgggaacattgtaaagaaacacgtgacctcggcgatgctcagaagtaggttctgcccctgccacctcgggcagaaggcgggcaggcccgggcgcccctggtggagtcagctggggatcccctcgctagggcaagggcgtgggcatcgcctccctcggtgactttcttccttgcctgatgccacagcaaccggatgggggagggtgagagggacaaaagtttgccacaaagtttggaccaaccaaacacattggtttctttacaaaataaaaaaccagttgtatttttcttctctcccattcaagagcagtggtatctcttgccttctccatccctttgagctccatttttttcttaatcctaaccttttttccccatcccaaattgcttatagagttagcacgacatcagtatgagctggtcaccttccctgacaacgcagacatgtggggcctgggaaatgaaagagcgccttgggacagggggatttggaaatgtcatccgatggcacaatcaggtaggccctctgtgcagcttggggaggggcggggagccaggccccctcctcactgcctccactttctctgatcctgctgggccaagggctcacctttggctttggtcatcttgggacagtgaatagggggactgggaagagggcttcaggacttctgagctgactccaggttagtggtctccatgctttattgactatgtcacctaaataaatagtaaaataaagttaagctcttagtctctattatatatatatggtaacagtagaatatcatgtactaatatatactgatattatatgttataaaacatatagaaataggaaaatttaaaggatgagactaaataaataatttaaaatattttaattccttgaggccagtagttcaagagcagcctgggcaacatagcaagacctcgtctctacaaaaaaggtttaaaaattaggcagccagctgggcgtggtggcttatacctgtaatctcagcactttgggaggctgaggcaggcggatcacgcagtcaggagatggagaccatcctggctaacactgtgaaaccccatctctactaaaaatacaaagaattagccaggcttggtggcacgtgcctgtagtccccagctacttgggaggctgaggcaggagaatcgcttgaacccatgaggcggaggttgcagtgagccaagattgcgctactgcactccagcctgggtaacagagtgagactccgtctcaaaaaaaaaaaaaaaaaaaaaac

SEQ ID NO: 1883279 - DNA, 4001 bp, Homo sapiens
gccccaatgtgatgctggtgaatagggcaggtggaggacaacgtgaggcccttagactaggagacacaaactctggattccgggcctggtcccacgttgccttcagtctgtttttactgggcacctaagccccgggggtgcggaaggaaagtcagtctctgctctcccgggaacgtacagtttatctagaaagacgaagtgcactagcccctgtgcactgtggcaggagtttaaaaagcagtgaactcaagatattaaggaaacacaaaggaaactttccttggcttttacccttgaacctcgctgaacttcttagattccgttcattaaaattagaataataattccttgttaatatactttgtggcgttgcaggatcccaagggccaaagctcccagaaaaatataaagaacaactcaaggtagggatttttgattggtgaggtaatgatgctaatctgtacattgaaaagactgtttcatttcagctgtgctataggaaagcaaacagttgcaactcgccagtaccttatcaaggagagaaaaaaaaaaaggccgcgcatggtggctcatgcctgtaatcccagcagtttgggaggccgaggcaggaggattgcttgaagccagagtttgagaccagaaataccaagaccctgtctttactaaaaataaaattgtcaagtgtcgtggcgtgcgcctgtggtcccagctactcagcagggtgaggtgggaggatcgcttaagcccaggagttcgaggctgtagtgagctatgatcgtgccactgcactccagcctgggcaaaagagcgagaccttgtctctaaaaaaaccaaaacgaaccaggttcggcctaatgcagaaggaaatccggagcaatccccaaagtcaacgccttggaaaggttcgccctgggtctcagtactccggggcatgcgcgtcctgccgctcgctctcggggagctcccaccaacaccgccctcatccccagccccaggacggatacccaagaccgaggtccaggaccgcaccgaccaagtcgcgggcgatccctggcggccagctacggccattgaccgctgggagcgcgaggggcggggcgcagagcgagcgcggggcgggggtgtggtcttctcgcgtgaattgatggcgtcatcgaagcgacggcccggaaggaagtcgcgtgctgaggggtgtgacggttttcttgctcgtgggctcggacgagtacggagcgcctgcagggacagcctggtacgcggcccccgccccttcgtgcgcgcgctgggcctagctgccgctcagggtcggggctgacccgtcactttcgggaacctcagtcccagcagcttctctccctcagccggcccgctcctggagagagacagaaacccttttctgtcgcgtcctctccttgcgagccgcagggggaccgagcggaggctattggagccgcagccccagaccagggcgcttgaccctctctcggaacggggcggggaaggggcgcgagtgacctcggggagggaagggcactggcaggaaaggacgcaactgcagatcggtagccggaggccgccacggtaaaataagcgcctcgcagatgtccgcgccccggttacgttagacctgggaggcagaatccacgccctgcgctcacgggcccacgcacgcacagctgaactttgcagtcagtcaccatagttccagatcattcagcgttcaggatcccactcctccgcgtcctggtgcctgaacgcggttggacctaggagcctagaggctcgcagtttgggacattgcctttctctctgaccacgggcttggggatctgtcaggtgcaaagtgccaaagtatatgggggggagtgtggcttcaggcttgttcagagccctgtcctgtttagggccaaaggaataactgggaaggtggatgcgaggccaacgaatcctaccttgaaactctgctcgcctgctggctctgccactccagcatctgaaaggagtaaataatggtttcctttgaaactgcaggcaattaggagtgggagactctgaccagaattacatagccacaactgcctgtcatttggcatcctctgtaatttgggccaaagtactgcagctgcctctcttccctactactggtaggaaaggttcagtgacagcacattcgtgttcacaggaagacaaggctgtgttctgaaccctacccagctggcacgggttctcccttgagcaacggctgtatccggagccagtgcttcctcagtgcggtgggggctctaattttacagttaaagaaaggggaacgttgactgagaacgaggaggaagcgagttgtagatctagccttgtgttcacacgacaccaggctggatatgagtcactcgcagggagctcagcttggtgaggtcctctcgctgttgtggccttttctcctgcacgttggaccacacacattttcccgtgtcttttccctaggataaaggctcactgatggctcagttgggagcagttgtggctgtggcttccagtttcttttgtgcatctctcttctcagctgtgcacaagatagaagagggacatattggggtatattacaggtaaggcagagacagggagaagccggcaacttcctgttaaatagctccctttcctggtcattgctttcctagcagattctgctgaacatctctatttatatttccttgaataggggagccttttcagatggagctttttatgtcagtaaccacgggaaagagaatacacacacacacatatatatgtaaatttagaacttcacttagtagtccaagatgatgccatgggtggtgattaataaatgtgtatatagatttagagacaaaatctaaaggaaactggtgctcctcattgatcatccctaaaatactgttttctcctacattcctctggcagtcttagctctacatccctctggcagtcttagctctacatccctctggcagtcttagctctacactgctaggttacctttacaaaagccagctgagtaccagttcttgatggcaacttgagaaggtagcctactctgctaatttgggatgctcttttaaaattaacatttcagccagcctgggtcacatagtgagaccctatctctaaaaaaataaaataaaaaataaaattttaattggccggctgtggtgtcacacacacgtagtcctagctactcaggaggcttagatgggaggatcacctgagcccaggagattgagaccagcctgagcaacatagtgagagcccatctctacaaaaagtaaaaaattagccgagcatggcagcacgtgcctgtaatcccagttatttggggggctgaggtgggaggatcacttgagcccagaagtttgaggctgcagtgagctatgatcacaccactgcactccagcctgggtgacagagcaagaccctgtctctaaaaataaaataatattaacatttcaagaaaaatgaaagagcctgcaggttgacttacgtcaatcaaagcaagccttaggatagtggttcctacaataaaggaacccattatgtcactgtttattttattggttttttttttaattctttgcctaatataaagcaaagaagcacttataagtcttgggttgctttctttttagtaacctccatgaccaagtgttttgctttatgtctttatgaactcttcttatatgtgctgttgtgatgcttgtttctggattgctaacagcaagttctaaaactctgattggaattcctctctcctttaattctttctccccatcatctgcttacatgttccccaaaaaggcttttaacttcatcatttacatataacttgattagaaaggtaactctattgccaaaacatatatttcaattatttataaagtacttcaaattattcttttggttggtcatgtcattggactccagcattagtgcaggtagttgataaccatattactggacttaactgc

SEQ ID NO: 1883280 - DNA, 4001 bp, Homo sapiens
gcctcctgggttcaagcaagtctcctgcctcagcctcccgaatagctgggattacaggtgcgcaccaccacgcccggctaatttttgtatttttagtagagacggagagacggggtttcaccatgttggtcaggctggtctcgaatgcctgacctcgtgattcccccgcctcagcctcccaaagtgctgggattacaggggtgagccaccgcgcccggtggtttcttctcttatggaatttaatgtcgttgacgattagacgtggccatgcattactcaatcttgaattgggatccccaaaaaagctgggcgagtaacaagggctcaatgaatggataagtgattgagttaataaatacgtgatcagttccaaatgggtaacatttagttatatttggtggagataagtagtccagtgttttggagctaagtggttattcttttttttttttttttttttgagtttgggtctcgctctgtcacacaggctggagtatagtgccacaatctcagttcactgcaacatctgcctcctgggttcatgcaattctcctgtctcagcctcccgagtagctgggattacaggtgcgtgccatcacccccggctaaattttgtatttttagtagagacggggtttcaccatgttggccaggctggtctcaaactcctggccttaagtgatctgtccgcctctgcctcccaaagtgctgggattacaggcgtgagctacccgcgccccgctccccccaccatttttttttaattttcaaaatttttgtagaagtgggggtctcgttacgttgccccggctagtctcaaactcctggcctcaagcgatcctcctgctttggcctcccaaaacgctgggattactggcgtgaactaccatactctgccctttattcttacagagattttgaggtctaagaatgtggactttaaagatttcattatcagattatgcatttagcacggaatgacaatctgacagccgtgtacagcgtaaaccggcggagagggcttggcactaaaggcaaactgtcttttaagaacaggaaaaagaaaggtaatatatattttaaggaggtcccattttaggggagataataagcttgggttaggcgtccgaagtcagaagatatagtaagaaacacacacgcaaactccagcagccaccagctagacttgagtagagagagcaggtccaagtggaggtggaagttggaaagttgcatctgccaggcagggcgaaagtggcctacacccactcctggagcaccctgcttgacgagcaaggtagacgaggctgagggatactgctggtgatgacggtggtcgtggtgatggtgctggtagctaacagatcttgagcgtaccaggccctgagctgagtcctctaacgggcagaatgtcgctgcatacggacagcagcctcaagaggacaaggtgatttagtgactctagcctcttcccgcggtgccagcctgatttcaccctctccggaacacacaagcgaacctccggggagggagccagtatcgggtcctaacgcagggaagcgctccgctttctgagagggacgcgccagcggagggacagccagggcccggcctctcctgctcctgccccgccccgcccccggcagtgccccctagtccgccagagggcgactccgcgggtcgcccaacccgcgaccggtccacgcggcacccgcctctccctaggcccccgccctgccggcccgcgcgcgcccgacgggagcgtgcggggcggtgggcgcagggtcacgttgggcggcgcagacaaaggcgggcgcgcgcacgtcctgacgcagcttgggcccgcggcggcggcaagggcgggagggagcggtcgccgcgggatttggagctgcctagcctcgcggtcggtgagtaggagggagctggccccttacctcaaagtctccgacctccggggagccgagagcgggacgtgggagccgggcttgggcggccgcgcggggcctgcggtctgggacgccccggcgacgctgcgccggcgtcaggaggcaccatcgccgcgccccggggatccccggcgggtggagcgggtgccccccgtccgggatggaacggtccgcgcccgccccgaaccccggccgcccgcctctccgctcgcctgctctccgagcccggctcctcggagcccctcgcctcccccaagtcccaggtgtgcgcagccctcccgccccgggagtccggggatgtgggtggcgagggctgctgggcgttggagcaccaggaagcgccttcccctgtcattccccttcctgtgttctctggctgccgtaagatgcatgtctttaccctctccttctccaaatgcatgctcccatttttctttaggatttcttaactcctgaaatcccttgcctttccttttttatttcagcaccctctgaggcatccttctcccagtggggcttgtttatttcctcgctttccatgtcacagagggctgaagtttagctgttcagaagttgcagaaaatagcttataggagacatacggtgtagcacgatggaaataagttccatcctctgccaagtattaccatggatcttctcatggataaccttgaggtcatttgaggaattttgtttttggttcattttccttaattttggctgaactttgaggagctctccttagtttcatgtcttgtagattctatctcaatccaagggaaatggtgtgaagagcagttataccataccaaagtctccagacaaaatcctgtaataatgccaatcaaatatacttctctctttgaaagagatgtgcttttcttttcttttttaactttgtattttggagaatttcagacacagggaaatagatggaatagggaaccagcatgtacttgttctggcctcctcagccacttaactgtggctattcctgtgccatacacaccccacccatttcccctcccgtatgtctcagggagaacttgatgcaagatgagtctgtcaaaagtagcttcagttccataatgaaaaccaccataccaagtcataaggtgctttttgttttggaacacagcctactcatgaggtcttcagctaagaaacacagtagagttgaagaaagagcacagcaaaaggtatcttaacatgatagaacaggttaaaagaaaaagtatggccgggcgtggtgactcacgccggtaatcccagcactttgggaggccgaggcgggcggatcacctaaagtcaggagttcaagaccagcctggccaacatggtgaaaccctgcatatactaaaaatacaaaaattagccggacgtggtggcaagtacttgtattcccagctactcgggaggctgaggccggagaatcgcttgaacccaggaggcagaggttgcagtgagccaagattgcgccgctgcactccagcctgggcgacagagcgagactcgtgtcaaaaaaaaaaagaaaagaaaaaaagtgtttcagatctggatgagaacattcggaacgtcctgttcaatgttttcatttttttctgagcccttggaggtccagagaagttcagtgacttgtccagagctgcaggtcttaagaggctgaaatctcgcctctgcctcgaggctgcggttccactgacccatactacttgccttcaggaaagagaaatggtgtaggaaggctgtggatgaagacgcttacattcatgaaggatttggataggcgaacatgagcttttccaccaaatttcagaattttaagaaatgccttaaattatttcttaaaaatcaatttggggcagacgagaagttctgataatagtttttagggaacatgataaaattctgaccttagaagtggtataccagtttgagaagaagaacaagctataaacggtgtagataacattcacggctatttaagaaagagttactaagggaaaccagaatgacttaagagtgttactcttctttttctgagagaacaat

SEQ ID NO: 1883281 - DNA, 4001 bp, Homo sapiens
tatgcttagagagggaaaatgagcactaagctagaggccttgctgcctcaattagaaagggaatattttaaataatttggacgaatggatcaaaatttttctgaattgatgttggaccattcactttaatctcataaatattcatgtcacatctgtgagtacaaaatcccaagtggaacagaaattgatgtaagaaaaggggcaggcacaggaagtgtggtcaaaaataaagataagatcatcaccctaaagaaggtaaggatataacaagggttgataagctgctatctaaagtacaaggacgaatgacagctatgataaaaggtaaaaatacagtgcttgagtaataaaatccagtggagaattaggaaatgcactgtgacctgattctatttctattcataaattcctttttttcttgtaagtagtatattttgcctatgcaggagaaaggtaggcatttttatttcaactagatacattcagcttcaccacattttttcttttctcaagtatcatttagccatgaaaaaagaactttctgtcttaccagctaagtcaaaaggagtttacaaattgcctacccttctgaagaccttgcataccaattcttagcgatgagctcacagagttgtgtggtccgaaaacagtttcatatacttcccaatgctgaagtgaagacttgactttcaggttcctgacatgagtctacaaatatatatgttgaaaacatatttttttccactgagggacataatccagaaattcaccttaaaaaaactgttaatgtcctattgaaattttctgtaattttaaattttaataatgcaattccagtgcttattactcaaaaatagaggagcatatggatgctgccaaaaagcaaaaataaaaaacagtcaccacctggtccacaagttggtttacctttatgtcactcaatgccttacacctcatagaaatctaataaatttgattagttagtcaggtgtatagctaaacatccaaatacgttaaaatttcaggcaatgaaatttttagctttcttataacattttcttggctccacagctaagggccccattccaacccacctcaagatgtaaagccaaggatagacagtttatcacccctctcaaaacttcccctaaggtgaggttgtgatggttaacaagtaaaattctgtaatacactgaaaccatccttaagcactatataagtatgaccttttattatagccctgttccaatctgcaactccatagctttcttttcccctagttgtatatttcctcaaaaatggacgttgctctagttaggctactaatgaaagatttgtttacatttgcaggccttgcaaaattctaaagaacaaagtccaaccatccaagcaatattttaaagaatgagatctgtgttaacacttaaagacattttccacgttgacctcatgaaccccaaaagaaggatgaaagaagtctggaattaatgaatttagggaacctgtaaaactccaaaaatgtttaatgcaaaaatgtgatatttttggtaggaaatttccattgctttcaacagatttgggaagggacccaaaagatgactaaaagcatctgcattttaaccaaaatatcattgatcttacaattcaaatggagcttaatttgggtattttctaatttttttttcctgaaacttacccctagtctttatgtggttgccaatactttatgttgtatggaaattattatatttatacatcttaaattttaacttttagttaaaacatacaaactattatcaaaccctatcctaaatttcaattttatttatactattttggacttaatacttactaccatttagaatttttgtgattcccctctatacttcaaatttttctttctttctttctttctttttttgagacatagtctcactctgtcacccaggctggagtgcagtggcatgatctcagctcactgcaacctccacctccagagttcaagcaattctctgcctcagtctcatgaatagctgggattacaggcacccgccaccatgcccagctaatttttgcattatgacgtaacacatcaaatgcatgacctgctgacacagtggaaatgcaaaggtgattttcttccctttgccttcccttttatgctctctatcccataagaaatattattatgttgaaaatagcactaagtcaaaatcaatgtaatcacctctggttttattcactatattcagaagcataatttccacggaggaagaataactggtaaaagtaaataaatagtcagcttttgatgtttctcttaaatgcagtaatttgttctataatgaattcgtgttcataaaaaaatttaaaccctacatagagatacagttagaaattgttagtgtcatattactgaaaatgaccatattctcagacaattattttatttgtgtgccctaagtgaaaatttttacacttttatttgaaaagctttttacataaattcatttctttctcactgatgctctttttttagaaatacatttttttacaaaaacactttcaaaaatatttctaacattgcagtgttggataatacacatggaaaagaatgctagtgatgcaaaggcttcatttgttgttttaaattcaactcttacctcctcagaaacaaacttttaaagttgtctcatggcttatatctaaaaagaaaaactcattatttaaaaattagaaactatcaacagcagtctcttcaataagacaaggaataaaaactggtttctaatgactgcaatgatacagattttgagttagcccaaaggtaaagttcggatctctggtttcggattacacagacattagatttattgatgttatgaaatagttgcctgtgtcatttacatttggggacctagtaatagcattttattgctacctaagacaagacctgcacgtgcatgtttttccaatctcacaatgaatgaggatctgagttaaagcacctggggagcaaacgaaaggataataaagcatcttatgggggtcctcaagggactaataactccaggtggtcttagaaatcatggagaatatcccatcaggagctcttgggaggaagccagggatatgcagctggtacagcgttcaagtcctcttcacaagctgcctcaatacacacccttgtcactcctcggggcagccctgcagtgagcaataattacatcacattctatagattatctctctccaagtaatttctcaaatgttcccgttaagttatattttgaaagtcactgacaaccagctagggaaagacaatgagaagtgcaactggtaagcacagggactaaaattaatcagaggccattgagaacccctcacccatcccgccccatccttctctttcctttctctggccttcagggacaaaaggctttggaggcttttagaaactggagaatgcaaaagaaccaagcaggagttctcctcaactcctatgttcacacactgaattctggttttgccccttaacaactgtgtgtccattagattgtgtttctttaggtctcagtttaacgtccaaggaaacaaggaaaagacccactttacagactcatagctgttgatatgactcaatgaaataaagcacagaaggtgcctgggccaaatgcctgcacatggtatgcaaccgagaaattatcgtgtgaatagttagaagtaattgagtagcttatccctgccaggcactgtgtcaactttttcaaccatcgtacagggagcatcgaggggcttgtagttgtgtccaaaattcagccttcagaatccaaaacattaaaatgcctgccagttccgccttacacttactctttgactagacaattgttgagcactttttatctgtcaagctgcacatttgagactggagatacaaaaacttaacaaaattaccttcatatttcacaattgaatgagagacatatgtatactaactttaa

SEQ ID NO: 1883282 - DNA, 4001 bp, Homo sapiens
ttaaggaaatgttattgcaatgctatttacttagtttcttagcaaaagaaaaagagagagagagagaagcagaagaggaggaggaggaagaagaaaaagaaagaaagtatttagagtctttaagtgtgctgaaatggtgtgctgtgcaatgatatatgtacacattcaatgtattacatattattttaaagcttttatctatttatttgataaaacttaatcagagatattctgtgaaagacaagtcccatttagtaggtacctttagtttacaaataaacatgtatatacaaatggaatattgcctcctttaagcaaattaggaagtcaaccaaaatagcaaaaggaaaaacatgacataaaattgtcatgtcccccaaatgaatttgttgaatgaatacattgtgtgtatccacactctaaatgcttttctgaaacagtagagctctccatagcaaatatgttttttaaagcataatcttgtgaaaacagtgcatgttaggtgacacactggtatgtagtaaacagataactacttgttttctgaataatcttacttgctcatttgggaaacaattcatagaagaaatattcattgttcttatgcataaactttaaaaataatttaccacaattggccaaattattttcaaagtataaacagatagacaagaatactaaactttcccctgcctacatttgagagtttgtcagcagtcaactccaaggcctttaatcccaggctttaaataattcagataacacttgattactccattgcaagaacccttgagctctgcaaaatctgagtaacacaatattttccacattaaaaaaaggccaatcttaaatagtaggcatcagaccaaagtatgcaactcatttttgcatttactacataaactctggtaaatatcagtgtagtttgctaccaagtaattctgcattcttgctttcattaccaagccctctagttctacagcttaatttgctcaactcagaatcccccatccatacttgttctggttttaaaggcttctttgaatcataacaagtaaaatggttagttatgttactcagaaactcaaaagtgtacacaaacgaaaatttaaacttaaaagaatactgttttgacattcatttctatttctttaggaaaatcattgttttatatcttttgacaaccaagattcaataactgctgcctccgttacttgtaaacatcagccattacaaaagagctttgctcacttggctaaattacaacctgagtaatgtgaaacagacagaataaccaagaaatattggcttccaaccccaaatcaaaaagcaacaaaattttgccatcaaaaatgtctagctgagttctaaatggattaaactcatccataaaactgacgtaggtagcacttcactttgatgtatagtagggtccatatatgtctgagcatgtgttcataattatcatgtaaccagataaataaaagacacaaaattaggttacaaacatcaaataagctctgtaaaaattatcaaagttgagcaaagaacccactgactttagtggtatggaacatttttaatcaatttcttctctcaaagtaaactcatcatatcctttcccctcaatccttgtctgagcataggaataatcaatttctcttcactctagcaagcaagtttagttttttcatatatctggcctgaaacaacatgaagtagaaaatctacagattgcattcagtatcaccaataagtaccgcatttgactactgctcataccatttggaaaccagtcctcacatgacgactggcctgacacctcatccatcagcagggtgcccagagcagagttggacagtcttccttgctccatctccagaggggaggcccagttgggaaacaggattctcttccaatagcaattagatctttaagatcaggcctcagcaacatgacctaaagccatcctttcttgcaacaaagtctccagcatcttcagaggaagagaccgggagtgaggcaaatgaggagaaatccaggtctccgtggcctgattagaaactttgttgtgtcaaataaactttggccactggaggaaagtaccccatggttgctctggctttagaaagatctgtccagggcttctcaatcttcttttcacccctctctctctcactccctctctctctcccctcttctcttgtttcaaaaggggcctctggtcagcgctgattaataagtgttttttgttgtgaagtgttgaataatagaggatggccggtgacccagtaaggactaaaccttgcgctggtttattgtggcaagctgagaaaggggctttaggcccgggaccccaggcactgacccgcacacatcccgcggatcgcctattcattcgcacagccctccagtcgcccaggctcccattgtttgctgagcaacaatggagatttcgcagggaaagtaaagctcttttcagattcctctctgatgttttgcatttagggaaacaccgacctccactttttcccccgacattttccctcctggcatttaaagctgttcgttttcggggaaacttctgtgagtttcgcgcttgttcgaccaacaccagtgttaggaggaggcgagaccggtggaaaaaggagagccccagagatttcccgtgtgtgtgtgtgtgtgtgtgtgtgtgtgtgtgtgtgtgtgtgtgtgtaatgcatttagaggacgggagctgcctctagggagaaaggggaggggggaggggagaagaaaaaggaaagagcgcgtttcctcgccggggttaccggggtggcgcgggcttcgcggccgaggggctgccggcccggcccgcagctcctcgcggccggctgggaagtggcgggtccggctagtccgcgggcgggcggagcgcgccgtcgctgccagtgtccccctttaacattccttccccgagcctttccctgctcctccgctctccgagcccggggcggccccgcagacaccagcgcctctatcctgcgctccttggcgtacgcagccgggcgaggtcgcggcgggaatgggcgccgaggccctgcccgccagggccgcatctgcggcccgagacttacttctgctttgctttcctgcacctggcccggggcaggctttctagtttctgcctcggccagaggagccgacttccgcaggacgggcttggggcagggggtgccggtgggggcagcggggcgaggcgaggtcgcagggagacgaccaggcctgcttgggcctgggccgctccagccgcctcgcctcttcagggacctcgccccgggaccacccgagcggacccacagcttctgaggaaacagctgcctcgggcctaagggtctttgctttcccccaacgcatgcaagcgtgggtcgccagcccagcatgtctggcgtggaggccggaggagggtggggagctggcggtgccctatggccagacgagtaaaagtcggttagtgttttatgcgcctgggggaggcgaagggcgcgggcttgcggggcccgggctgcgagtattgggagggggcgcctcgtgaggccgtgcgaggccgccctccccggcaggcctcgtccacgcccttgtggcctcccagacccgctgcgctttggctaggcgtccctacgcgcctccaccttctccaggtgcacgcctgggcgcggagctaggctgagcccccagcgaggggcgtggggcgaggggcgaggggcgagggcgtgggcgccacgcaggccgcggagcctggtgggcggcgtgaagcgtgcactgcgcctgcctgcccggtcccagcctgccgcccagagctccccgaccaagccttgacagctctcggagcagcgagaagaagaagaggaggaaggacacaaagaggaggaggcggcggcgggcggcgaactgagggcagctcagggggaggaggactcattgtccggtccccccagtccaattgatatgctaatctcttt

SEQ ID NO: 1883283 - DNA, 4001 bp, Homo sapiens
tatgaatgaataagtggtaacaatataatatgtaccaacaattgtacgtatgaacaatataatatgtaccaacaaggacaactgttgtatgttataagagtatgcaactggaaaagaaaagctcctctaggcatcagaggaagtctcttggagaaagacacattttaactgagatctgaagattgggtaggagtcaaccagatgaagtgcgtggaatgaggggattgggatggtgtcataggagagtcaccaaggtaggaaagaacatcctaggaactcaaagaacaccagtgctgttggaaggtggaagaattatggaaagccttgtaagttatatatttgttaggaatacctctgatttcaagtcatagataagtaacatggctttaaaatgtgggttgaaattttcttatataacagaaattttagagataagtaattacccacactgcttcagctatccattgatatcaccagtgacccagatttcttctgctcttcctcctttcatgatgagtgcattttctttcattctcatgcttgccatttcatggccataagatggctgctgaagctccaggcatcaccaccatattcaaggcagggaaaaatgaaggaaaagtggcagcaccagctacatctctcaggctgtcatggagaaaattgactgaagaggcaagagatgatatgtggtgacagaaagatattaaccggggaaaaatgcccgagacacgaaaggagatgatagtagtagagagggggagaagagggattcaggaaacagaaggtttaggatgactctaactattcataggattgttatgtatagcaaatgcagtcatgtgtatgagtgcactttaaaattataaagttttatatgaaattcgtgcattttaaggtcaaaatttgactagcttgctattaagatacatgttgtccttgaatttaaaactcctcttttattagaactcttgaaagatataaaatccagttgattcatttggtaaaataaaactacattctgatcttttttccttaaaaacgtcaaaacttcacttctatttagtgatgtagaaaagacaaaaaataaccccgagtcaactgtatttgctccctccagcttaataaaataattgcgcttttgtgctcgtaccaaggaaaacccaactgcagcagataaaggatagccttaaagacaggaggaaaagctccagtctcccttcagtcaggtgaatccttctacagaaaaaaaggtggagatggagggtgttgcactaaacccacatcctaacataaatctcataaaaaaattagaatttctcatttttctataaccgctactattaggattcattcctgggctgagacattttttttttaatttcaactctcacattaacagtccaataataaacccttgattaaagaaaaaggattacagtgaaagggttgaaataagcttaattgtagaggtgtgattaatgccacagtgatagactcccaggtaatgatttttaaaattttataggaaatgtttaacaagatgattgcctgactataaaattctctgtacaagaaaatagtccttgaaagcagcattgggtcctgttgcactaatacatttatgaatggcaacatttcttttatagttttgatgaatgctaaagtagaaactttattataatgattttggacccagaactgtgaaaatagagggcagaatatgaacattttaccagatcaatcaattttcatttaaaattctactcattgtgtatggtatcaaactatgaaaatgtaacatttcaaactagtgatttctatcctaccaaaattgcagtacttatttaggttttgaagtagataggatcagtgttagagacagcatggtgtagcaaaaaagaaaaaaaagaaaggaaagaaaagaaaagaaaatagattgaaatacctgtgctgtagtttcttcttttatttcgtcattcaatctgcgagcgtttacacaaagcctaataattgtaagacaatgaaatagaaggaccccagatgtttctaggtattcttcttaagaaatgctcaggctccacagggtaggaacacagaggcagacacataattgaaacgtcataaatggtatgaccttgtgttcatttgtaatgaaaacatataagtttatgggaacatagaggagagaaattcatctcaggagggtgtggattaaaaaggggcttaggggccgggcgtggtggctcatgcctgtaatcccagtactttgggaggctgaggcaggcggatcttgaggccagaagttcgagaccagcctgaccaacacagtgaaaccccgtatctactaaaaatacaaaaattagctggcgtggtggcgcatgcctgtagtcccagctactcgggaggctgagacaggggaatcgcttgaacctggaagacggcagttgcagtgagccaagatcgtgccactgcactccagcctggcaacatagcgagactccgtctcaaaaagaaaaaaaaaaaaaaaaaacaaaaaaagcggggggcactagggaaagcttccaataagcatcagcacatgaattaagactcgaagtcttctcttacaccagggaattgagccagttcaagggggaaaaaaacattagggaacggtgccccttttaaggagatcaagcaattgatattttcagagttcaacaagtggcaagacatgaaacaagacaacgttgatcaactttggctaactttaggagaaaaaaaagtgctggaagggtacaggatggctcatagagagtcttacagccctcattaaggagcttggacttaatcctgaagaaaacaatgaaccatctggaagatgctatgctcatatttatatttgaaatcatttatgtggattactctacaaagggtggatttaaaggagaccattaggagtctcctggcaatgggctgagggaaagaggttggagaagagctagggagtattgggacattaaatttgcaaaaatagaacggaatcaaggatacaggttagaggacacaccaagaccgcccccaagaataaggaaaacaaagctggtgtgatggggaaggtgatgagggctcaaacatgtggagttttaggcacctatggatttccaggtagaaatgacagaagaaaactgcatacacgagccagcaactcagggaggattctggctgaagagagtcactagaagttaccagcaagcagcataactgcattagaagggcattcagctcctgaaagtttgcttgttaataacaccactcagcgagagctgtggcatgaaaggagcaggaggcctttactgtactgtgagattccttgaagatcaaatgagagactctgtgaaacaaaaatatggaagtatgacatggttattatttgaacttgactcaaatgcttaaatgatataccttaaaaaacaaaccataaagctgtaatcataacaacaaaaacaaaattcatctgttgatgtcgaatcactgcaatgctataagggggtgaggcatttgggaggtgattaggtcatgagggtagaactgtcatgaatggtattaatgcccttatggaagagtccccagagagctgccttacaccttacaacatatgagagcacagggagaaggtcccatctataaatagggaaacaggcccacaccttgacctcagacatcctagcctctggagctgtgagaaatgaatttctgttgtttgtatgccacctagtctacggtattttgttatagcagcctagatgaactaagacgctcactcaccaaaatagttttataggtgtgagatagagagatattaggatgagcagaaaatgtcactatgaaaattttataactccactgaaaatctatccagattaaattattgggaagaaattgatgacggaaacactacctaatatttgaaaaatgatttcaacttttctaaggttttgggtttcatttattcctta

SEQ ID NO: 1883284 - DNA, 4001 bp, Homo sapiens
actggtcgcccaaggctgttctctttgtttgttttatctcaaacacagtcatatgcccacttcaggtctctgtacaggcaaaatgtgtctggagtcaattacttagcaaagcaagtacactcatccccaggcctgtactagactttaaccgcagacaggccaaactcacagaacctgtactgcttatacaaaaggagacctcttattacgtccagggggaagtcaatatcacttataatatgttaactatctcactgaccctggagatgatctggctatggagaagggctcaagcaatcaaatatctctgaaaacagacacataatctgggtccaaaatgtcagtaataatgtacaaacagaccatcttcttggaaggaaatttgggaaataccttccagggatgttgtccatgacatagtgttggtcttccctgccagcccctccctaacttcctccttcccctaccctggcctcacccacaactacaactctcacttctcttttaacctgtaagtggaagtctgatgatgatcgcacacacgtcctccttcctaagtgctgcattatgtcctgcctctttttttgctctgatgcatcactagttgcaggacgaagctattcacagaccctggatcgagtccatggggagagaccattgggaagaacatgatttttaaagctagttttacctcaacactgctcaatcccagaccactcttccccagtcacttgcttattgctatgggccgaatgtttatgtcctctgaaaattaatatgttgaggccctaactcccaatgtaatagtatctagaggtaaagccttcgggagtattaggtttagatgaggtcgtgagggtgagaattctcatgagagaaacagtgcccttataagaagaggaaaataggccgggcacggtggctcacgcttgtaatcctagcactttgggaagccaaggtgggtggatcacccgaggtcaggagtttgagaccagcctggccagcatggtgaaaccccgtctctaataaaaatacaaaaattagctgggcttggtggcaggtgcctgtaatcccaggctacttgggaggctgaggcaggagactcacttgaaccgggaggcagaggttacagtgagccaagatcacgccaccgcactccagcctgggcaacagagtgagactccgtctcgaaaaaataagtaaataaaaaataaaaagaggaaaatagattctctctctctctctctctctctctcgtcagtgcactcacccaggaaaaaaccacatgaggaaacagcaagacagcaagacagtggccacttacatgtacaaaccaggaagagggtcctcaccaggaaacgaatccactgtcaccttgaccctggacttccggcctccagaactgtgagaaataaatagttttttaagccacccagtctatagtattttgttacagcagcctgagccgactaagacacttattgcaattaattatttgtatgatgacagacttcttcctttctactacagctctctaagaattcatcttatttgatttcacccctcatggtgcctaactacaggtacttatgtgtataaatggttgttaaatgtttctcaaacctccgcttttgtcctaaggagtttggacttgatcacttatgcagtaggagctgctgggggtttctgaatgcaaagtggtattagctgtggttctcaagcaaatgacttacctttggagcctcaggtttctggtaagagaaattaggttgcacaaaggcagaaagacgagaaagttttttgaacagcgtaacttcattgcgcaaatgtaaaatatccttaagagctcacatttgccccttgcattcctcgaaagggcagagcatctgctaaaagaccaatctgtgaagcactaacttgacttctgcttatttaagctggactaatcttgtgactaattctatctctgtgctgtggctgcctaagcagggaaaatgtccaaatgtgaaggggttgaaatcccttattatggggaaaatatcccagcatgcctttcaactttacttttggcaaaagtgaagaagattcctttctaaatagcaaaaattcactttgctatacaagaactactgagggggataaacccttgactttaaacttgtcaaatatgtttcgcagctaacaaaggctaaacacacacacagacacgtacacagacacacacacacatagtcatgcctattgctgccattttatccttagaataacttaattataaagaccacaatacactaaacacttcctacaaaatgtcctagccagggactatgtgataaagatttccatatatgggcgtgtgactaaggactgagagaaaatatggcagagactgctggctacaaatcttggataattccctgagaaggaaaaggaaaaaaaaagaagcataacaaacctgccgcatgcaggaaatgcctggctaacataacggccgagcatattcgtgtgggaaaatgcacaggctcacaagcaacagctttcaggggaaagatgtcttcaaaatactctctccccatttttacgctttccgattcctaagagcttctgcggggacttctgaaaacgaccttggcactttaggccaggactttttgaacagcctttttcaagggcttagctccatgttctttgcaaactgctaaatccttcaacctctaaattttgtttcaaagtcataaatttctctccaggcttcttggttttcagaaaccagcacagcatgtttcatctgtgaacaactggaagaaagcaattttactgccaaacttaaaaaaaaaaacggcaagtttcattggcttttaattctatataaaggtacgccctgcctgccagatgtgggtaagtgcaatagaattaaagttgtttaatcctcagcattgcataggttttctagtctaaaaatatctcactaggctaaaacgctggtctgtatgaacataatataaattagaagagctgaatgtaatagtccttggttagctgagaaatttagcagcccaagcacatttggggtgttatctacttgcaagtctactggtcctcactccaagttcctttctgctatctgcagcccctacacacagtcagggacattgatgttgtggggtcaggtgggccacctagattacaggacagtcctgcctttacataggtgtgtgttttggggcaagtcactcaccttcactgagcctcgggtcctccctgaaaggtaaggataacaggaagcctctcccaaagatgggtcaagatgaaataagatgacaagtgtaaacatttatcaccatgtctggcacttcttaagctctcactaaataacagcctgtccttattaggttcatccgtctctgcttgagcactactgtagaggacaaattgatcagtgggcaccactgagcttttggtatttctgatacaaaccaattctgtaagactcattacatttaatatgttaaagccaaaatggatttcttctgagtaacttaatatgtacattctgaagaactttgaaatcacccacagagtctcagtaattggctacatgttatttttaatatattaattgatagcctgcaacaatcctccttgaaaagtcctaggttgagtgtcagaatctcccccagagtaggatgtccctggaagcaactcgtggttgtgtgtgtgtgtgtgtgtgtgtgtgtgtgtgtgtgtgagagagagagagagacatgaagttttcagactaatgctgctctactacggcacttcctctttatagtgactgaatgatatggtttggctatgtccccatccaaatctcagcttgaaatgtaataatccccacgtgtcaagaatggggccagctggagataattgaatcatggggtgatttcgctcatactgttctcctggtaatgaataagtctcatgagatctgatggtttcataaatgggagttcccctga

SEQ ID NO: 1883285 - DNA, 4001 bp, Homo sapiens
aactcccaatgtaatagtatctagaggtaaagccttcgggagtattaggtttagatgaggtcgtgagggtgagaattctcatgagagaaacagtgcccttataagaagaggaaaataggccgggcacggtggctcacgcttgtaatcctagcactttgggaagccaaggtgggtggatcacccgaggtcaggagtttgagaccagcctggccagcatggtgaaaccccgtctctaataaaaatacaaaaattagctgggcttggtggcaggtgcctgtaatcccaggctacttgggaggctgaggcaggagactcacttgaaccgggaggcagaggttacagtgagccaagatcacgccaccgcactccagcctgggcaacagagtgagactccgtctcgaaaaaataagtaaataaaaaataaaaagaggaaaatagattctctctctctctctctctctctctcgtcagtgcactcacccaggaaaaaaccacatgaggaaacagcaagacagcaagacagtggccacttacatgtacaaaccaggaagagggtcctcaccaggaaacgaatccactgtcaccttgaccctggacttccggcctccagaactgtgagaaataaatagttttttaagccacccagtctatagtattttgttacagcagcctgagccgactaagacacttattgcaattaattatttgtatgatgacagacttcttcctttctactacagctctctaagaattcatcttatttgatttcacccctcatggtgcctaactacaggtacttatgtgtataaatggttgttaaatgtttctcaaacctccgcttttgtcctaaggagtttggacttgatcacttatgcagtaggagctgctgggggtttctgaatgcaaagtggtattagctgtggttctcaagcaaatgacttacctttggagcctcaggtttctggtaagagaaattaggttgcacaaaggcagaaagacgagaaagttttttgaacagcgtaacttcattgcgcaaatgtaaaatatccttaagagctcacatttgccccttgcattcctcgaaagggcagagcatctgctaaaagaccaatctgtgaagcactaacttgacttctgcttatttaagctggactaatcttgtgactaattctatctctgtgctgtggctgcctaagcagggaaaatgtccaaatgtgaaggggttgaaatcccttattatggggaaaatatcccagcatgcctttcaactttacttttggcaaaagtgaagaagattcctttctaaatagcaaaaattcactttgctatacaagaactactgagggggataaacccttgactttaaacttgtcaaatatgtttcgcagctaacaaaggctaaacacacacacagacacgtacacagacacacacacacatagtcatgcctattgctgccattttatccttagaataacttaattataaagaccacaatacactaaacacttcctacaaaatgtcctagccagggactatgtgataaagatttccatatatgggcgtgtgactaaggactgagagaaaatatggcagagactgctggctacaaatcttggataattccctgagaaggaaaaggaaaaaaaaagaagcataacaaacctgccgcatgcaggaaatgcctggctaacataacggccgagcatattcgtgtgggaaaatgcacaggctcacaagcaacagctttcaggggaaagatgtcttcaaaatactctctccccatttttacgctttccgattcctaagagcttctgcggggacttctgaaaacgaccttggcactttaggccaggactttttgaacagcctttttcaagggcttagctccatgttctttgcaaactgctaaatccttcaacctctaaattttgtttcaaagtcataaatttctctccaggcttcttggttttcagaaaccagcacagcatgtttcatctgtgaacaactggaagaaagcaattttactgccaaacttaaaaaaaaaaacggcaagtttcattggcttttaattctatataaaggtacgccctgcctgccagatgtgggtaagtgcaatagaattaaagttgtttaatcctcagcattgcataggttttctagtctaaaaatatctcactaggctaaaacgctggtctgtatgaacataatataaattagaagagctgaatgtaatagtccttggttagctgagaaatttagcagcccaagcacatttggggtgttatctacttgcaagtctactggtcctcactccaagttcctttctgctatctgcagcccctacacacagtcagggacattgatgttgtggggtcaggtgggccacctagattacaggacagtcctgcctttacataggtgtgtgttttggggcaagtcactcaccttcactgagcctcgggtcctccctgaaaggtaaggataacaggaagcctctcccaaagatgggtcaagatgaaataagatgacaagtgtaaacatttatcaccatgtctggcacttcttaagctctcactaaataacagcctgtccttattaggttcatccgtctctgcttgagcactactgtagaggacaaattgatcagtgggcaccactgagcttttggtatttctgatacaaaccaattctgtaagactcattacatttaatatgttaaagccaaaatggatttcttctgagtaacttaatatgtacattctgaagaactttgaaatcacccacagagtctcagtaattggctacatgttatttttaatatattaattgatagcctgcaacaatcctccttgaaaagtcctaggttgagtgtcagaatctcccccagagtaggatgtccctggaagcaactcgtggttgtgtgtgtgtgtgtgtgtgtgtgtgtgtgtgtgtgtgagagagagagagagacatgaagttttcagactaatgctgctctactacggcacttcctctttatagtgactgaatgatatggtttggctatgtccccatccaaatctcagcttgaaatgtaataatccccacgtgtcaagaatggggccagctggagataattgaatcatggggtgatttcgctcatactgttctcctggtaatgaataagtctcatgagatctgatggtttcataaatgggagttcccctgaacaagccctcttgcctgccaccatgtaagatgtgactttgcttctcctttgccttccaccatgattgtgaggcctccccagtcacatagaactgtgagtccattaaacctctttttaagataatacccagtctcaggtatgtttttatcagcagtgtgagaacagactaatacactgattgagttcaaatgctctgttactgaggtacttagcctttctgtgcctcaatttcccatccgtaaaatgactctgagcaacagaatacctacttcctgatggcattaggaagggagagctgtttatgctatgcctaaaagcagtatggcatagtcgagaaaacaagagctttggactgggcaggggcctggcttcaaatctcagtccatcctttttccagctgtggccatggccatggactttatgtcttttggcctattttctcatttgtaacagagtggcagaccccgatgttgcttacgccatatctgttcctcattcttctttaccaataaaactctgattttgtttggagcttaactgtgcccagataaaaatattcatcttaccatcgcccatttgatatagttctggccaatgacacataagtagaaatcactaggtacagtggatgggaagcttgtttcttgaaagagcaggcccggctggcatgatcttctccttttgcctttcttccttcttctccttccccaggaacccagacacgatgcctggaggggagtcagccatcccataatcatgaggtggaaaatatgaagaggaaggcctacac

SEQ ID NO: 1883286 - DNA, 4001 bp, Homo sapiens
aatcaaagaagatgtagttttgctgataattttattcattaattgactgctggcataaaagtttgaaaactgacaaagaaaacatatttatttagatgacaaaactgagactacagaaaatttaagctatttgatgaaatttacatagcttataagtagccaagaataatgttgggtgtttctcccaaacatttgtttcatcagtaccttacactgtcttctccatttggctggcatttgtagcatctttcagttccatgctttgcttttgagtctcactcatacttctttaattaatactatctttatctatctcataaattacagagacaattgtctctacacttgcctaacaccacactactctaccttgctcaatctttttccaaatgaagtaatctttctgaaaggcaaatctgattatatcaacccatggcttaaaacccctcagaacactcaattgtccccaagataaagtggaaacacacaagttataaaaactctcccttatttactttctattttcatgtcatataaatccattcactaaatatttctgtacatgttatgttccaagtatttttcaatgataaataaaccttcattcagtttaatgtgtgatagaggagacagataccttaaaatttaatatacacattatttaatgaatacaaattttgatgacttgtaaaagaaaataacaagatactgtgaaagaatttaagaacaagggtctaatttgattgtactttcagaaaatattttttcttggagcatcatttaatttaagacacatatggtaaataggagttagccaaacattcaagagaagagatatctggcagaagagacagcatttgagaaggttctgcaacagaaaacagattggtttctttggggggctgagagtgctgattgtggttggattccagtaaacaagaggaaagtaggaaggagtttaatataggtatagagagactgcttattgcagttactgaaataggccattctctctctctctctcccgttctctatctctttctatctctatctcctcttgcctagtatacttgctattccctctgtcttaaactatatattctgcttctacacatgttatttttctatcttttgaataattcttttcattctatagaccacagagtaaatgttgccctatttggaatgtgtattagtcacagtgctgtaacaaacaaccccaagatgtcagcgattaacacaataaagtcacccaacatgtatgctcatgaataggcagttcttctggaagactctctttttgtgtagtgactcactgacctgcttcattccaaatagtgattctaattcccactggacccacaggttaggtcagtgtttgggaagagagagaggagattatttatgggtcagaattggaagtgtcctgcctaagaataacttagcccagattgaatgggccaaaattctgtccatggccactcccatctataagagaggctatgagacagaaagggaaatgggcatagtaaacaagtcatcattctctgccacattcctctttttggccaccaactatcagaaatgtctcaaatttctcccgtgtaaagaatgcaaccagcctcttcctaagacatagaagcttaattcccatccagtcactgtatccagctcaaagttcaagatctctaagagaggcacggtccttggcattacatctaaatgtgtctcctcatagctcttcaccccatgaactaaaaagtctaggtgttttcaacccaactttaagcaatcacaggacagctgactgcttagagatatatcagaatgaaaaacatgtggagtcatctgattatagcaatggtgaaatcctaccagaaagcaaggaaggaaggaaagaagaacctagaacaccacttacagtattagaaactgaacatcacggctaaggcaggagaatcgcttgaacccaggaggcagaggttgcagtgagccgagatcgcgccagtgcactccagcctgggtgacagtgtgaggacagtctgggtgacatatcaaggaaaaaaaaaaagaagaagaaagaaattgaacatcataaagataatgagaattgtttctgtcagacactaggctaagaagtgtacattttttttctttaaattctcaaagaaaccatttgagttgggcattatcattagccccattttactgataaagaaacttaaaattcagaaaggttaagcaacttgcctcactttacacagatactaatttgttggaattagattttaagattgtctgaattaacaattaaaaatcttaatcattattatatactatctttcgtatcttaatttaaatagctaaggagccaattaatgtatttttagattattagtacaatttatataccaggggaaaattaactaaaaattctgaatagcaaccactataatacatagatttatattagaagggttttaaaagtatctacaaataaaataatgatacttaaataaaaagttatttaactttgaacctaataatatacacaagctcattgcatttcaacaataacttcgaattctcaaatctttaataactcagatgcctttggcatcaggtcctttactctattttttaaattattattatactttaagttttagggtacatgtgcaccatgtgcaggttattgaattggaatctcgctgtgtcacccaggctcaagtgcagtggcaggatctccactcactgcaacctccgcctcccaggttaaagcaattctctgcctcagcctcttaagtagctgggactacaggtgtgcaccaccacgctttgctaatttttgtattttttttaatagagatggaatttcaccatgtgggcaagactgttctcgaactcctgactctagtgatccacccgccatggccacccaaagagctgggattacaggagtgagccatggctcccgacctaaaattttaataataatgaatatatcagaacaaggcaatacttcgttttaagatttattttcttgagaaattgcttgtaattaataaattcatcatagttcacttcaaattcacataatcaaaataaggaaattgttcgtcatccaaaatttccccatagaaatatgaacaggatttctggataaatgtaaatgtaaaggtatatatttattttcatggaaagaattgtaaagttttctagtcttacaatggtaatttagacaatacagtggaacagctagatgtactactttgttaagtagagcactattttccctaaatgtcagaaaaaactgtttaaaatggctttctgccatgtatctttcaggaagaacatttacataggcaacatatttttgatagtagttgcactttatgaattgaaatgaaaaggtatcctttaaatttcccattctcataaagaattacgttcactattttgtaacacttttattcaatagaaagtcttctttttcaataaacagagactttttcctactgaacttccagtgatatctgaaaaacataactacagttctgttatcacacacaatttttatttttttaaaaataacacacacagttccaataatatttcttgttaatacatgttttctctgtaaagcatttactcaattggctagtggctttcttcagactttgaatttataattttcaaaaggcaaatatagcaattaagagcctggaagaaatccctcatcaaattagaatcaactgacaaatttggaccttagctaattaactatactcttaaaaattttgctgagaaatgaactcaatttaaacttaaattaattaaattaaatatattctaaaacttgaaaactcgaaacctattaatttcagtttagtgggttcaatacaaccaagtcttgccttctgacctgatatatgtctcaccccaagaagttatgcagttaacattacagagtacaaggattatgcactaaacagtaccag

SEQ ID NO: 1883287 - DNA, 4001 bp, Homo sapiens
aatcagagcttataggtgggaatagccaaggcatgttcagaaccagttcaaggcgaagccatagtaccataaaagatggataaagaatatcagaatgttgtgggctgggcgcggtggctcacgcctgtaatcccagcactttgggaggctgaggcaggcagattacctgagctcaggaattcgagaccagcctggccaacatggtgaaaccccatctctactaaaaatacaaaaattagccaggcatggtggcacctgcctgtaatcccagctactcaggaggctgaggcaggagaatcgcttgaacctgggaggcggaggttgcagtgagccaagatcgcgccactgcctgggcgacagagtgatactctgtctcaaaaaaatagaaaaaagaaaaggaaaggaaaaaagaaagaaagaaaactggattgagttcagtaaacaaaaaggaatgatcatttatttttgaacaagcgagtgatataccaatggcaatttgaggaattttgtgtggcgggagtgtgcaagatagttttgagaggaaagagtccctaaggcttccaagttccaacccttactccttgaatgttattaaatgcgtattttaaaaatttgatctgaagatccttttgggaagaaatgttgagtataaatagtctttccagccaatataagcagcttgggaagaaaaacgaaatgtttgagggatcctaacgtgaagggacagggcttggaatgcccgctggttttctggtcccagcaacattaatgttcatcctctttcttcctttaatttttctagcccttaaaacagagtaaaatgtcaaactgtgaaagaccacaactgcttttctttgttatatttagcctttcacagtttttaaaaatataaaagctatagaatctgcctcatctctcatttctccatcctctcactggctgaggacatatttaacaggtttcatattggaattaccaggaaagtttgggctgtctatggctgcattacaaatcacccttgagtctaggggcttaacacaacaatcacttccatacctcacaaatctctaatctgagctggtccaggtgggagggctcaggtctgttctgcataccatcagctggggtgggtcgagtggaggctggggggtccaccttcaagacggctcactcacatgactggcagctgggagcttgggctgggggtgggtcatcagaagacccggggtgaggggagccctgtcttctgtccacgtgcacccctccatggcttgttggcttccacgcagcatggcggcggagttccaaaggtgaacatcaggggttgtaatatgctttatgtgagtaacttgggttgtgctttgaaaattttcaccctttgattaagggataagggtaggcccttaagctacatagttctttaaaatccatgtccctgactctggtgtcctctgtcacaggctacttaaagggctggtgtccatgggaggtattccagctcccaaagtgtgtggggtgcctaagttctcagcagagatgggaagttgagtcacagtgatgtgaactgaggtgatggtgggtaccccctgggtagagttgtcttggagaagcacagaatcaatcattaaataccattctctgtgacttaaaagtcaagtgctgggttttcaccactcccttgatcttgctcaaaaggaaacttaatcaagagaatgttgctgtactccgcttgcttcaaatgggttctgcgtggctaaggttacatttggtagctcttggcttgtcttcagtttcaaatgtagggtgagagaggatgttgtttggagagtcctctaagccctctctgctgatggaaagaacgtgtttcagtgcttattggcctcctaagtttctgagagttgtttttgagtcatttagaaataattaaactgggttaagcaaatgctttttgcttcagagcttcaacatttattagtcagttgtcctgtagagcaggtttttgcccttattcttcaaagctcaggccatttattctataagtgatgctatctgatgtcacaatgatatatattgttatactggtatttatcaagactatgtaatgaaaccctatgttggaagaagtctatgtctatacaattagtcttgaaagcaggagctctttccattggatgcagtacctggaattgtggtatataatattttaattgaatacaggatgtttttggcattaaaatctttaggaaggttaaagagttagaaacagagaactgtccaagtaataaggagtgagccatttttataaacatcctgttccttaggtgctcatggtttgtggaaacctcaggtggagacatttctgaagattgctagactgaaaataatgtcacagggtccaggcaggaaacatagcatattcgagcaggtgattcaggagagacctatttacaaaagtgtcagcatggttaaaagaaactaacaaaggatgacgaaagcaccctgggaagccactgtaatccctaagcctggaggggactgggtagggcaccaaactcagatgtgggaggtgccactggacatggggctgtgcctttcacagaggagcacatccacccaccaggaagatggtgggaagagtaaacccatcagttcctcttctttctgatcacctgccaaggagttccattggcaaacctcaaccaaagcccagaaaggccagaaggcccattgctacgttccataaaattcagccttctggggtacagagcagtgtggagaagggtagggagtggatttgaaggagccagcggaaagtatccatcacaacacatacacacaaccctacagtttcggttagttaatgtttgtttcacaaagacaagctcatcatggaggcctaagttgcatgggtgaatttaacataagtttctctctactaagaaaagggtgaaaattcagattgcataaaattcatcccaaaatatcattagctctgggacaaagagaatttgaaacttcatatttctggcttgcttcaggccatggcatagggacggagtcctggggttagggaacaggggagggctaaggtatttagaaataacctttcctaaagaaaaggaaatcttagttctgtaacagaaaataagccctcggcagagcccctgagatgagccaggggtggggaagaagagaaaacatgcccatcaattaggtgacagcagccctcactacctggtagcagagggacagaaccccaaaggtagatgaacttctgtgataaatgtgctcaaaagggaggacagttctgagactcattcagcctgtatctcagaagcatatgtatctggtagaatgtagccgcttgggggtctagtcacactgtggcttatttcttctttaaaaatggaattgtttagactctgcatactcagtgggtttaggctgccttttggtgctgaagctgcccaagatggaagggaagagcatgtgtctgctaaacccttcacagtttccagtgtatgctaatttattcaaggtcacagaacatatgttacatgacaatggtataaggatttttttttttttttttgagatggggtctcgctctgtcgcccaggctggagtgcagtggtgtgatcacggctcactacagcctctgcctcccgggttcaagcaattctcctgcctcagtctcccaagtagctgggactacaggcgtgtgccaccacacccagctaatttttttgtatttttggtggagacggagtttcaccatgttagccaggatcgtctcgatctcctgacctcctgatccaccagcctcggcctctcaaagtgctgggattacaggcatgagccaccatgcccagctatggaattttttatgtatgagaaatcataggaattttcaaggctataccctttttttatgagaagcctaacttcttgcacagtggctttcaacatacaaggtaggttcatagtattttatagtttat

SEQ ID NO: 1883288 - DNA, 4001 bp, Homo sapiens
ttctgccccagtgacctccatgagactagatctctggaacctgcagtaaaatgggtggcgcatacccaaacggagtgccagtaccacgtgataagaacttcaaatgggacaagggaagatgggataaagaacagggagatttgctatatgatacaaaattacagctggataggaggcggaaggtctagtgttctatagcactgtaggatgactgtagttaatagaaacatatagtttcaaagagctagaaggaggatcttgaaaatttctaacacaaagaaatgataatgtttgatgtgacagatatgctaattatcccgatctgatcaccataccttctatgtatcaaaagatcgctatgcaccccataaatttgtacaattattatttgtcaattaaataaataaaagaaaaaggattccaaatggcaaaaaggaaagaaagaattcacagggaaggtaacgctagagcagacgcttgaagaatgagggaggagaccaggtgaggtggctcatgcctgtaatcctaacacttacggagtctgaggtgagaggattacgtgagccaaggggatcgagaccagcctgggtaacatagcaagactccgtctctatttttaatacatatttatattataaaatttaaaaaaaaaagagagagaatgagggaggagatgtccatttggaaaggagtggaggagtggaaacgcgccttaggaatggggttgaactaaataggaacatcgtacctgatgctgtagaagaaccgttcgaatggcgccagggtcagacaaaacgtaccccgggggctcagatggtggcctaaatccagctgaagagagagaccaacctccatgcagtcgggatgaagagttgtagaccacaaggtggaaatggctgttggccatcggagctcaaccttcatggagactggtgcgccactgccctctcaggtcaccagctggatgctgccctggagtagactagctgggagggttatgcagggtagggacgcagccaaatggagctgccaagaaccagagaaattactgaagatggtgtcaagtcctctgaaacagtctccctttccatagcccctggcttcatccagcctcacccttggagatcagcacgtgctgcaggcaggggatctgcaagaaacgcaagaggtatcaaagaaaaggctggttccacgtgatattgatgcccaagcatctagcaaagtcagctttctgttctttgctctgtgcttggttaggcaagtcctcgagtttgaaagaccaaaaatctttcaatgtccgtggctaacacatggacatcagtcaccctgagtggccctagcacctccgctaatactcgctgtcctccttagagaggcctcccttttctcttttgcactccttggattttctctttttccatttcccaccctaatcctctctgaggttccctgttccctttcctctttcctccatcagtctctggtggacccgcctcatggctggcagctctggggccaggcagttgccagttctggttctccaggcccactgtggaagagcagcatccccttgtgatgacagactacctgcatctagatcccccagagagctgggaaaatgcagagccctgggcccacctccaatctgctgaaatggctcgctgaactggaaggtatgcctccaacaagtcttccggatcagtttttgctcactaaggtttcagaccctctgctctggagataaaggccctagaaactttggtctctcatctctctctctctgcttcccctattaacccttctccaaaaaatggagaagctaagttgaaggcacagcattgagcttttcctttcccttctgtcttctgtctcgacgtctttctcctctactggatggtgaatccctaaggatgggagttgtgttctactcagctctggaaccctgaagttcccatgatgtctgggtcaccatggacacttagaaatgtttgtggaatgaataaattgttgacgcagggaacactctctctcccttcctccccgctcccttcttttcctcctcctccccttttctgttcctctttctcttgggatcccctcggccttgggcacaaaacccaaatgttttaagagattgttaatgtttaaagggagacaggcgggcacaggcagggcaatggcaggttgctcaatggacaaacaaatccaccttcttctgttgtctcctaagccaacaggaagcagccagaagacggtcagacggtcactcacccggcaagggctcgggacagctgtcctgcctgccccacgcagcagttgcataaccttgctgcaataatcagagctataaatagtctttactgagaagccccaatctgggattggacaggcccgaggagtggcctttatttgttgccccttcaaaccagtggggaaaaacggtttttgaaagtctcacttatagactctaagcctggggcaaagtattccatgttctcctttgagtttagcctgtggtctcattctgtaactgcatttggagtctccatgcggctctttctccttctccttactgtgacaatacgtgacccagttccactgatggaacgatgctaacaaagataatgatgatcattctttagtagatcttcttttccacccgctcctatcactcctattcttgtctcgtcttttgtctcttgtgtatggccctttcagtgccttgcccattgattggtgactctatctccatctagtctataagaccaattcttctgaacacttgtttttttcatgttttcccccggttcagagtctttcagtggcttccacttacttacaacagcagcctacaattctcaaaggcacctcctattcttaatgtatgtgttttgtttgtttgtttgagacagagtcttgctctgttgctcaggctggagcacagtggaggcgatctcggctcgctgcaacctccgcctcctgggttccggtgattctgctgcctcagcctctcaagtagctgggactacaggtgtacgccaccatgcctggctaatttttgtattttttagtagagacagggtttcaccgtattggccaggctgacctttaactcctgacctcatgatccacccgccttggcctcccaaagtgctgcgatcacaggtgtgagccaccatgcctggccaatgtttgtatttatttataaatcaaatatgtgtgctactgtcattttatagaaaatattagaaaagtttactttcattgttaatttttgacaaaccataaatagtagttctaatactttctccctgaccgccagtggatcactgtgaataccctacaatggatatcactgaagatagcattgaatcattttgctgggatatcaaaggcttccaagatctagtttcaggtcatttctccattgtctcaacatttcttagagatgactatggccaggcacaaggctaggctcaggaggcaacaatgagtagttaccatccctgcctatcaggagctcacagactggtagaggagataaactcataaacaggtaacttttggagagtcctatgtatcatcagaaacgtttgcacaaggcattaagaaagaacagtggaaagaaatgacagcctatgtgaatccagaaaggcttcatggacgactatttgagcagggtcttgaaggatgagtatttcaccaagtcacaaaaaggacaaagggccttctgggcacaggcaaaggcacaaaggtaaaagaagagcttggtacaccggggaagggagaagctgttcacagaagctgatggggcctggaggagagggatggaagatgaggactataaagggaggttgagaacaaatcatggaggaccttatctggccataccaataagactggctggtatcctgaagttagtgggattcaaggatgttgtgacaaactacattttctcctaaatctgatttttcctgacctctctgcaggagtaacagact

SEQ ID NO: 1883289 - DNA, 4001 bp, Homo sapiens
aaaaatactaaaattagccaggcatggtagtgtgcacctagtcccagctactcaggaggctgaggtgggaggattgcttgagcccaggagaccaaggttgcagtgagttgagatcgcaccactgcactccatcctgagcgacacagtgagaccctgtttttcttttttcttttaaagtgaacagtttactgcagttaacttatgcctcagtgagcaaacagggacagagaatcagtgaactctacaggatgggaggtttatcttcatttccatggaggggaggtgacctgtgccaggtcccacagctggctgcttctcagggtcagtgttggaatccaggactcccgactctgactaaggagattctccattgtctttcacagacacctaaaagctgaagggtctcagatgaaatggatgaatgagtatcagtgaatgtcatctgtttcttttcatgttctttaaatgaggctatgcaaaacacagactcgaattccgggccctctctgtctctaaggaaggtggtgtgcagtgcattgcacacacatctcatttaatctcttctaaaaagaaaataataccaggactccaaaaccactaagccaaagggaaaagtcaagcagggaactgtgtcaggcaaacctgcctcccactttacttctaaataagatagctacaaggatagaaaagctacatagctccctcccaatttgcccacaaggaaattctttctgggcctcaagatccttaccctaaaacagttatgctgagtttcaccctggcaatgtacattgatagctgatcttcacaggtgtgggacagaaagtcatccctctgctcacctgagactgcatatctgactgcttcttacgccccattgtttatgcaaaaatgcagattcactgagctaaaggcataagtgactattcctctacctctaccctcttacatatatgttgtgtattcagtgaaaggctgatcaaagacccaaaagaatgcaaccttttgtctcttatctacctatgacctggaagcctccacttctagttgtcccgcccttctggaccaagtgaatgtacatcttacacatattgatgaatgtctcatgtcaccctaaaatatacaaaaggaagctgacgccaaccaccttgggcacatgttgtcaggatggcttaaggttgtgtcatggccgcttgcttaaccttggcaaaataaactttctaacttgattgagacctgtctcaggtattttgggttcataccctcataggccccagatctgggcagggttgctctgtcttcgggttcgcttcttgctcagagtctgtttgcccccacctacgtctgttccagtctcagggaacgaggctgaactgggtgtaaacagaggtcccctgccccaggccctgtgctttccacagatgcagaagtggccgccctgggacctgctcccatgacaagtgcagcccaggcagcctcctccctcctctgagctcccgctgcagccactctctctccctccctcccttggactctcacccattttgctttctccctctgtagggttcctccatactccccgggtgggttctcagccctctctgaggacagattatctggtgaccttgtcttctggcagcgccttgggtgccagggaggccaggcagtgtgggagggctctctgtggacgcgaggtgggtgagcgatggaacagtaagttggcccacgcagggggctctccaggttcccccgctgggttctgggcctgttgtgggaccctctgccctttctgaactgactcccaactcacctggctgtctccatggctttctccacgcagctcagaggctgttctttgataactcctggaacctggtcatcaggagagagcaggcggtgggaggacaagcgagtctcacgctgggggaagccatgttgttcaggctcaggcctctccaggactgtggctgcctcccctccacgtcctccagggcggctggctgggaagccgcgcgtgtgctgccctctacaggctgctcagcctccctgctgctcagcccagcccagcccagggctccaagtgaggcccagaaacccatgggcagggcagggggaagccccagagcacccccaccgccgctctggggaaggtggatagcatgggggcacgcctgggcgagagggagagcgggctctccagggcaaggggagcgggatatgggtctctcaggtgcctgcagggctgagcaacctgggtacacttatggggatgcaggaaaggccgggacagagaaagtgaaggtcggcccagggctggaggaagccgcaggaaagtgtccacgggactcccccagcgaccacggccggccacctctcagggacccactgactcttgcccgacagctatcagagctggatgcaggaacccggctgcccagagaaccctcctgagaggctgtgggtaagccaggccagcactggtgtccctgtccccagacggaggggcaggcagaagagagaggggggaaggaggtatgaattccagtccccaggaacctagcactttaaactccggggactcggatgcaggaaacacccccagcaggccaagcctgaaggcagggaggggaggaaggcaggaaggagtcctagcaggaacacagcctggcctcctgtcactcagagctgattcacaggaggagggggaacagggggaaaaaaaaacacacctcttttaatataagatttcatatttattttggtcaaaattcataaacatatgagcattttctgtataacgtgcttccttgtattgtttgatattacaacatagtcttcaaatagggtccatagggcagaaacatcaaaggactctaaccacgagtgacacactgtcttaagtggctgtcgtgtgtcatgtgctgtttggcttggggataaagcaaatcccatacaaaccaaacaactccagaaaaccccaacaatttcatgttgtcaggaagcttactttaaaagaataagcttaacaaacactgataaggctgacactctagatgcatcttcaaggaaggcctctacggaaggcacaagggagctggggctggactggctccctctgggctttgaggccaagtgtcctgcacagaaggccctgcaaaagcaaagaccaggtggcagcagcaccttgtgtcttccagatgtgcaggggacaacgcatgggacgccagatggaagtgggagaggatggaagtgcaaagaccagaaaggctaccccctcctaaaactccatggacacaacactgaatgtgcctaaatcttcaggcaattctaactttgtcccagccaaaccagtcccggaacaagacaaaacacatggcttgagatggaaaagaccaaaatcccttgaacgactacatccataatttatcctaccactactggactgctatggagaagagtttgctggaaagaggctaaaatgattactgaagtttttaaataaaataatagagcgtgacacaaggacaaagccttaatgtgtcagccattctaggtcctgttgtcacagtgtttaagaattgatatttctgagatgagtcagatgctgcagctcaggaatctttaccgtaaaatgcagctcaggggctcagggtcacagaccaccagaagcgagaggggcccatccactcctgagtcagcaatcatttcacaccattcccaggcaccgtccactcttccctcttgatgccatagcagatgccggggcagataaacacctgctctgccctgagcccaaagaaggcccaagattcactaatgttcagctgtaatggcacttgaaagagaagctatttgtagtcccagatctaacctaattctcactgtcctcatctgctgtggacaaggacgaagatgcagtcccatgactgtcccagcaggacagaccagacacatggcttcccaaagataccaggctcttcaaaatcctgggcatatgtaaa

SEQ ID NO: 1883290 - DNA, 4001 bp, Homo sapiens
aggtctgcagcttcactcttgaagccagcgagaccacgagcccaccaggaggaaagaacaactccagacccactgccttaagagctgtaacactcactgggaaggtctgcagcttcactcctgagccagtgagaccacgaacccaccagaaggaagaaactccgaacacatccgaacatcagaaggaacaaactccagacacgccgcctttaagaactgtaacactcaccgcgagggtccgaggcttcattcttgaaggcagtgagaccaagaacccaccaattccggacacagtaccatgaaggaatgaaaatacataacaatgtgatgtatcatgttttatttcctagactagtgacaaatgaaagctaagtgtagcaagggtgcagggacacaggcacatttgtggactaggtgtgagtgtaagctgggttcgatggtcttttggccaacatagtgaacccctgtgtctactaaaaatacaaaaattagccaggcgtggtggtgcaggcctgtagtcccagctacatgggaggctgaggtgggagtatcgcttgaacctgggagacggaagttgcagtgagccgggatcacaccaccgctcaccaatctgagccacagagagactgtctcaaaaaataaaccacaaggaagggaggtagggggagggggagggagggaggaaagagaaagagagaaaggaaggaaagagaaagcaggaaggacggaaagaagacgaaagaacgaaagaaaacgaaagaaaaaaggaaagaagagagaaggagagaacagaaggggcaggtgcccctgggaaggggagaagatcaagacgcgcctggaaagcggactctgaacctcaagaccctgttcacagccaagcgcgcgaccccgggaggcgtcaactccccaagtgcctccctcaactcatttcccccaagtttcggtgcctgtcctggcgcggacaggacccagaaacaaaccacagcccggggcgcagccgccagggcgaaggttagttccggtcccttcccctcccctccccacttggacgcgcttgcggaggattgcgttgacgagactcttatttattgtcaccaacctgtggtggaatttgcagttgcacattggatctgattcgccccgccccgaatgacgcctgcccggaggcagtgaaagtacagccgcgccgccccaagtcagcctggacacataaatcagcacgcggccggagaaccccgcaatctctgcgcccacaaaatacaccgacgatgcccgatctactttaagggctgaaacccacgggcctgagagactataagagcgttccctaccgccatggaacaacggggacagaacgccccggccgcttcgggggcccggaaaaggcacggcccaggacccagggaggcgcggggagccaggcctgggccccgggtccccaagacccttgtgctcgttgtcgccgcggtcctgctgttggtgagtccccgccgcggtccctggctggggaagagcgtgcctggcgcctggagagggcagggagagagggggacacggcgggggtgcgtggcccgggtcgcctgcggccgggcatgtccgggcaagacgcaccagtcgtcggagtcgggggaagagatgggtccccgggttgggcaggagcgacctgggccgccagggaacagagcgcgcgctccacttggtgtaaattcccgaatccagtgggggagggcgacaaggagggaattcccgagtaagctgcgtgaagccacggagaggtcgtcggactttgattttgttttctttccttactttctgtttctttctctttttctctttcttcctttctttccctcccttccttcctcgctcagttcctgccttaatttctttttcttttgcgccttcgaatgaattcctaaaggcgctcattgcagatcgctttgaacctgcggccggcgaagaactcccctgtggtcgctgcggcccagtggttccgttccgtgcgcgggagtcgtcgcgggcgcagctggagaggccccttcccctccttagcggctgcgcccctacgcgtgcggggccgctcatcgccaatgccattgtttggggttccttgggaaaacgagatttaggagaagggagttgtggcacttggggcctgacctgcttgataatagcagctgcattttggcctgggaagagcctttcttgccacctcttggcaagtatccgtgataatggggaagggacaaagagtcggctttgtagggaacagcatggtgtgctcagcgcctggaactgcgcttggggccaggagaggttctgaatcatcacattttacagaggaagagaccgcagctcagagtggggaagtgtgtgggcctagacctaactcaagactgtacagaggggctggaagggagaggaggaacagtgaaaggaaggtcaagagaatgctggtgttgacctagaagaatgtcagtgtgaagcattggagtttcatgggatattgttacacacctcatgttttcactgtttccgccccacaccacagtatgtccttggtctcacctctgagtggagggaggacctaactgtcctagtgaggagagtgtacaggggcctctgcctccccctcctgctgtggtttctgtgggcctaggtccccagggcatcttgcctctctttgggtggtggatctttggtctctggctgcttttaaagatttttcttagcactggtttgcagtgatttggtttgtttgctctgttgtggggttttttttttatctctataaagaattttttggatttttggctttagactttcatgttctttctacttggaagatttttctgtaaagaaagccacaactgggttgtgttgaatttcttggatttggggttttagagtttatgttctccttggagacttttctgtaaagaaagccacaacagccgggtctggtagctcatgcctgtaatcccagcactttgggaggccgaggcgggcagatcacatgaggtcagggattcgagaccagcctgaccaacatggtgaaaccccgtctctactaaaaatacaaaattagctgggtgtggtggtgggcacctgcaatcccagctacttgggaggttgaggcaggagaatcacttgaacctgggaggcagaagttgcagtgagcagagatggcgccactgcactccagcctgggagacaagagcaagactccaactcaaaaaaaagaaagaaagaaagccacaacagagttatgttgaatttcttggatttggggttttagagtttatgtttttgtttgtttgtttgtttgttttgagatggagtcttgcctctgtcgcctaggctggagtgcagtggtgggatctcagctcactgcaacctctgcctcctgggttcacgccattctcctgcctcagcatcccgtgtagctgggactacaggcatgcaccaccacgcccagcgaactttttgtatttttagtagagacggggtttcaccgtgttagccaggatggtctggctcgtgatctgcccgcctcagcctcccaaaatgctgggattacaggggtgagccaccacgcccagccgagtttatgttctacttggaagattttcagccattatttcttcaaatactctgtctcttctggtgactgagatcttattatatttacgttagaatgttagattttgtatcagagctaacttagtatctgttcttttttttcccccatcattttctatgtttcactttggacatttccctgtgagggctcttcaagttcattgatctgcttctgcagaatctaacctgctgttaatctcatctactgtatatcagatatatattttttgaactttagaagttctcttttggcatttttaatatcttccatctatttcctggtcatctttgtgtttttcttttttgagacagggtcttactctgtcacccaggctggagtgcagtggcacagtcagagt

SEQ ID NO: 1883291 - DNA, 4001 bp, Homo sapiens
ccagtttttggtgagaacccagagtccagctttgaggttcacctccttgacatctaagctgcagcttcctggacgtcggcctaggagacggggatggtggcatccctcgtgttttctgagactgcaccatgaacaggacgggcctcacatccagggacacagcacaggaacagcgagagcggcccctaaaaccacggtgtgtgtggcatgttgcagttctgttcattttccatgtatgatttcatccttgtcttattatctaagcaagtatttccagccagtgaggccgcgtagataaaccctacagcctgctgcatgaaccgagctcagcgtcctccctgtggctcggtgtccactctgtgctcatctggtggggctcaccaccctcacatgcggaacgcgtccctgtctggccccacgtggcttccagctcctggctgtgcggcctctgcagctgagtaacagaactgtctgccccccgccctctggccatggaagaggccatgccatttctcataggcagcgtggctgtgtcccatggttagccaagtccttctggctccgccagtgctgtggatcctctgagtttgaggtccttctcccatcgatacctgacgtgggagctggacctgagccctcctgcaggaccctgtcctgacagcaccacgtcccacccttccatggaagctgctgtctcctccatgagaggcctctgcctgggcatcatgctcgagctccggggcctaggaggcatggaaaagctcatctctgctgcaagttctgctctcaacagcaactgatgggctttgagatttagaacactctccaacctccactttttttttttcttaatgaagttttttttgaagatgatcagctcaagataggtctgaggttcatgctggacatcaagtgtgtgacacgaacactttcactctttttcttgctgtcacaatcttgatggtcccgatcctgcctgtgcatgggcgtccctgcctgatggactctgggagagggtagaggataaggaagggcccaacataagcttcacgttttacaaataaacaagttggagatgattccaggttgggatgagtcctgcagaggatgtcaggaggcctctgatgtttgaaggaggctctgggcttgttctcgccacagcacccctccccttcccacggcagcagagccacggccggctccatttcctcatgcctccaggaagggctgtgaccacagcagaggcagcgcgggaggccccctcaacacaacacgacatttgccgcaagggttctgccaaggtcccagggaggggggaggaaggacagaagttctaggagagtagtatgcacggccattaaaataatctttggtaattaagtcaggtgtcgtgatgaattactaacaactaggcattctgttcttaaactcttttccaacctgtgtgtgctgggggaaaagggtgcctgtagctgggaagggaaagggaagcagaagctctataagttcctgagccttgctccatacctgggacgggactcggcattttctgtgagttcccgagctctgctccatacctgggaccggactcggaattttctgtgagttcccgagctctgctccatacctgggaccggactcagcattttctgtgagttcccgagctctgctccacacctgggaccggactcggaattttctgtgagttcccgagctctgctccacacctgggaccggactcggaattttctgtgagttcccgagctctgctccatacctgggaccggactcagcattttctgtgagttcccgagctctgctccacacctgggaccggactcggaattttctgtgagttccggagctctgcttcatacctgggactggactcggaagtttctgtgaattctcgagctctgctccatacccgggactggactcagtattttatgtgagttcccgagctctgctccatacctgggaccggactcggtattttctgtaggttcccgagccctgctccatacccgggactggactcagcattttacgtgagtcctctatttagtcatcagatcgtcctatgagaattgtgatatgaccccagttacgggtaacgggcagtgaggtcgaagggaagggctcttgccccgcctggggaccatggagcgaccttgcccagagcttggctcttcccctcgccccaggaggcccacgcctgacggcgccgctggagtcgattctttcctgctgttcacagcgcttaggtactttccaaaacgtctggctgtaactcgcctccttctgccgtgcttttggtagattcagtaaaacatgcacgtccttggagattccatcgccgcaggagtcattccttagctgtcggctgcaggctgtgaggatgggccttcgtaaggacacagatggttggatgttcctggactccacctcgcaggggagcgagcgtccttggaagaggaaaaagccaatgaataaaaaggaggaaggggtggggcgcggtggctcacgcctgtaatcccagcactttggaaggccgaggcgggtggatcacaaggtcaggagctcaagaccatcctggctaacacggtgaaaccccgtctctactaaaaatacaaaaaactagccgggcgtggtggcgggcgcctgtagtcccagctactcgggaggctgaggcaggagaatcgtttgaacccgggaggcggagcttgcacagagccgagatcgcgccaccgcactccagcctgggcgacagagcgagactccgtctcaaaaacaaaaaaaaaaaaaaaaaaaaaaaaaggaaggagaagaggagtgttttcctccaagatttcccatgggtgggaaggagcttcgacctggaaataagatctcagcttcgcagaccctgctgggctgtgcgctgcgctggtcttatccattaggtttaatgcgttatttattttatttttaaaggtgtaactctctcttaacggagaatcagtagaaagtcctccatccatgcctctgaacacactcctaactccccaacactcaggagcccgcaggaagccctaaggcccagggtctccttgggaggcacgggtgcttcctcccaggcattttctcctctggtctctggggttttgcttctcataggggctaaattaatcctgcatccggtgctcgtccagccctgcgctgcgctgaggagaaggcgggactcccgggaggcaccctgcaggtctggatggcctgcctctggccagagcctgggaggtggagggagatgggattttgaggccattcacctccctcgtaaatggagccgctgatgcactctcacagaagggaagaggtaatttttccatttgtgaggagagtgcagaccctggaaggctgcttagccactcagccttttccagacagctcatttctcagactgcaaaggtcagcagcagaattgggggagaggggttttactgcattcttcagggcagaggccattttaatattcatgaaattgcaagtgaagccactggaatgttccatgggagcaggccagcgtgtccttgaaaggaactgagagctgacagcttttgtgtccacgctggactcttcctgtaggagccctgagcatgggctatggagacacaggacaccggccaccgtggccccacacccagggtggcaggtgcagctggccctgatgatgaagacgacacagatgtctcactccggaagcctttgaacctggtggaacgaggaggaatttcaagtgcccaggtttcacgtatgcagaaagttgtacatgagattttttaaaaaatgacaacccacatgtaccaaaaacaaacattaaacactttcagcaaaagcaggagatgtaaggaaaacggcttcagtgatgattcatgttgttaacaacagagggtctgaagccaactttgttttaaaagaagaaagtaggatgagaaaaaagatgagtacaattgttctta

SEQ ID NO: 1883292 - DNA, 4001 bp, Homo sapiens
ctgcaatgggaaggagaagagatcggagtgagataatcctggattctaaccttagtcttgcggctgagtggtgcttgaggggacagttggacagaggaaggcatcctaggcagagggaagaacacaaatggagccatggaacacaaaaccatgtcaggagatgagtgaacttcaggaagggggatgtgtctggaaagcagggcgtgagaggtgtctggaggcaggagacgggggctgcaactgatattaaggagacaagattttatctgggaggctgtgtggggtatgaagagagcactgttgtgcagtcagacagatctgtgttggaggtctagctctgccactttccagctgtgaaactgggataacaaagcttcctttgtagagttactttgtgatttagagctattgcttgcaaagactgtggcaccatgcctggctcaggcacattttttcataaacagttgcttctttgaggaactgagtggccactgaacgtatccattgtggtgttgaaagatcttcccaccaatgcatggagcatagatttacagaaaacacctttaaaaaggcaaactgttcaaggtcattgcactttactgggtgaggaagagcctggggcagagcagtgaatgggggcacagttggtacagggaggaggggcagatgcaagaggtatttgttaagtcaaaggtacaggtcctggcattgattgtacatggcaaggagagcattggcgaccggcggggagtggggcacgggttaggagtagtaagagttcaggatgattgccaggttttgcgtgaataatgggtccatagtgcagcccccaacaaagatgtagaatgtgaccaggtgtgatggcttgtgcctataaactcagcactttggaaggctgaggcaggaggattgcttcatcccaggagtttaagaccagcctgggcaacatagtgaaaccccatctctaccaaaaacaaattagacagacatggtggtgcatgcctgtagtcccagctacttgggagactgaggtgggaggatcacttgagcccaggaggcagaggttgcagtgagccattgcactccagcctgggtgacagggtgatacccagtcacaaaaaaaaaaaaaaaaaaaaaaaaaaaagaatatagaatgtcagaaaagaagaaacagttgttgtagggagaggttgattctcaggtagaagctaagccaaagccagaaccagaaggaaaaaaatataattaagttcctgggttatttacctacattcagttgaaaattcatgttttttttttttgttttttgttttttgttttttaatatgcagaggcaaaacatcataatgaaagaacactgaacttggattcccatgaccaggcatgcaaactttgtctacctcctaactactgtgtaatttggggaaaattgctaagcccgtctgagcttcagttttctagtctgtaaagtagggacaatgacaatcagtcctgccgcccccatcagctgaagcacagtgtgcaatgtgcaggacttctcaccaatcacaggcttgtcctcagggtctcggtccctagtgcacagaccattcaaacatggggcccatcctgtggtacctctcaatgctgtgattctgagggtcatggatgctcctctgttctgagaaagcgggtgcggagttccacattctcctggatgccttccatgacagggctcgctgagagactcgggagcggggacagcacgctcctttgtgggaacacacaacactccctgccatctgcctgaggcagggagaaaagaagacaatgttctgtcctcagcaggaactggcgctatcagaaagagatggaacaagaagatctgttccatttcaagcccaagagagtgaccactgatagctgtcctcaggattcattgaggactggatgagagggaatgtggaagaaaattttagtaggaaggaaataaatatggaggcttggggggagagaaggaagggagggagggagggagggagacatggctggaggaggagaggaaggaaggagtgggaggaagggaggcaggaaaggaaggagaagacagaaagaagtctaccatttctcgagccgatccgatgtattaggtaaggtgccaagctttttcatgccgtctgtcatttaattcccacaacaactcttattttacaggtaagtaaaattatgaagctgaggccaagaattgtcaagtgccttacccgaggttaaatcaattttctgagccacaacctgtcttttccactaaaacatgccacttccccttttgatcctctatgtactcagagtgtaagtgaagtcctggaggaactacaaagttagacaccatgaagaggggcatagcatcccattggaaacatgggatacctcatgctcttctgggccagtctcccctgttggtctgctgtactcagttctgggctatgccagagaggagagaggagccctgacaacctgacagccagagcggggcagggagggtggtgatgggtttccaaatcaagtcctatgactgaagaggctgggagcacttggctgtcgaagtgaccaccagtaaggacaggcagctgtcttgagccaggtgctgtcctgaagtggggatggaagtgatcgcagttccagaggcctgagctcagagagctgcaattttgtttctcatggagctgggcaaccttcttccagaccaatagtttggttcatttcctcttcttcttcttcttttttttttttttttttttttgagatggagttttgatcttgtcgccccggctggagtgtgatggcatgatcttggctcactgcagcctccacctcctgggatcaagcaattatccagcctcagcctcccaagtagctgggattacaggcacccaacaccacacctggctaagttttgtatttttagtagagacagtgtttcaccatgttggccagctggtattgaactcctgacctcaggtgatccgccagcctcggcctcccaaagtgctgggattacaggagtgagccaccgcacccagccaaagactgctgctgcttttttttgaagtgttatttaaaaatttgtacagagtttgcttagagagactgagagctctgaggggcattcgatgaccaagaggccctggtttcattatgccgagacctagtgagtctcttctggactcaaatgtgtgcaaaactaagtcaaggcagtctggaaaccagccatagttattcacgcttgtccctcactgtgagcacattattaaagctctttcttcagtcacatggggtaaaatcaaaactcgaggagttctgattagtaaattgacctccatctccttgtgttcttagtgatcaaaacctagattgtctccaaagcaagtactagtggcccggccttaatccagttgcacctgctcatgctctagaattcagcccagctggcatctcttcgaggcaccattcttggctctcttggtcaggtgaggttctccttgttgcttccataacaccatccctcaatgtgttccttccttgtattgcaatgatgtttagatgtgcctgcctccctcacaagacttggagatacatattattaccaccattgccctcagttaagaggcaagactgttggggctcagagaaattaagtcacttctctaaggtcacagagctagtgtgtaatagagctaagatttaaatctatctcacctcggtttcactccaaagcttgtaattttttttcatttcagactgtttctacaacaaatagatttctaaagtgcctctacagaaaatgtgttttctctaaaatgaacaccaaactggacacttatgagtgcccccaagggtcttgaggtgatggaatagtctgcctttcaaagagaatgatcttacaatttacaagtttgcctctcaattaactgagcactgtggctctttatttaatgttatttctacataatctaattttggct

SEQ ID NO: 1883293 - DNA, 4001 bp, Homo sapiens
ctcccataattcccatatgctgtgggagggaccttgtgggagataattgaatcatgagggcagtttcccccatactgctctcatagtagtgaataagtctgacaagatctgatggttttataagggatttcccctttcgcttgtctttctctcttgcctgccaccatgtaaggcatgactttgctcctcctcaccttctgccatgattgtgaggcctccctagtcatgtggaactgtgagttcattaaacctctttttcttataaattacccagtctggggtatgtcttcatcagcagcatgaaaacagactaatacaccctccaacaggaggggaaggcaggcattacttggtagatggggaactgactacaagcaaggaaatggttggtgctgcctgggcccatgcatcagtggactggaaggcaggaaggagagaggcttttatgggggcaggggaggcaggtcaccacgaagaaccactcaaatgttctcaccctagcccaaggtcaacaactcatttcctagttcctagaatccatattcagtatattcttgtaagtgaatgaaagaataaatgcatgcaggaaaggctgccttgaataaaagaggtagaacagtggaagtacaagaattcgaaaagcacagccatccaagggccgaaaagtattgtagctctagtaggagaagtttaatagggagagatggcaacgctagccccacaatcgtgcccatatcaacccatgttcataggagaaactgaccagcagttgaaattccaattctgactggggagcttaaaaaaatattgatcttagcctcagtgactgatttaattggtctggggtgtggactggactttggacattttaatagttctccagtgatcctaatgaacagatagatagatttgggaatcatcagttcaggaagaaaataagactaattgaaactagggtttgtactgggaagccatggtagggtgttttattgagtgacttataataaacccattttctcaagaaaattataggtctgggaatgtaggtttgttctgaaaggaaatgagaagtgtcagcaaataaatgggttccacgtgtacagctaagttcccgtgaaatcctctaaggtcagtcacatccttatataatcctaggctggagtcacaaggtcaagtctcagccctgtaaggagccataagactgcaagttagcaaatgttaactcttattgcacacctactctctcagactcagagagggccaaatccactcacactatatatattaatgttcccagaaacccttaaaggtgggaactccagagtagacatactagaggcagtggagttccagtttagatgtcacttccttagagggacttccctgaagtccagagaagtcttgcttcagaattctcactgctttccacttgctgagagcaatctgctaatgacttctaattaccatgttgttgccatcctcattggagtccatgagtggagaaagccgtgtgttttcttcaacctcatcttggtatctctgctgcctgacgtaaggcttggcttcgagtagtggctctctaagcctatataaagaggaaggctacaaataaatgaattaatgaatagatgaatgattatatagttccatgcactggcacgaataggaagagaagctattcggttggtatggaacatattcctggtgtcacaaatgacactacaggggcagccacagggtaaaactaagccgaatgagtttgtatccaatgtgccattctttcccatgagtccctgacagccccatcttccagtcagcactacagggccttgtgggtaaagaaatgcactttgctgccccaggggagtgagtctgaggctcttcaggcagcagctggatttgaaggctttcttttctgctctgggattaggggaccaaaggaccctggaccacagactttaaggaggccctcactctcaggtgctcaccctgccctcgcatgcccctgagggccagcgcctcctttaagtcctgcctcacaggcacctgtcctttctcaccctagtccaggccttgctatgacttcataaagagcacacaggacttggagccaaatgaacctggttgcagtgagaggtttcagcccccatcagccaaatgctcttgagcaggcctcatctggaaaataatgactgtgtctcaaaggatgacgaagaggaataaatgagcaatgtgtttcaatgagacagtatcggtgagtgagtctaatgctatttgaactggtttatcagttccatcgcatgcagtatccctctcgccccagccgttcaagaggagcagccactacgatgggtggcaggtgagggagggtctgggagagtcgctgttcctagtggtggctgcgctggtcaccgtagcagtgctccatgtccagccagcacttctgactgaaagaccaaccaccttcctttctcttacggcattctgtagttctgtctgtcgcttgccaggaacctcctgtcccacccactttgccaggtctctggtttctaatgtaggctccatcctttctccatttagcagcagaagtggggcacggcttggcggcaggggtgggtgctgtggcacttccagttccacagtcagctgtggacctgagctttgcaaactgccaggggatagttcattcaccagcattgagtggaaccatgactggccactcatccggtcaccattgtccaactgccggcccaggccggtgctgcaagatcatcatcaccccagaacaagaggcatttccctctctaacacctcccatcatcagtggtgtgcagcagctccacactgctgcccattttcccctcttagagtttccttgctgcccttcatatatttggtgatttttgcagatagtcccaatttcaaatactctctccctctggagcaaagcttggcgagctcctcactcaacccatcttctccttcattttgttcatgctgtcccttagcatggagtggccctagctcccatctgccaaagctagcagatgctgtcggtgtcccattcacatcccctcgggctacctgcccgcagtcctcagctctctgtgtctcttggcctgagaacattctctggccaagggaatgtcagaaagttcctgacaggaagcactgtcaattctatgtggcactggaatgagcagatatacaccgcagcttcctggcccctcagcagggttgagcccagctgcaaacaaacaggggtggcttgcacaacaatggaccctttctgggccttgctgcctgtcctgactcatattctcactctctcccttgtgcttgatgagaacatctgcgcatctctcaggcaaactccttttgcccagcctttgtctgcctctggaggcattgaggctggaacacccaggatgctcatcctcctggacccatcgcagcctcagctcctccatggcctcatctacgggcctttcccacatcctgtgcctcctccttacaccagcatgtcactgagacagcgcagtctaaactgtgcttacatcctgcttcgggttaccttgatgttattctccagctgggaggggcccacaacttctgctcctttggaatcccccagcactggcactggcagtgtatacatggggcctgggaacaccttgattgtaggtattcatggaggcacaatgccctgcttaggagaaaggcaatggtgtatcttttcatctgaataggacttgacagtttaaaagcattattacatttacttgctaccgcctttgattccaacaaagcacaagtttgttacttttctcatgtgaaaagtgaggtggatgaagctggaggggtggtgagttcctcatggtcacatagctaagtgtttagaagcatgtcgtgagctcttcccctccaaaccttgcctcattccacggtgctggctgctcccatctcatatgcagatggttacactgggtcctcacgatgac

SEQ ID NO: 1883294 - DNA, 4001 bp, Homo sapiens
gaccttcaaattatgaaatcgcatgtatctctcattgtcttctaaacagattttagtataatggaattgatcagaaaaggaatatacattttaaaaatgtaatgcttaccaccaaattgtccatttgaaaggccatcagcaactttaagcagcagtataatatcactgtttttcatcttcacaaaatttgtggacagaaaacaatattttatacctcttttaaattccttctcttaccaagaacacaaaatattttttcctatgagcataggtcacttgcagatctgaaagaactgctttgctcaatgttaaattagagtcttttttgtttcaggctgatttgaaataattctctgtaaaatgaaaatccatatttaatctaatatgtatacacatatggtaaatattttatgttaccttatgttttgttattttttgttattatagggtgatttaattttattttgctagatcaaccttcagaaggcttgcttgtgagcttcttagacaggtttttgtcaacacaaaaatgcttctgtataaataaggcatttgtgttttcttctgatgtttctctcatcttacatatttaaaattttcagtctatattgtatgaggaacttatttttgtggcataaaaatctagctagtttcctccaaaaagcaggcctttcattaatgaaaataattcatcttttcctactagtacaaagtatcaccattatcaagttctgaattcttacatatatttgagtgtccctggattttctattctcttgtattcatttatctatcttttcagctgttagcaaactatttgtggaaatcaatagcacatttgatatctagaaaggtaagacttttttaaccgttacaaaaattttcttaatgtcatcacaatagtgaaagcatgtgtaattcaaaaacgttaaaaattttgatagctttatttggtttatgtaaaattgataaagagctcacatcttgagaaaaatgagtcttcttattcaagaacatgaaccatcttcccacttcaaagtgtccttctaagctccctcagtaaagaacatatttatgtaggcattcattaatataaaataaatattggattttagccaaagaatttttagcccagaaggtgatatattatgggaattatttctttcattacgttcctttctataatgtatctaatattatcttttaaaatgtgtacattaaaaataaaacacagtatatacttaattttgttataccgctttaaaattctctctgaagtgctctgtaagaggaactgtgggtggagaaaccagctaaagttttgggtttcttttgctgctcataaagatgacttgggccctccgcctccaaggcgtccacatctcaggcgctgcggagtctgccagggaagaaagcccagcgccctggggaccaggacggcccgccccacacactccattctttccaagcctcccctcgcccccactccccaagcccccagctctgaagggggtgcttctccccacctgcccacctcctccagtagcccccagcccacagcccgcagttcccgacacatgttcttcttgtaggtttcagactggccttttctcttgagcaggaggctccgctgcagcttccacgcgttcccctggacgcagctttgtggatattccagatcctcatctggggtctggtaccaggggtcagaaaagatgcggttattccaggagctcaggggcacctggcccttctggctctccacagccaagatcttcttcatggcccggctatcggcttcagagacgccacaactagccctcgcccttcccgccgcccagcccccaccctgaccagcaccataaagcaagacggtctggcccagacctcagacagggaccctccagcttctctgagagggacgtctccaaactctcggagaagaaatatacggagcagagccattgggccccagcgcgcactggcacctcggaaggtaatggccccgcgcgtggccacaaactgcgcgtggccagaaaccgccctgagtcgcgctctcgtgggcacagcatgcaggtggcagctgcagctgaggcgccgaccaccaaactgagctcatggtgcggtctgccccaggccccaggtgactgcgcagccccagtccactgctcctgctcgacccgcgcccaaagttgggggtccctggagctgggcactctgcagccaccaggatgggactgggcactggtttccaccctcctgcagctgcggttgcaactgcgtgacttaggcgccacggcagcgtctggccctgtggaccgcgatagtagtcacggaaatagcccgggttgccccagttgctgaccccgccatattcaggtggcggctgcagctgaacccatggcagaggctggcaggaatggacccagatggcctgagggtcgccgagtgctcagcgccccaacctagggtccgctctttcttggccccccgcccatattgctaggtcgcgggtgctgggctttgagcagccacaggaatggggctgaacgccagttctagccctgctgcagctgcgaggccgaccgcctgaattaggcgcctagaaggcatctggccctgcggtccctgcagctggtgatgcctgcaaggtcaggggttgccagctttgcggctgtccgccatgtgcaggtggctgctgcaaatgaccccacggcggtgtctggcatggctggtcccagatggcctgaaggaggccgagtgctcagccctcccacaataagttcggctctttcttggcccgcgccccaagcatggggtcacgagcgttgggcactgctcagccgctgggttggggctcagcagtcggttcccgccctcctgcagctattgggccgaccgcctgacaggcagggtcgggggttgccaccgctgctgccgcagtacctgctcttctttggccggtgcagaagcgcggactcgcaggccgtgggcattgtgcagccatggggtttggctgagcgccgattcccgccctcctgcggctacggggctgactgcctaaccgaggggtcatggcagcgtatggtcctggagtctatgctgctggtggctgctggccgagttgggggttgccactcccgcggccccgtgccatgtgcaggtggtaactgcacataagttcagggcggaggctggcagggctagcccagacgtcctgagtttcgccaagttcactgccctcacaccgtgggatccgctcttccttggccccagtccagagctctgggcccagggcgctggactctttgcagccatcgcgatggggatgagggccggttcccgccctcctgcagctgcggaacagactacccaaatcaggcacagtggcggtgtctgaccttggggaccgcgctgctagtggggcgggcaaggtcgggatttgccacaggtgctgccgtggggcatgtgcagatggcagcaatagctgagcccacggtggaagctggcagggctggtcccagacctcctgagagtcgccaagtgcaccaccctcccgccctagggctcgctcttccatagctcgcgccctgagcgcgtggtcgcgggcgctgggtactatgcagccgccaggaaggggctgaacggccaccctgctgcagctgtgctgcgggcttcggcgcgtggctgcctggccgcggggtccccgtgctggtggtggcagcagggtcggcagttgcctccactactacagcgcactatgtgcaggtgacagctacagctgagcctaaggcaaaggatgacagggctggccccagagggcctcagggtctccgagtgcaccgccctcccacccaagggtccactttttcttgattcgcgcccagagcacggagtcgtgggcgctgggcactctgaagccccggggttgggctgagagcaggttccctcactcctgcagatgcgggagtgggggccgcctaaactgggcgtcttcacag

SEQ ID NO: 1883295 - DNA, 4001 bp, Homo sapiens
ggccttccttatggctctacgctataccttttagcaaatagaaatgttggtattcactctgtgtatttaatttctcctggacacattaaaaaatacataagtaaatataccttcgaaccaaaatggaaagcacgaggcaaccctggacacctcactgctatttaacttaaccctccctaggcagatcatatgagtccgattgtaaaagtattaatgtggacatctttccactctggatcaagtccatttcaggttatcagggatggttaagctcctagctattctagcagatttcttatgtcttaatgcatgaaattaataatagttcctgggatattccacacttatctattacatgtttccacatatttaaaatacagaaggaaaacatgaacaccaataaagaaactatgagtaacagaaatccagaacacagtgaagaaagaaagaaaaaaatatatactgctgcagtcagcttttaggaaaactgtttccatcattctgaaaatttatatttattagaaataaatctaattttggcagcacatcatggttaggagccagggaaattgtcattgggaccttagtattgtatttcacaagaaagagagctctgtgaggaagcctgggctatctgcaaaccttcgactcggaaatccctgcataataagaaaggtattggctaaatttgagcagctcacgcagtatctagaggaaacattatgaagtgggatagtgtggtgtctgagatgcagttataggtatacagacatgactcaaggcgtggattaggaaggccaactttggaggggagggctggctcgctcatttctcttctccctgtcaaatgctgaaaggctggttccagcctttgagctcctgcactttgagagttttcagctgggttctcaggctgcgttcacccgtcgacttgctccaggccaaaccagattttgaaaaggaaggcaacttctttttcgcggcaaacccttaaacccacgcaccttctcaaaactctgcccttctcaacccctgcgctagagtaggcagggcagaaggtgctgaggagaggctcagaaggggcggtggggacgatcccctttcgaactgcatttgtagctgccaaggagtagccaacaagcaccagatttatgtgcactttgaaagaagcaccttcaccattggctttttaagcggcgctgtcgctagggagcggctggtagggcgagcagcctcggggagcagcccgggctgtttgttccgtcaccggggaaaggaggtacacacagtcgcgcgcgcacggacacacacacacacgcacgcacgcacacacaccggtggcgagttcgagccccgcggcccctgtccgcccgcgtgcgcccctcgacacagctcgcctcccgccccctgattcctgctgctgccgcccagaggagaaaggaacctctgcctcgaatttccccactgcgccgggcgctgcggagagcggcgagggtgggcgcgaggcggagaacgcgatgaatgagttctcccctcgcctcggagttgtctgagttggcggcgctgcgcccaggcttccggctctcagcgccccacgcgcgcgtggctccccgggctgccacccacgcccgcggccggggccgagccagccacgcagggcagccgaggctccggagctcctgtcccggccccagtccgggtaaaaggagggttgtccccagcggaggcgcacagccgcgcgttctccctgcactctcttcgcggtcccatctgttccccatggcgtctcatccgcaaacccggatccaggcttacctggagaagaacaagatcggtcccctgtttgaggtaaggcgctgtggaggagggcagtcccgttgtctttaggggaaggggtgcagtaatgaaaacagaacactcccaatcccacccctcccagggaaggagggctagagaaccaacgcgcgggagagggcgccctgggattcactggcattcgctctgtcccggccaggtgtcctggaacgcggccgggcgggcacttagccagttacctgaacgcggacaggtgagctcgggagggcccagcctcagcctggcaggggaagttttggccctctgactgtcctgcacctctcagctacatgttcaggacccgggcaggctgaggcaggcgacgcatacggatgcacacactcagactgtgttgcacacgcacactttcttttttgaattcacgctatcttgagtgttcgtgttggattttcttttttcttttcttttctttccttctttttttttttttttttttttttttttttaatgagggcggtaatagaacccgaaaaggtggaggaggtgcttagcagttaatacaattaactggaagacagctgaactggtgaggagtaggcttcagtcggtgcgggcgtgatgaatgaaattggcaaactgagagactgccatttggtcactggacgaaaggagagtcctttgcactgcagaccccacatgtgttagcaggagaaagggacggagaaaggttctgaaaagcacacacgtatttgtggaagaagactatagctctgagctggttttgtttttttttctctctctcgccattaaagaatttaagacaaaaatacagtagaaggaagagcgcgaggacacgagaaaatgagaacaagagattgaagcctggcaccagcaaagcgtcccgcgggttgccagggtgctgagcaggggtggggcgtgcggaccgtagtcagaagtggaggcccttgcggagggactcccttggtcccatccagttcagggggcactgaccggcggcgagagttcgcgggagggtcgaggtgctcccgccttgcccccgccttgcccccgccttgcccccgccccccacgtctcccagaagcagttgtagctgttcttaacagcttggtttggggtgagggcttggtatggggaggaggttacgtgtcagtgtctgagagaggcagaatcgcggcaagtggaaggggctgcactggagatcgcggaaaacctagcaaagactgaagagaagcaagtgagaactgtggagaacaaaaaaataatgcgagttaatgaccctgcaaaaaaagggcgcggaggacaaaggtgtggtccaataggtcttttgggaggacgggtttcacataacaagatttgcaagatctcctaagtttttttgcccaactttaacgttgatctgtcttagacgataagaccattgtttcaattgaagctcgcattgtggggtgcagagtcctacaattgctttgattcttttttctgccaaaaatgttaacaaaggcaatccatgcaagagcgaaataaaattgatggaactaccagatttcttttctttgcctttagtttaatgattattgattatacataatcctatataatttttttaaaggcagaagcctaaaaccttctgcaacgcagtgtattaattgcatcgaaagaatcataaaatacatacatttagagtgtgtgttttctctctactctcctggagtataaagtacaattagcctgggagaataaatgaattgtttttaataaatactgttttaatttgttatcttaaaatccccaagattttaataataataaaattaggaatatatgtaaactttctgcagaattagaaaataaactcaaatggatatttatgaagtgccccctaacccccaccttttgatgctcaccagcaagttatgcgctgaagaattttaagtgatagcaacgtgtctcataaaagctttaggtcccctcaccaaaaaacaagcaccaccatgcttcgtattttattgaatacatatgacatacactggcattagcttagattgcagtgatgagtagtgcattttttaaggtttgatgtccactttaaataattgaagggagaaaaatggataataaattctcttttaataaaagctggatgtaacacagttccttatgcaaca

SEQ ID NO: 1883296 - DNA, 4001 bp, Homo sapiens
atttcaaaaatgcaattgaatcataaaagataaattgcttaggtcacagaattcagtgaagctttcgaagaggtcatgtgtaaatgagacatgaaggaacagcaggagcctgctgtgtctatgaaaggacaggagaaaacattccagacagagacagcagtacacgcaaaggcaggggagagcatgggaagagagcatgtcatggcatgtacagtcgtccctcagtcttcacaggggactggttccagggcccccgcggataccgaaatccacccatgctcaggtgccttatataagatgatgcaatattctggtaaagaatatcctaaatcctcccacagacctccaatcatttctagattacttataataacacaacataactgctaaataaatagttggctgtactatattatttagggaataatcatgggggggtagtctgtagatgttcagtacaaatgcagtttttttcttgaatatcttttactccaggttggttgaatccacagtgtatgcggcacccacagatatggagaggcaactgtatagtgtgtgtagtcaataatgctggtacagagattatggcctgtagatgcagggctccagtctgttggggtaggcaaggaccaaatcagaaagggctatttcatcatgctagctttccatgaagggaaagggaacccgctgaaaaactttctgccagtagaagcatcattctagtataaacgttgaaaggtgatctgaagggaaatgaaactagtgattgcccagaaggaggaaaagaataatccctgactaaatttataaagcccttactccccgctaagcagtttccttcaatcatctcatttaatcactaaaatgagcaatagttatccccactttatagatgatatccacagggcttgctccctcacctcctgcaggtcttcaggcaagtataagtgcctcgcactttcctattccccttgctttatttttctcctggttgctcaactcaatttaacatctgtttcgcttttgaaatcttgtttaaagattctctcccacactagaatgataagtccctaggaataatttaatttgtatttcagttctgtatccccagtgcccaggacacagtcaaccctcagtaagtacataaatgaatacatttttaaaaatgaggaaatcgggtcccatagagattaagtaacttgtccttgatcgtacaagtaataagtggcagaattctgatttaacaacccacattcttaaaccactaagtggttacaccagagttgtaatattgtaggcaagaggcaagtaccctcggactgcggtagtggggaagcggggtgataggtctgcctcgaattggtgatgactggatgtggaagggcgctgaaagggctcaatctagcatgactttggtttctacatttggcttatgggtaaacaggagagcaattcttcaggaaaaagaatacaaaggactccaggtttgggcaaaacgataagaggaggacgtgtcttaatccacgatcctttttaactcttttactatttcccttagattactaaaacatgttgttaatttgaatatatgtgaagccagtaaacccaaactgatcccttcgtcttcagtctgaggccagtgggggataggggtggggatggggacggggatgggggtggggacggagaggcagaccagaatagggtcagctctttttttttttttaagttagtccaaacttaccaagagtagaaataagtccccagcagtgcttaactctgaggtaatttttaaggcagatgctaaaactggagaatacaccgtacccttgtggagtcaggtagtattcgtagttttagattatcctgacggtgttagtcacttgtagaagtgacaatgtgcaacaggccactgacacccaatccctggatggccaggagggcaggagggcacccggccgcggcctcaggctgctgagcaggcgcaggaagctcgcgcctcaaacgactcccaaacccgggcccggcgcgaagcagggaagcgccgctcacattcctgcacgctcgcccggccgcgggccagcggcctccggtccccaggtggcgctgtgggctcgcggaggcggccgcggcaccagggagcgtcgtctccctggtgcgcatgctcgcccccgctgcgggctagctgttgtgtttttttttttcccccgggcggcccggcggctgcgtactggctgtgggatgggaagtgaagccccagcgagcggctgcagcggggccgtgaggagcagccagcgggaggcggcggcgagtcggtgagcagctgggaagagcagaaccggggcggagcacctgcaggcgcgggcggcggccccaccatggcgattcgcaagaaaagcaccaagagccccccagtgctgagccacgaattcgtcctgcagaatcacgcggacatcgtctcctgtgtggcgatggtcttcctgctggggctcatgtttgaggtgagcccgccccgagtcccaaccgcctgccccgccacctccagcccgggcccgggctccagatgccagccccggcttctccgcccaggacgcggggggctcgggcccggggtgggtgcagacccccagtccctgaggtgcaggccttccctgccctgccccacgtcggcggcagctccccggcggccggcccggagatgcaaagtcccggtgggcctcatcgcggcccgcagggggtggggaccgccgcgtcgcccccttcctgacccgccgccgccccctcccgcaggctgcgcggcgcagttcctggttcccgcgaagggttacgtggcagccggcgaggggcctgcgggcgggggcggcccctgcgctgccgagctggctcggggcgggtgggcggacttggggggactgccagcctcggccgcggtgagcgtcagccccgcgagggccggggaaggccgaggcccggcccccgggtctgaggagtgccggcctggagaccacaggccccgagtgacaggggagcccccggtagctccgagattggggtgagcgagaaaccggagtcaggcatctgctttcgacttgaagggcggtggccgccgggcaccggcgcagtggaggcgcgccagattgttttcatttttgtcttttaaactgatattattaccagttaacgaactttttgccctgacgctttaaagaaacaaggtctgatggataaatcgaggttctgaacagcggtgccaaggaatcgagtaattttgtttcttgaagtaggagaggatgggaatgtcaggagtgtgtaaattctcttcccacgtatctagtattttgatgacttatttaacagctgttgaatgtggatgataaactttgcaaggtgaacgagtaacatcctacgtttttcccctcgctccccaatacacacgctcattcctttgcttttttccctttttaatttttctctggagcctttatgtctcagtaaatatacaaattattttgctcctgccttgttttgtctcctctctcctgcatgtaacaagtgagagtagagattttggagtatttttacgagtctgtatttccagagtctaggatagtgcctgggacataggagtgcttaaaaaaagatgagcgacgttaagaatccttgagaaaacctaatggaatgatattaccagtgaccaaaaggtgaatacattttctttttaatggagcatatttgtttttttttttaattttaaaattaaataatattttaaccttattttcgcctctcatcaaatgggcttttctggatctagatacagatattatttactcctgattgtgtcatgcatgtttgaaaccactgctaaggaggtagcaggtatagttaaagggtaggtagaaggaaactaacattctcaagctttaagtctgggctgtgccacctacctactgggtgacccaagtctgagcctcaatttttctgctctttatcaggaaata

SEQ ID NO: 1883297 - DNA, 4001 bp, Homo sapiens
cccagccatcccattactgggtatatacccaaaggactataaatcatgctgctataaagacacatgctcacgtatgtttattgcggcactattcacaatagcaaagacttggaaccaagccaaatgtccaacaatgatagactggattaagaaaatgtggcacatatacaccatggaatactatgcagccataaacaatggtgagttcatgtcctttatagggacatggatgaaattggaaatcgttctcagtaaactatcgcaaggacaaaaaaccaaacaccagatgttctcactcatagatgagaattgaactatgagaacacatgggcacaggaaggggaacatcacactctggggactgttgtggggtggggggaggggggagggatatgcctgtagaagtttagaaatattttctgtaataaaaagaatgacgtttatatcctacggcatagtatacccagaaggaggcaaaaacgctattgaacagtgagaaagaacattgcatattctcattttcagcgggaaagaaaagctttatcagaggcaggctgttttaaggattaatgttcccagatggagataaatcttaactattgaaatagtgttttctcagatctagtttaaaaagtgttcgcttctggaaatctcttacttgttcctttgtttataattattttgaacatttgctttctgttatctgtgaagagatttgaaaagagcaggtcttttggatggttgctttaggagtgacctcccttggcttaaacaggcatttgttggataacatctctgcatgatttttaaaagttagcagaagtgagaagggtaattgaagtttccagaatcaagaaaaactacaaaagaagctcatttttataaatgctattgtcttatataaccccctggaagacacccagttctcacttctaagagctctcatgagtcagtttgtcatttgatattttgtagagtttgcagtaaattagaagacgtgaattcttctgcttaacttcaatgacaaactattttgtactttagttccttaagaaactaaatagagggaaccttttttatctctttcctatctatgtccaacctactcccaacttctagaacagtttcttgcatgtagtgagtgccccataattgtagaattaaatcgaatttgggcaatttttccttcttttgaaaatgaaactaaaaaaatatgaagccaggaagttttaccagtcttccccacaaccacccacagacatcaggctctcaagcatctgcctttcctgggctggggaatgagtatcctgtcttccctccccttccttcttctccctttgctcttcctgctcctacctcctcctctttctcccctacccgctcctgttccttccctttctcctcttccataacctagaagtttctaaccaagaaatctatacacacaaagaacaactgccaatgggaaaacaaaatatcacttcattaagagctaggcaaggactcaatcatcccaatgcaacgctctctagcaagaggaatttggataataaagttgaagtaaggaagcctaagtccctgtgcctgactctaagattatcaggaagcccacttatgctccaaaacacatcaaaaacgatataagaaggccgggcatggtggctcatgcctgtaaccccagtactttgggaggctgaggtaggcagatcacttgagatcaggagttttagactagcctggccaatacagtgaaacactgtctctactaaaaatacaaaaattagccgggcgtggtggtgcatgcctgtaatcccagctactcaggagactgaggcatgagaattgcttgaccccagaaggtggaggttgcagtgattgtgtcaagattgtgccactgcagactggcctggacaagacagtgagaatctgcctcaaaacaaacaaacaaacaaaaaaaaaacatgtaagaagatcttacagcaagtcagcagggtccaccaaggtctttggccagaagctgagagtttaccatgtggacacaggaaacagcagtagagtgactcgggtgggtttgtccttaaccactcaggaatttcagcaattccgaccatgggtaaaacccagtgcagtgacactctcatgttctcaccgaccaggaaaccacttactctgctttggggaggagttagtgcaggactgggcgtgggcagaagaatggacacattttgcttccctcatggaccgaggtgggaagtgggaaggggagactaaatgttcctggacaggaaagcataaatccagagttggaacgtgagtttatgatcttactctatttctattttacagaggaaaccagtcgacagagctgtgatttgccctgtgatttgccctgggccttcccacaattctagaaacccatgacttgacatcattgcgcggccacctgactcccagctggcttcagcctctccgtttcatctccctctactctcactctgctgctaccaagtcagacttcttttcaggtccttaaacaatctctgtacttttccatctccgtgtctttgatgacttgattccctttcctcactccatcattaacatacgtacccctcaagacccagctcagatgccacttctatgagacactctgtttctgtgccagaaacagttaagcctttatttgcgtgtccaaagtgtgccccagagcaaggatctggcaatcggcatttgaaacctggctccttggcttcttagctctgaccttgagcaaattacttatttttttgttgttgttactcagtttcctaaaatatcatatagggacttgtcatgtcatgttaatggacataatataaattaaatagtataatggcaagtatccatcggtcaccaaaaagggagcctactattactgcctgtagctatattttagcattgatgacaaaatatggtaaattatatctatttgtagacctaagttatcccttcccattgattattcacttgctgagactgcaacaatagctgcccatttttttatctcttccatccccacccagctgtcttgcacaatatacaaagtcaatacatgtctgatcaacggaatggacttaatctgccaaaacagacctgactctctatcagtgatacaggagctaaaaagaaattatttaggcagagagtgagagtaagggagtccttggcaaggcttcccttttaacaaaaagcagcccccagataatttcttttctaacaaaaagcagcctgtaaaatcaagctgcagacatagataaccaagctggaagcttgcacaggtgaatgacggcggctgtgcattgcaataggggaagcctacctgggggccaggtaggttcaacatggaggctccatcttcgcttttctttgtcaccatgtgtacagtaaagaaacaggcaacatggcgctggccaggtagagaaccaactgcataattaaagattagggtggggtggccagctatgcaaatggcacacctggtctcaccaatctctcatgccctatataaatcagacaccgcctcctcaagctcatctataaaatcttatgcacttggctgtgaaccggaacacctgctggggtgcccctctctctctctgcaggagagagaactcttccttttctttcgccaattaaacctccactcttaacctcactgtttgtgtgtctgcgtccttgattcccttggcgcaaggcaacaaacgttgggtattacagaccaatgatgccgcttcaccagctcatatatggcaaaaactgcaataagttttgcaccaaccctaatgctaaattattaattactacttacctaaaaaagagaaccatataaattaattagtattgtacaacactacatgtatttagtcaaaataccagataacctaactttatatttatgtatacatcacatgtatttttaaaattaattcttcactttagtgaagtattataaactgttaatc

SEQ ID NO: 1883298 - DNA, 4001 bp, Homo sapiens
caattcagcaacaaagatgaatagaaggtataaagattggaaaggaagaactgagacagtttttggttactgacaataggattgcttacatagaaaatcctaaataatctataaaataacaactagaaatatatcaatttagcagtaccatagcatacaaggccgatggacaaaaatcaactgtatttctgtatagttgcaacaaacaatttgaaaataagggaagctaaatcaattccattagcaatagtaacaaaaatagttagaaatatgtttacaaaagatatgaaagatttgtacatggaaagtttgcaaaatattgtcaagcttaagtaacaaatatctaaataaataaatttcatggattgaaagactcaaaattgttaaaatgtcaattattctcattcatctctacattcaatgcaatcccaattaaaattccagtaggcttttttaactgaaaaaaattattctatatttaatatatacggaaatgcaaaccatttgggaggtgggtagtagggggaggacttgaactgcctgatttcaagactgactatacagctcataattaggacaatgtggtaattagcatgagaatagccaaataaataaacggaacagaatagagtccggaaatggacacatacatatatatggtcaatttaatttcaacaaaagtgataaggctattggataaggaaaaaaagtcttttttttttttttttttgagacggagtttccctcttgtggcccaggctggagcgcaatggctccatctcggctccccgcagcctctgcctcccgggttcaagcgattctcctgcctcagtctcccgagtggctgggattacaggcatccgccaccacgccccgctaattttgtatttttagtagaggctgcgtttctccatgtcggtcaggctggtctcgaactcctgacctcaggtgatccgcccgcctcggcctcccaaagtgctgggattacaggcgtgagccaccgcgcccggtcgaaaagagtcttttcaacaaatggtaccggaacaccattaaaatatggagaaaaatgaacatcaatcagcgccccctttctcttacccactcctcagccccaaggtcgccctgggagttcttcgcaggcaggaccgtgactcgcgtggctttcgggaggctgattacccacgccccatgcccgtgcagcgctgggtgcagaggaaccgctggaaggacctgtcccccgtgggacccccaccaagtctcatcccgtgtcatgtgccagatagtctcccgtggtttaaggactttcaagactcttaacaggttaggaaaatccagaagaaaggcagaattgggtccctcgggcttgcctgacaccagggacggtggagttgaggtgacatttcactggcatggagacctgaaaccaaaagcaggatgagccgggcacggtggctcacgcttgtaatcccagcactttgtaaggccgaagcgggcggatcacgagatcaggagctcgagaccagcctggccaaaacagtgaaacccccgtctctactaaaaatagaaaaaaaattagccggacgtggtggcgggcacctgtaatcccagttactcaggaggctgaggcaggaaaatcgcttgaacctgggaggcggaggttgcagtgagccgagatcgtgccactgcactccagcctgggcgacagagcttgactccatctcaaaaaaaaaaaaaaaaaaaaaaggcaggctgaatcactcgcccggtagtgacggaggaggccgtaaaagcctcttagaggccagaccccgcagtggcctctgtgtccttcattccgccacccatccgtccaccgagcgcctgctgggtgccaggaactgggtcacagaaaggctgaggtcaactcccgaccgagaagcctggcgctgggaccaagtggcaaaacgactccgaatgcagcggcatccacgcggcggccgtggttgaggaacagaagctgagagcggcaagggcggtcacagaggaaggaagttcagggttagccaacaggagccgcaggtgccccgaaaagggggcggggtcaggggtgccctgaactccgaatgcgaagttctgtcttgtcatagccaagcacgctgcttcttggattgacctggcaggatggcgccaccaccagctagagtacatctaggtgcgttcctggcagtgactccgaatcccgggagcgcagcgagtgggacagaggcagccgcggccacacccagcaaagtgtggggctcttccgcggggaggattgaaccacgaggcgggggccgaggagcgctccctacctccatgggacagcacggacccagtgcccgggcccgggcagggcgcgccccaggacccaggccggcgcgggaagccagccctcggctccgggtccacaagaccttcaagtttgtcgtcgtcggggtcctgctgcaggtgagtccccaccgcggtcctgcctggggaaaagcgcgcctggcaccgggagggggcagagagagagggggacgcggcgggggtgcctggcccgggtcacttgtggcggggcatgtccgggcaggaggagcccgtcgtcggagtcggaggaagaacggggtccccggggccaggcaggagcgacccgggcctggaggcagcagagccccctcccgcaggaggctgggcccggggactccaccccgttggctgctgcctggcgcgtctccctcctgcccacacctcacgatgtatcgggaagtttcggaatcgatagagctcaagtgtgtaaacttccaagccaactcccagccacaccagctgcgtgaaggggagcgccattctccccactccctgattccctccccacccccgtccttcttttcttctcttctttttttttttttttttttttttgaaacggagtctctctctgtcgcccaggctggagtgtagtggcgcgatctcggctcactgcaagctccgccttcctggttcaagcgattctcctgcctcagcctcccgagtagctgggagtacaggctcctgccaccacgcccggctaattttttgtatttttagtagtcacggggtttcactgtgttagccaaatccgcccgcctcggcctcccaaagtgctgggattacaggcgtgagccaccgcgcccggccctccatccttcttttcttagacaaattggttaaacacgcagcccggcaggaaaaagtaactttctctcctctgctcgttgtcttccgtttcgagtccactgagcacaccggcagcagtttccttccagccactttcttgcgcatcaacaggtacagggcagcgaattgaccaccacgaggcaggcagccaggagcggggcacgcccttccttcaggaggcagcgtttcctgtgaaagcaatcactcagtctggaaaaatgccaatgccttcagttctctttcaagttcattaaggctctaccaattgttctcatccagattccttctatgttaaggaaaaacaaaacgaaagctaagtacctgaaggataaaccagtcttacaagtgtcaggaaattttacgtgtttttgtttaacaaactaaacaaaatccaggaatccaatagcattttgaaatctccaaataattacagaatttatgttttaaacgtcagtttatgttaggtggaacccacgtttgactcttatttttaatacgcttattaaatggctttctttttgacaggctagtgcgattccaggtggatgtagggctcacctgtatagacaaggtgaaacatctgaatttggtggttttggaaatgtcacagtccgttggtgtggctataaaagaatacttgaggccaggcgcggtggctcacgcctgtaatcccagcactctgggaggccgaggcgggcggatcacgaggtcaggagatcgagacgatcctggccaacacggtgaaaccccgtctctattaaaaatacaaaaaattagccaggcgt

SEQ ID NO: 1883299 - DNA, 4001 bp, Homo sapiens
tctgagatgttttctgaacttccagttactcattgtgaggtggaactgcagtaactatatttggtgcaaaatttcatgttgatggaagctgagatgtcctgcagtctcagagggacagaattctggtgtatctccctttggcctatgaggaatgaagatttaggccctgagggttttgtcaaaatttataagatgtaagaaatggggacgtctttaggccatgaggcaaggcctagaggtgtaaagaaaacagcttctgacccagggctcatgaagtcagcatagtgtcagaggcgatggtggagtgagcatagtatggtctttggaaccattccttccccatatttcttcataggccaagtatgcgcaaccagggggcatctcgggcctgatgagcagagtcctgaagagataaaggggcaatcctgaggaagagacttgacagggaggaaggagccaccattttcactgctgagaaaactactcctccctagtaaaccataggattttccttgatccagtgagagttttcctgagtgaagagaaaagagagagaaagggactgatgtgttatctctttctaccacctgaagtgattctgaaactttgggggacaggagaattatcttcagaatcatgagcaatccagatgccatgattacacatgagaaactggaagttcttatctctggggggtaggcactaggcattgatattcgttaaagctcattcactgattacaaagtgagacaaataaatctgctgcaagatttattcatgacatattatttcaccacaattcaattgtcttcagcacaaagagctcttggttctctgcctgcggacaccctgtaactgggtcttccaaattcattcttctggatgtaaaagaggacataggcctgttgactcaaaggagaagtgataccagaggcagtgacctcggcatcatccattttataccactggccttcttgagtttgacacaagagaagtaatgtccgttgtgacaactccacccggtgacgacgagaacagcatagaggacatagaaaagaggtcctgtgttctgctgagacatgtatggctgcatgtcaacgcactcaggatattgcagattcttggcaagtttgttgcctgtgacatcggagaatctcttcaagacaaggatgaggaccttggcagaagtgggtaaagttaacgtcttggcggcaggcgccttctggagacaaagaccacaatgataggcattctctccattgagttcttcgggcttcaccaactgttcctaagcttgcttgacactctgagctgcctggatatccagggcgatatccaggtaagggtcgaaggtgtctgaaatgccgtggaagtagagacacttgatttgagatctctagtaccctccaaatatttggtggatgaggatggtgtccttgcagtgatgatctagctgcttgtgcccgggaaggcatgcctttctaatggcatccacagtgaatatgagaaattcatgggcatcttcctgcttgcctctatggaagtcagcagccaatgcctgtgagggctggatgacatggccaggacggtggaggtgcccgtgtgctgtgagcttccataatacagagcatgcagcacttgggacgatgacacatttgagagagctcccaggacagcatgtagttggcaaggggcggtgtgtatgtcaggcactgcagggaagcattcaagtggcaggtatttcccatattctggagaccagctcccaccgcagcaggtctcctgctactcggaggaagcttctccctgggagcaagctgtcttgtcacaggagccaaatcgtcacagaggtcgacacgggtctccgatgagagtggtgacttctcagggagagaagtccgctggatttcaggaaaagctgcatctggctgagaagatgtgagttttgaaaagtggttgaactgccactcacctcccaagtagagtgagtcttcctccatgtcgcccgcaacaaggatcacaaggtttttctgctgggactgcaggttgcagaaagacgctatctcttccgagagagtcttcaaataacgagttctctggccaaatcagcccttacataactcacccgcaccaagagcgaacaccccacccgcacataaggtgggcaataaaccaatcaaatatcagcactcaattaaggaatgagtcacagggtgtgtccccttgcatcgctgggaattcaacagacacagtccacatcatgacttctaaaacaccttcatcaaattactcctcaggatgataggcacatataatatgatggtaaccgggttgggacagtggccacacagttgccttattttaggtaaaagaatgtcagggaagaaatctttacctatgaaaccgtgtgagtatgtgtgtttgtgtgcgtgtgtgtgtgtgtgtgtttgtgctgggatgtacttccgagtatgtgcttttggcagataccatcatcctttcagcgatagaaggagaagtctgaagtgcgctttctgacctgagaataggcaatgaagtacagtaattagcacagcatatttttttcctcaataaaaaaggagagatccgtggaatcaaacagacctcccagcgataacctttccatgttcagcctaatgattctatatccgagtgaaattacctgccagtggagaaaaagacaagtctttacattaaatgctcttgtggaagctagattgctgaataataaagcattaagtcgtagaaacatgcactgaagtttgaagagatactcagtgcacaaactagactgtaaaagactttggggaaataatgcaatcaccgagagactaattgatgacattccgaaaatttatatttgccagaaaagagagatggtcaagacattgcatagcgagtggttttggacgtgcgacggcagtttaagaaaacatgaaacaaaaaacttgagaaatcagaaggtatcccaactataacctttgttttacaaaagaattgatgaaaataaaaacaacgtatctcacagcacgcgtgataatattttcatacgtatgtgataatggagcaacatttgatagagatgaaatgaaaatttctaaatttgacaaaagcgaacaacaaaaattacaccgtagaaaagcgtgggtgacggcagtgacgccctgtctcaagaagtaaacatccgagagatttaaaagtggggagtgaaaccaaggatagcataacattgttaatactagccattgtttcagtgggaaaaggcaaaaataagcggtgtgtctcctagattctcacatgaattgttcaggatatgagatgttgcctctatttccagttatgcattgtatggtggaattgcagttagcacatttggtgccaaaattttaatgctgacgaaaatggacatgttccctgaactaagagggacataatttgggtgtgtctccaggctctctggcttaccaggattgaagatccaggctctagggattttcccaaaatgtcttagacagtaagcaccggggcagaattgaggcctggcgccaaggtctcgaggtgtaaagaaacagccgtggccgcagagcccatgaaattaggatgattttaaggaggatggtggaatgagaggactgtgatgtttggccccgtttcttatcccttgtcttttcatgggccaggtgtgctccatcagaaggctttctgtgcctgatgtaaagtgtcctgggtgaagaaagggcactgcttagagaggtgctccacaggcaggaaggagccaccattttcaggagaatgatccccagaagcatgagcaatccagatgccgtggcttcacacaagacgtcggagggtcttattcctgcagccgggacctgggcatcggtgtcctttaatgctcataactaattttgaggggagcccaatcgataacctgtctgcaagtcatgctcatcacactgtagttttcacacacgtcacac

SEQ ID NO: 1883300 - DNA, 4001 bp, Homo sapiens
cgggtggatcatgaggtcaagagattgagaccatcctggccaacatgatgaaaccccttctctactaaaaatacaaaaattagccaggcatggtggcgtgcacctgtagtcccagctactcaggaggctgaggcaagagaattgcttgaacccgggacgtggaggttgcagtgagccgagatcatgccactgcagtccagcttggcaacagagctagactctgtctcaaaaaataataataataataataataataataataataataataaagaaaaataaataaataaataaaaccacatgggtgatattagaaatttaaaatttcttccagtcccatattaattgtaaagatactatcctggagggtgaaatccattcatgactctgttctctgcaataagccaaaaggccacagttaccttgctaatattaagaaggacaaaaaatgtctgtggtcaaggtggatatgccaacagactcaccttgggaggcctggctacttggtgtgtgtgatttactatacatgcctgattcacacacacagctggcaacagtgccaatttgtgcaacctatttagagagcaatttggcaattgctaccaaacttaaggctgtatgtacctcttgaccctgctaggactttaacatacagacagtcccgcaaaagtaacaatggacagacagagaagtcacgtctacgctcacagacacactcagtcaggtgtataatagcaaaacaaagcaaacataaaacagcctgagtgtccatcagtgcaagactggttaaataaatcatgatctattcatacagtgggatgttatgaagctggtaaaaacaggtaaatttccaagtgccgatttaaaatgtattccaaaatatattttgtgagtaaatcaaagtggaaatctgcgagttcatacttttgcaaataaaaaaagatccattaacatatgcgtttttgtgtaagcattttttttaacctggaaaatacataagaaactgttaacatgattccactgttgaaagagatttgtgatgagggtttggagagtctctttaatgttgtctcaacattttaaaagagcccctttctcctgttgacaatctgatgaaatccagtggtgggctctgagcacccaacagcctctatcccttagactaagccatcaggtagtagctagtgctgcctttaggtcccgagaactgcataacaaacaagtacctatcctagagccttaggccactcatccaacttcaaaaggtcacctcctccacagcatttcctgacgtctccatcccctgaagaaggaattcgccagttctgtctccgttttacaggggacattttctctggtttctctgtttcactctgttagaccagaagccttctcaacccccaaaactcttaaatagttatccgacgacaatcagacacagcctttcggctatttgattctaaacaaaatctacaaaaaagttcaagtgaaacgacacacattccaaattgccctgattttaggcagctgcccgatcttgtgccaaatgatacagatacttttggagtaggtttccctggactacagttgtccaggagcaagaatagattgggcaaacaagcaaacaaaatagataaagcaggcgctgtgtgggcgcgtcattagcggggtctcctcttggactgtgaacacaccccaaagcttgcaaccccctggccactccacgctttctccaaaccaagggctgcccgcaaggaaacctcgagccgaaccgcggccggacttcagaacccgtcccgacccgcgaacccccagggtaccttaagcggttccttgcagtcctccgtgtcgtcccgcacatcctcatagacaacgccctggggctccttcttttctccagggcgccacatcttcctcgggctgcgcttcattgaccccaccccggacgccatctggtgcatctgctccccacgagcgcgggcacctggggcgagagagcgctgtcagccggccaggcgctggggtccgcgcgagcccgagctctccctcgctgcagctcacaggcagcgaaaatctcgctccgcgagagccctggagaacttctggaaggagttctcaggcccgcgctacttacagtgcaggaagcaagcggggcgtgaagaggaggtagaaacacagacctccctagcaaagagggaggcggcgcagcgtctgccgaggactcgccccttcaggaacaaagtgactcccccgtcccgctgtcctgcagctgcagcagcgcactcccagagtcaagcgtgtcaggtcggtgtggatgcagcgaatttgttgtaatctacacattaagagcccccttgcctcgccctgccccctccaaccgtgtgtgtgtgtgtgtgtgtgtgtgtgtgtgtgtgtgtgtgtgtgtgtgtgtaaagagacaggacgagagaatgacaaggtacattggaaagttttttagttttcaggatttttttccaactaaaattctatggacctgtgtttccctccatgtgcacctccttctgggggcctctttggtatggaaataaggtttttagcaaaacttctcattccaaacatttgggagaatagctaaaccctagcactggtttgagggaccagattaagtcctcatgaatctcaggtcccatttcctgcggataataatattgatccccgtcatgccttggtgtttaagggtggttaataaaaaggttaggttaaaggtaagccactgctgactggtgtgtttgtttgcccccagctttgtttgaaagacttatcttcataggtctgctgtgcataggtgtcaattgtgtagaataaaacgtgttccctctcaatcgaagaggctggttctatgtttatgtacagacaagggagcctctgaaactgttgacggtaagttcaagtttacaaggctagaaagcaaaaaaccttctttccaaggctgattatactttgcacaggacagacggtagctttgacagtcttttgctttgacagactgtgcttcctgaaggccctggattgtcgtattcacctgctcatctccagcacttaactcaagacccctgtggatccaggacctggcataggtgcactcaataaccgtttgtggactgtctgacctaggggctatggtgggctgagcttagggctaggcagagtggacatgatgatgttgaggaaccatgaaatgtccccccaaatcttccaatggatatggcaggttgccatcaattccacccctggagtggaattccttggaaggataatattgaacttaaccacatcatgagtccatgagtatggcttgctggaagatacaggtgttcagcttcaccctcgcacacttttcccaccagcatctttgttcagggtgtacagaataggaatcagttgcacagcttgctctgatttagttgaaggaggtaacgcatttggagaaaccaataaagaaaagaatcagagggatgggtaaagagaataactctcattgagtcactgctgtctacctgacattttccatacaccaggttcatgttttaaaatggaaatacctcataggaatatgatgactttttattctttatcattgattactttgatcaattgcttttctcacaacacttagctgaaaaggatcactaaggcaaaaagggaataaagaggatgttcaaagcagtcattttggaagctggggcagaaggcatgtcatcagatggctctgttggcccttacagacaggggagggaggcggtgcagggaactccagcaatggagggtggaggggaatgctgggagaaaagtggctccaggtcaacagcaccccttttttgtgacatcccctggggtcagctgccagcacagaatgatgctttctgcattcttgcttctgtaccccattgacatccccaaagcacgtattcttttaaatttgtcttctccagctttaacactgaaaaatatagatggtt

SEQ ID NO: 1883301 - DNA, 4001 bp, Homo sapiens
aaagctaaaaattcccaaagccgcgctgaaattttcagtttctttctttccttaatttgtgcacgccaggcaatccctaacagtgtttaccattttttcctcgaacaagtttaatctttaaaattttttcaaatgtttaatattctgtgatgataagattccaggggaaagaagggtctgacacaaataagcataacagccccctagggaggacaactgaatgaaggagttgtcccaagtaggcgaggcggtatgaattcctcataaactcttttcactagttttgctctacctgcacccgcatgtcctacattgttctctgaggtttcagcagtgataatgcaggcgctaagttattcgctcactgtacggtccccctggccttcaaagtcgccaaagtggggaaagaccacgcaggagccaggtgagaccctcgcggtgggctcggggacttgtgtgtgcacctcgcgctgagaaggctgcctcccggggctcagggtttgtcttcaaggtctgttcaaatttaggctaactcgtccccaaacagtagtgaggaccagtatgttttctgtaaaatagatacagacaaggaaaatcttttcgaaagaacgctatacgaacaagtttcaactttcccacagtcgaaatttttggaattgccaagcaacttggaaagactagcaagacggggggcccttggctcactgccaggaatgcgccagctcgcgctagtcccccagcgtcgtcaccctcgctgtcctcctcctcatgagcccacacatgtggacccagtctctctgaagtgagctttgtaggactcggcggcgaaggggacgagaaaatacagatgacaaaacgacgccgaaaggcttgacctctggggctaatctctctgcctccgagtagatcccgcgctcccaaatccggcgggggcgcagtatggtgaaccccacacctagctccctcagctgcgtgggtttcaagctgacccaggcgccaccaggcagccccgagtgggcgagtcaagtgcaacttcaaggtcaatgtgcctctgactggggcctggagagctgccaagaatgctgggcttggagcgctggggtcgcgccccgctactgcgccttggaccccgcagtggagggcgctgagaccgcacccccctccccgggcagttttcaggagagggtccagctggggtctccgcggtggggtccagaaacgatattccgggttggattcttcctcggttggggaagcacagctggcggagaattcccacggctctcagtggattcgcttttccagagctgttctcaagcaaagttgtcatttttgccaaactttgtttttactttttagactgttctgaaagagataaattgaaaaacacagagagacaattttccttctcagaagatacacatagctacccaaattcagacttgtaacttttcaaactagtgaagtaataaactatttatcagtactataaaaataacaaagacgaacttctggctttactctttagagtagattatgttccattctgattttacttgggttcctatctcaaatttcaagcaaatatcaagatgatcattaagaaatttaaatagtacctagaaattagtttggtctgcagctcaatgcactaatttcaatgcggtgctgtctgctgaatattttaaactcctttcaaagcagtaggtgtattccctcccgcagtaacaaaacgatattcatctttacacaaggtgctctggcgtttataatttggtatccaacacccggccgagaatgttccctttcctgatgctttggccaaccggcctcgataagccaaccagcccagaaccaggggcgctgggctgggtgttcctcggggacggcgcccactgcccgcttggtccctggagtgtcccgagctgcctcccatacccctgctgcggacagagtgggggcagtcctctgcctctgtttcccaactgctttggtaactcagtgactctctgtgaaactgcagagtcagaggacttcccttccgtagttttcattctaagcggtcatctgtgagtcagaagatttcgccgtggcctgatttcccaccctttctgcccgcgcaagccgaaagcgctcatgttggcttttcctttgccacttttccaacttgccagttccatcaggagcccggatccttgcccagcttcttggcggagccaagttcgagcgcacagatttcccgagctccagcggccagggggcactgtgtgagcggctgacgtcacccctccgcccggccgaaaccaggcggcgggatcccacacagttgaggagagggagccgaggccgtgacttagggctggcgacgattaaaccaagtaacgagacaccgggcagatgtgttttcattgccctgtaagataaatgcagtgttaagtgcctgacaacttcccagaagcaatcagcaaaagtttacgagtgcataaacctcaaagaccattccctatcggttgttataaggccggtatttagagcttccataaattcttcggccttttcccaaagcaaagttttcagcgactattaagcagccacctcctccgggaagactagggggattttcttgaattacaaaaggaagaggcttttggctcctaccgagtaaaatgaagttgtgcaaaagtttgttccagaagcttggatggccagggagaggagggaggtggcaggaggtcgtggagatggggtcgggaagggccacgagatgcgctcaagtgtttgttgcctaagggcgaaagacaaaggtcctgcgaagatcctgggtctagctgagctggcagggcctttgccgccctcagtgtcgcccctgctctgccatcccggctctgccgctcacagccccgcatggcaccccccaccagtccctgacatgatcgatccttcgcccttcaaatgtccacttcgggccggcaagaatcctggcgccccgcagaaggtggcagcccacaaaaagggcaagctggctggagaactaagtcagacattgtgagatgtgtccccatcctgcccagagccacgaccgggccagcctccgccctcccgaaagtgacccaaggactttgataagttagtgtcatgcatacacgacccacctatgtttagagagaacctttgtttatgatcccagtgaaaacaaagctgctaattgaaaaacaataacactagcgtgtctttagctttctaaagggagaggttaacagctgcgaacgccgggggagggacggtgggaggggtgcggtgagcgaggggctgccctgcatgtaaacagcctcggggtcccagacgagacaagtgggaccgctcaagcctgcagaacccccggtctcggtcccaggcacaagagcctcccgtagccccgcctgatctttctcagtctttaggttccaggacatccaaaggagcgtaggtaaccgacgtctacgtagtatttctgtccccggaagactggatctcagggaattattatggaagatactgctgagcccctttcatcctttccaggtgaaaatacagacatttttgtgtcgccctcacccttcctttatgaaataaggtgcccaactgttctgatattaccattcaaaaacaggttctgtggcgaacctcatttgtgaatctattacagagattaatagattatttctcctttttcaactaattctcagtggggaaatttaaccatatggtaaggagagaattagaatttcatcacattagagcaaaatgtaatgaaaagagtccaacacctggggccaactccgaaagccacaattaaaaggtttttaatgaaaccagagaaaccaaaaattgcatagtcttcagtacttctgccatataagaaagagttattggaaggtgttgggaaatattgtttttacttatgtcataaggatgaaaaccagctgctaaataccatgtgtacccagagaccgaactcagga

SEQ ID NO: 1883302 - DNA, 4001 bp, Homo sapiens
gacagggactgtgcttcagaggtgcagctttcgcagctggacgaatgacccggaatctccccaaatgccatttgtaaacacaccaaatgaggtttatttcagggctttctgaatgtattttagttgaatacacacactccagtgtttgatttcctttagtagcaataagacttagttccaaatgacttccgtgctagtgggaaaattttctgtttcgactcattggaagtggacaccgtgaaacaggcaagtcggtctgtctgcttccggcgttatgtgggttccagcaagagcacaagtcccagggcgcctaaggtccattcagaaaccaaaataaaatgggcgagccagggtaagaaaggagagcaccgttcctatcttccaattgaattccagtatccactattcaacgtggcgagaatgatccacggatgtcccacatgagcaaaatttcaccttctcttgccgaccaagaactgatgaatgaaacaaaccccaagaggaaatagtaaaccatgtcccctgcaataacctcacacgcaaacctacacgtcaataggtcacattaagaaatacacactgaatgtcatctaccatgaacacaaacacacagacagtccctccagaggttcggaagactcacgaccccaaaacttgatgtttcccatgtgtgggctcatcctgagatgcagccgtcactatccagttgtccctgttgtagagacagaaactggggctcctcattactttatgtaggatagacggtgttcgtgtttgtgtgggtgtgtgtgtgtttccttgcgcgcttgtgggtgtatttgtgtttgtgtgtgtgtgtgtgtgtttttctcccctacgtgtgggtcggcacttccactgagatcactggcacacaagcagagccctcttgcagtgtttgttcttccctttggatctcctggtcctcccttgcagagaagcgagtgtgccagtgttcatggactcctgatctgtcgggttcgtcgaagagaggtttagcagggagctttgctgttcaggatgatggtttttcatcccacacttgtattttgattgatgaatcacaagtacgttgggaggcagggtaccttcaagttttctgacgttgaactcaggcttcgttttgttttgctcttggaggaatttccagtggtctaaggtgctttcctgagtggctctttccaccaagtgctcgtccaactcgggtacctggaggcaggggtagtctctcttgagctctccttgcgttgctcgcctgtctgtgtcttcagcgccgagggctcttggttccctgcctcttgacacactctcactgtgtctttcccattcactcttctggatgtaaaagaggacataggcctgttgactcaggacagaggtgatgccagaggcagtgacctcggcatcatccattttataccactggccttcttgaactttgacataagagaagtaatgtccgttgtgacaactccacccggcgtggaccagcacagcatagaggacatagacaagaggtcctgtgttctgctgagacatgtatggctgcatgtcaaggcactcaggatattgcacattcttggcaattttgttgcctgtgacatcggagaatctcttccatacgaggatgaggatcttggcagaagtgtgtaaagtttacgtcttggaggccggcgccctctggagacaaagaccacaatgataggcattctctccattgagttctttgggcttcaccaactgttccaaagcttgcttgacactctgagcttcctggatatccagggcgatgtccaggtaagggccaaaagtgtctgaaatgccgtggcagtggagtcacttgatttgagatctccagtaccctccaaatatttggtggatgagggtggtgtccttggagtgatgatctacctgcttgtgcccgggaaggcatgcctttttcatggcatccacagtgaacatgagaaattcaagggcagcttcctgcttgcctctatggaagccagcagccaatgcctgtgagggctggatgacatggccaggaatgtggaggggccatgtgatgtgagcttccatggtacagagcatgcagcacttgtgacgatgacatgtttgagagtgctcccgggacagcatgtagttggcaaggggcggtatgtatgtcagacactgctgggaagcgttcacgtagcaggtatttcccatattctggagcccagcccccaccgcagcaggtctcctgctactcagaggaagcttctccctgggagcgagctgtcttgccacaggcgccaaatcatcgcagaagtcgacgcgggtctcagttgagagttgtgacttctcagggagagaagtccgctggatttcagcaaaggctgcatctggccgagaagatgtgagttttgaaaagtggttgaactgccactcacctcccaagtagagtgagtcgtcctccatgtcgcccggaacaaggatcacaaggtttttcggctgggaccttatgttgcagaaagacgctatctcttccgagagagtcttcaaatgacgagctctctggccgcatcagcccttatataactcacccgcaccaacggcgaacacctcacccactcatcaggtgcgcgataaaccaatcaaatatcagcatttaattaaggaatgagtcacagggtgtgtccccttgcatcgctgggaattcaacagacacagcccacatcatgacttctagaacacctgaatcacattactcctcaggatgataggcagatgtaatatgagtgtaaccaggttgggacagtggccacacagttgccttattttaggtaaaacaatgtcagggaagaaatctttacctatgaagccgtgtgtgtgtgtgtttgtgtgtttgtgtgtgtgtgtttgtgctgggatgaacctccaagtatgtgcttttggcagctaccatcatcctctcagcgacggaaagagaagaagtcggaagtgcgctttctgacctgagaatagtcaatgaagtatagtatttagcacagcgtatttttttccctaataagaaaggagagatccgtggaaacaaacaaaccttccagcgataagctttccacgttcagcctattgattctctatccgaatgaaattagctgccagtggataacaagacaagtctttgcatgaaatgctcttttggaagctaggttgccaaataataaagcatcaaatggtagaaacatacactgaagtttgaagagatactcagtgcataaagtagactgtgaaagactttgtggaaatcattcagtcaccgagagactaattgatgacaatccccaaatttatgtttgccagaaaagagagatggtcatgacattgtatagtgaatgatttcggatgtgcgatggcagtttaagaaaacatgaaacggccgggcgcggtggctcacgcctgtaatcccagcactttgggaggccgaggcgggtggatcatgaggtcaggagatcgagaccatcctggctaacaaggtgaaaccccgtctctactaaaaatacaaaaaattagccgggcgcggtggcgggcgcctgtagtcccagctactcgggaggctgaggcaggagaatggcgtgaacccgggaagcggagcttgcagtgagccgagattgcgccactgcagtccgcagtccggcctgggcgacagagcgagaccccgtctcaaaaaaaaaaaaaaaaaaaaaaaaaaaaagaaagaaaacatgaaacaaaaaactagagaaatcggaaggtatcccaactataacctttggtttattaaagaattgatgaaaataaaaacaacgtatctcacatcatgggtgatagtctttccatacgtatgtgataatggatcaacatttcatagagatgaaataaaaagttctaattttgacaaaagcaaacaacgaaaattataccgtagaaaagtcagggggaaggaagtgaggccctgtcttaag

SEQ ID NO: 1883303 - DNA, 4001 bp, Homo sapiens
agtgaagtacagctgcttgtatggaggagctggggaaatatatttgctttgaaacttttttatttttacatctcagtcttgctagcaagcactacttggcttagaatctgtcatatccataaaggaggagctcatgtctctagtcctggcccttcaactcagaaggttcttctatactttccttctctcaggactcttatagcccagactttaaacatgaagctgcataattttcatcacttcttactctgccgcatcctctttgcccatgttattaaagtattatctaatactttgaagtttacctgaagaacctctttgtgtgtacttagtaatacaactttttttcctgtcccaacaccttttaatacagttgaatggataaaaacatggatacaaacacatggatatagttatcactgaagcagtgtgacataaaataatacctatgtatacaacactcctctgtaaatagcaaatgtaaagtaaaagatacacaacagatcattttgtttatctcactatcatttattaatctataatgtatccctcctatgtatccatgcaaggaagcaatactagctgcccgactagagggcagctcccttgggttacttattcagaccccattttcattcggatctgagctgtcttacccgctcactgcaacttggcttttccttctttgagtataaagtctgacatgggatggctcacctatagcttcagtgtgttaagtaaagaaagctttatgcagattctggtttttagtgggtctcctctgacagtagaaagattcaaaccacaaccaattccaagaacccttctaagaacagagacagagtcacttcaaaggatctgacttgctatacctaaatataattcacgctgcttttctctatgacgtaccataatattttgtccaaaaatcttgaaacatgttattaactttgaagaaagaataaaaccagccactttagagaccagagacactcaagcacttatctattcataaagtttctacacagctgaagaagtttgcatcaaatggacaaaaaatagtaaagaaaatctaaatacagaaaaaaaattagagaaaaatccatctcctagaaagcaggtcaaatggactcagttaaagacctcactgcatgtaggagaatcaatgggaaacaacataaagccttctgctgggatataaataggaaccagtctatgtaatcaagaagttactttgtctcctgatctaaatgcttgcctccagtctagggctcagaaaaaaagcctggttatttgaactggttgtcaatcaaggtccccttcattttcactttcttggcttcccattcagccagctcttgcagtggcctcttgctcatgcctttgcgctccagctgtttttcaatcactttggcattctgtgcatacgagtcagcaacttccctagcctcaatctcctcttcctcttcatcaatggtagacacagtgacagaactgaacttgcccatgtctttggtccgtttggtcatcatcaccttcttaggaggctcttgtttctgagtatatatgttcgttttcccaaagccctggccaaacttgacgactgctccatccacaatgaaggtaacgggagcattcttcggctgggattggtagaagagcagcagtccacactttgcacatttctttctgtactgtagttcaatgccttcaggtctccgcagatacatagtctcttcgtcttctgtgttacaaaacttatgggcatgtttggcagcatcaatcacacgggaccggtcccggggcctcatgggcaatttctctaactgacagtccagcactaggaccacctggccgcacaaacagtagtacacatggaggggcttctcgccgtcgtcatattcctcccggtcccgagtgtcagagcagactactgaccgagacactactttcggcatggtttccaggagcaacctgaaaaactctacgcaaagaagagggtcgcgccgaaatgacgtcacgagcgcgccttgcgccttttccctgcggctaccttagtaatacaatttaaatggcatttatcaacatttccataacatataaacatcaatattactaaaacaacttgaaaagtatttctttcacatttttccggtaagctactagcccagggccacaggtttccaccttgacagatataatttggtctgaggaatgacgttattaacttatggaggatacgggccatttaaagtttggttggtattctacttaaaattacttaaaatatgaaatgtaatatttagttctagttgttaaattggttgacccctggcaggtgtgaggtgccgacttgatggcatttctccttcggtgctcagaggcttgtgagagcacatcctatatgtggaaacgttaccgtcccttgtttactgatactactgtcttaaaatcctaacaatcaaggcccaccagttaaacaagcttgttatttttgctactagccagctttcatgggcctccgttttggcatcagtgaaagagcggagactttctcttcctcagaggctcttatttgagcacaggtgaccacgaaaggaccacttaaagcagatggcggctgacagcaaaggagagatgcagtgtacaagtcccagcctgatttcactctgtctttttctctaagcccctccgggatcttatcaaggatatcatgggcagaaggcaaggaagaggattctaaaacctgagaagcccatgccagagaagtcagctttggtactgctgttctgagattgcagctggaaaggaaggtggggggagagtcagttacagctgttcctacatttgtctgtgaaacaactcatgtggattccagacaaagaaatcaggaccaaagcaaacagcacatcaaaagcctggggctcgcttccagaactgtaaattttaattttccctttgtgttgtttgatggagttcctaatagaaacagtcttccttggggctctccttgacgtcaaagtctgtttttcttttagaaacttctaaaattactagatttaatgtgctcagctctttccacaaaacctaaatagccattccaccttccttcttcttggaaactgtgaaccttccttctcttttgctgctattgtctagggaaaggctgctgcctcacgcaagaaatgtgctagaattgtttgttcttccttttttttctttttaagctctcaccccctgtagggcatggttagtattttcagaacaaaggttgagttttatcttgaggcacagaaagaaaatgcccttgcgttcaccatgtagagggctgcctgcacaggctgcttcagaagttgggcaggggatctttagatttgtgggctttgataagcacactcccttgggaaagtacattcttgagctggtgattgagcttgcactttacctcatcctgccctccctcatctagaaagtgtaacaactcctttttctccatcttttctttattccagatcagattgatgaaaatctcaaactggctttgcaacaggacctgacctccatggcccctgggctggtcattcaagtaagcattgctgcatgggagcagcccctctctctctgacactgcttcccttctcccaagggatgtcctttttgtgcaggaagatcaaggcccagtgggagctgggtgtgtccctcactaccctcactttcccatcagctgctgttttaatctctctccaggctgtgcgggtaacaaagcccaacataccagaggcaatccgcagaaactacgagttgatgtgagtataccctccgcctgggctgtgaccaccactgcctcccacctcccacctcgtcccatcccagaggtaaccaaagctgccaggcttctcggttatccccttgctggaggatttgctacagcccattgcactgtaagattgggcaggcgtgtcagggccaccactggggctccctacctgtgattgagaacc

SEQ ID NO: 1883304 - DNA, 4001 bp, Homo sapiens
ggcactctgttcttcttgatccactcagacatggcctgtgagtgaagaaacggctctcctcctcaaagaaatcactgctgattctcacaccagcctgacactgcttcatgggttcttcaaagagagtattcccataggaactaaaagggaagaggaatgtgtctggcgggcattgtgggcagcagtgggctttgggccaaattttaagtttgaaaatcaagattgcctctttttgaggggccgccggactgagcagatacaaacaccgtgaaaagagggtgccatgttcagattcaggaaacaaggatggtttctgtttagttcctccatcaaccttcaggtcatgcgattcccatttccctctgtggaccaaacaattcagtggggtttctgtcttttaaatatttcattatcaacatatcatccttttagcctctagaaagcattttaacatgaagattctggcttaagactcttgtgggtctgtgtctctctctctctctatctctcttccttgaaacagagtctcactttgtcacccaggctggagtgcagtggcatgatcacagctcactgcagcccgaccttccaggctctaacaatcctcccacctcagcctccaaagtccttgggactacaggcacacaccaccatacctggctttattttttattttttttatttttggttgatatgaggcttcaccaccgtgcccaggctggtcttaaactcctgggctcaagcgatcctcccctttcggcctctcaaagtgctgggattattggcttgagccaccatgcccagccaagaaccttgtctcttgtgatgcaccccagaacaaaacatcactgcaaaaacacaccaaggcatgagttttagtcctaactctcatttatccaccatacactatgtgccaggcacaatcctaagtgcttctgtggataagcttcccttaatctcagcagtaaaccccaggcaatgggacctgttgacagatccatttgccactgaagacagtaaggctcagagaggataagaggcttgtgccatgtcagccagctaaggaggggcagaaccaggatgcaaaccccagccgcctggctccagactcgcgttcccaaggtcccactacacttggtcactccactgcattctggtatcctggtctttggcagagtccacgtaaaagaaggaggtggaaggagtgagagggacttcacgcaataaagtttcctggtgttacactgccaccgtaattgtgttcccgaccaggacctctcccttctcatcctttccgtgatcggccctggaaaaccttccagagaactgtcctccttctcccgggatctcagagaaaattcacctgagttcagtgtccaggtgacccaagctctgaatgcagtaacgtgcacggggagatgaggatgtcaccatgagcaagcctcccagacagcaaccgggagcaaccccaagacagggcagggggggctctgatgcagcccgcggcgaggagggctgcccgtgctgcctaaatgggttcagaatgaaggccgccctcccatcttcaacccggggtcggccacggagcctcccgccacctctaccccgtgtcgcaggcacccccgcgcccccggcacccccggacccccgcgcccgcgtcacttactcctttgccgtcgccacctgtctgggtgccggtctcctccctgcccggccgcggcgcgtcctccccgtcctcgcagtcctcgggctgtgcgcttcccccctccagcaacagccgcagcctcttctcttcgggagggacgtcgtcctcctccctcctgggccagccatccctacctcagggcttgccagtggcttcggagctgccggaagggctggccatgactccgggggctctgcctgcacttggggaagaagaaggacccagcgcgagcgtcctctcggcggagctggggagtctgagcgcgggctcgttgggtccgcgcggcgcggagctgggcatccgggcggcgcgggctcttccgcgggccgctcctggctctctggcgccctctgctggcctctcccgcacaccgccgccacgccgggctcgggcctgcgccgctctcacctgtcctggcccaggaagtcgctgtcccttgcccgtggccaggcccgctctggccaggccctgcacctcctccccgccccagccaggttgcaccccgatagtctccctgccgaaggaggagagaagagaagggacgcccggagagggtggacatcggccacagccaccttgtctttgctcttaccctgtttcttccatgatttggaggtggtgggaaaaccgaggctgctcaaaactcgtggagaattccgcctgcaggatgacatgaatgcaccttcccattgcctaccaacagatcttttttgaacatcactgtggaccaggcgtggtgatgggggaggggatattgcggtggacatgacaggcattgccttcatccagtggggctcagcgctgggtgagaaggcattgagaatggacattgtcaactcggccaaaggaggccaaggagaagtgctaggggcatgggaactgaaaaagacaggaggctcagccggtcttgcagctgggagagggacagcagcagcggctgttccaaaggaagcaacagctgagagaggtctcagagagttgttctcagcccagtggagggtgttcaggcagagggaacagcgtgtgcaaaagcccagaggctgggaaagaagcagaaagaggactgtggggatggagcgtggtgggcaaggggcgacaggcgtggtgggcggacagattgcctgggacccagccgtgcaggggcagaggagataggggatccttccagacccccagccggggctcaggcacagagacaatgcaggtgggcaaagggaggagacgtggagaaatattttggaggcatgccctgatgaatgagcccaggatgcacccttagtgtcagtgtggagctccttccttggttgtgtgatgagctgaacccgggggtattttctggacatcgaagtgctacacccagagtccaggacaggctaagtgagcaccagcagctcctggcccacctcagaagcaggaaagacaggggagactggggaggccggggcagaaggggaagccaggaaggcaggagaggccagggaagcagaggaggccagggaggcaggggacgcaggagaggctggggaggctgtgtcctttccatgattctgcccaggatcctaggcccctgtactccctgagcttccccaccccaagcgctggaatcgtgttgcacaatggtctccccactaagctcctgatggcagcccctaccctgctgtgctccctatttcaaccctaacagctctcacagtggacagcacatagtaggtgctcaggaaacactggtgggagagcactcgggtctgctcagcaccttcctctctcttccagctctcccctgtcacgaaataattctgataacgacacatgggctttgagaccctcttctattactttccatatgctaatccatctatacctcacagcagccctgggggtgggtgcaatgaggatgcccattttatagaggaggagattgaggtataaagagggtaagtgacataggcacactacagtggctggggctaagtgatcagagcactcaatccccaaaggcaaggtggatgcagttaccataaaagacagcagagtcaaagctgcaaccagaataccctgactcgcagagacctatggtgcctgctgatcgtggctttcctagaagtgaaatagataagaagcctgccacatttttacttgatctgtgtttgcagaagagttctaggtcaggtgagcagaagtctaatctgaatcataaaaacagtgtcacagaccccattcaattcccagccataagccagttcacagacccggagtcccttgtctgaatgggaagccaggtcccctccagaaagga

SEQ ID NO: 1883305 - DNA, 4001 bp, Homo sapiens; identical to SEQ ID NO: 587593

SEQ ID NO: 1883306 - DNA, 4001 bp, Homo sapiens; identical to SEQ ID NO: 587596

SEQ ID NO: 1883307 - DNA, 4001 bp, Homo sapiens
gcaccagattcttggcactatggtgcacagaaacagagaaaagggtgcttttaggacagttcgcccacctggagttgctggaattttctaacaccccaccctacttcctccaactcatagatcagcctacaaagtgaaaatccacagttaaaggcccagttcttaaaccatttcttggtttgtcctgttggaattaataccagccttatatacttgttactggaaagaggtcctaatccagtccccaagagagggttcttggaccttgctcaagaaagaattcagggcaagtccataaagtgaaagcaagtttacaaaacaaaagaatggctactccataggcagagcagcagcatggctgttcagctgaatatacttatagttatttcttgattatatgctaaaaaaaggggtgtattattcatgagttttccgggaaaggggtgggtacttcccagaactgagggttcctccctttttagaccatatacggtaatttcctgacattgccagggcatttgtaaactgccaaggcactgctgggaatatcttttagcatattaatgcactataattagcatataatgagcagtgagcacgaccagaggtcactctcatcaccatcttggttttggtaggttttggcctgcttctttaccacagcctgttttatcagcaaggtctttatgacctgtatcttctgcctacttcctgtctcatcctgtgacttagaatgccttaacttcctggcaatgcagcccagtaggtctcagccttattttacccagcccctattcaacatggagttgctctggttcaaatgcctctgacatgcttacccttaatcctaatgtccagtattgggagcacctttaataaataaaccgttttcctctgatctaacaccgtaacaatcaacccagaagacttctattaccacatatgtggggttttcccaaccaacaagaaaacaatcagctctgcagaggaccctctgatgttctctcattcagttcatttatggcactacctacctggagattaattcaccaggttgtttcaccaatacttctgactggctataaattggagttcccatgaccccagccttgggtttgattaatttgctagagcagctcacagaactcagtgaaacacacttactgattgattgtacaggatattacaaaggatacagatgaagagatgcgtagagaaaggcaggggagaagaggtggggtgcttccatgccctctctgggcacgccaccctccaagaccctccaggtgttcaactatccagaaacttcctgagccctgtccttttgggtttttatggaggctacattgcataggcatgattgattaagccattggccattggtgatcaacttaaccttcagcccctctctcctccccagaggttaggggcagtggctgaaagtcccaaccatctaatcctgccttggtctttctggtgacctgccctattctgaagctaccaaccatcagtcaaaaaaaaaaaaaaatcactctggagactctaaggattttaggatgccaggaaatggggtcaaagaccaaatatatattttataatatcatagtcatccattcattaaaccagcgtatcttaaaatgaatctatcccaggattatattatttcttgataacctataggcctcttaaacattttctttattttttggaagtagttataatgggggagtaggtagggggctactagctttatagacttctcctcccattaaaatgtgctccagtcccaaaaacctgccttcatttctgcaggctacaccatttcttctacccatgttgaaatgcactcaaccacatacctcctttcttgcagctaagccctgactccttttagttaataacagttcaccccggcacgtgacatctgcaaaaaagaaatccaatcctcataaccagcagttatgatacagtcactgcagtaagctcctactgctgtccttgccctgcaccctcacccttccccacagggccccttctctctgcccagtcactcatttgcatcacaatggaggtcctctccggagtcccagtcttaacccctccctctgctgctaggactggacccaccagcactttccatcttcctcgtccttccttgtttccttctctttctcctctcttaccccgagattgccccttaccctttaggattccctcacctatgccttcttagattttttctcctgcttaggcccttccccaactcccagcccacctctctctggggtctgcaggaaagcttctcccgggtgggggaagtaaggctgggagctaacccatatggacaattcttttttttttttttttttgagatgaagtcttactctgttgcccaggctggagtgcagtggcgcgatcatctcggcttactgcaacctctgcctcccgggttcaagtgattctcctgcctcagcatcccaagtagctgggattacagctgcccgccaccacacccagctaatttttgtatttttagtagagatggggtttcaccatgttggccaggctggtctcgaattcctgacctcaggtgatccacccgcctcagtctcccaaagtactgggattacaggcttgagccatggcgcccaaccataattctttctgtccccagttaatgagttatccatctcttccacacacattagtatctgtcccccacccactgcccttcagagacttccctccaggaagcgaatatcacaatcctgagaggtaatcccattgagacacacacacacacacacacacagtatcatggcagccactctatctttgtttttgatcacagcgctccaaggagcccactcagtgagggaccaagggttaggtcgaggggtcactgagaactaattcaatcttttgtacaaatcctaacttccagtttaggtggggccaccaatgcatcccgctttacgaggactttcctggtgatttagcactgacatcccacatcccagaaattcccacagtcccaggcagatcaggacagttggttgtgctgtgtcccagattattttcacaaagtggagcttggagtgcagaaaagctcgacaccaagggagtgttgacgctggtacacgcacttacgccccattgggttacgctgtccagctgtaatcttatctccacataaggggggtctaacactcaggcccacagactccaacacgcccacaggctcggacccaatgctcaggccagagtgccactgaggcatgagtgcccacatggagaagcctccatcacacaccgggatggagatgattgccgctatgctccaagctacctagtgtattccaaggggttccctaggatgaggagaagggatgaaaagttcgtaaacacccactgtgtagagtgttttatggtgttgcatttgggaaagggtagctggtagaacataggcaccataaaataaaatacgatgcataaacacacgcttatccattcattcaacaaacaagcactgagtcttgggccagaaggtactgcgctcgaagctgggagtacagtgttgggtgaaaaacagtcttgccatctactgagaaagagctcaaagtagagagcagctgtgctacagagtgattaatgcccactgtaagaacacgcagaaggggcctcacagatacgggaaggcttcatagcagaagagtgccttctgagcaaagtcccaggggctttgggcctagggagcagcgtgggaaaacctagggcagggtctgagggagaaaatgacagatttacaaactccagtctcagaatagagggcgggcaggcctggggaggggaggagaggaagtggtggcggatgacatgaagatacaaagatacagaaagtcccagtcatgaaggccttctctgccatgttaggacatttgggctttatttttggggcaatagggtagccttgggagagctaggaaaaaaaaaaacaaata

SEQ ID NO: 1883308 - DNA, 4001 bp, Homo sapiens
gaaggtatgacgttcagcattctccaaaagagaattatttctgcaggaattcatgtgacaagcccagacacactcctggctcccgctgtctagcactctttagccattaaatcttacccacccacatacacgtaaataacatttaaaacgcactatataataatgaatacaaaatatgttgtctaatcattcttacctggaaagacctttatggaaaattccagggccaggctgagctgctgcccacacccacaggctagcagaatccaagagggacagtgtgggggcgggagggccacacggaccccttccttcccccagacctcctttcttggtgacagggagaaggagcaaggtgaggaggcttctccaccgtgagtctcagacggagagctgtgccctcattcacctttggaacctctgacctgaggcaccttgagacgcaataatattaataccttaactgcaagactccgcgactcacagagagatgtaagtgcaggtaacagagagctgaaggaacaatgactccaacaaattcaatggaaatttaatttctatgttgtaaaagtccagaagctgatggcccagggtggccgtggtgactgcttcacagaacgctctggattgaggctcttttcatcttggcctgtactcccagggtctcctggcccacaatgtcagcttccactccaaccatcacatctgcatttgaagatgaagaaaggtgaaagaggtaaaaacaaaaggagcatatgaggtgatgggtggatgaacggacagacagctggacgtgtgacaagaaagatgaggaagacagcaggatgggtaggaacgggaggatagtggctggatggaaggatatatggatggttgatggtgggtgaataaatggtgtgtagatgggtgaacaggtgggtgagtggatacgtggatggtcagttgggtggatggatgggtggatgggtggatggatggatgggatggtgggggaatggggagatgggcagatgagtgggtggatgatgggtgggtggatggatggaagggtgcgtgggtgagtgggtagatgggtgagtggttgggtaggtgagtgggtagatggatggatgggaggatgaggcatgggggaatgggggatgggtgggagtgggtgagtgggaggagggtgaatgaatggatgggcgggtaagttggtgagtgggtgggtgagtagggggtatgggggtgagtgggaagatgagtgggtgggtgggggggtatggggaagagtggatgagtgagtggatgggtgggtagggggttagagagtcagtggatgagtgggtgggtgggtgggggttggagggtgggaggatgagtgggtgggtggctgggtagggggttggagggtgtgtgggaggatgagtgggtgggtggggggtagggggctgaagggtgggtgggaggatgggtgagtgtgtgggtagggggttggagggtgggaggatgagtgggtgggtgggtagggggttggcaggtgggtgggaggatgggtgggtggggggttgggggtgagttggtgggtggatgggtgggtagggggatggggttgcctgggtgggtggtttaggaagctgtggaatgactccaaacgtggagtgagggagctcagtttgtaccaccgaacctttgctcatctctcccctgggccctcttccctcttctctccagagccctcctcaaatctcacacctccattttcaagaagctggcctcacccatgcagcctctgtagctctccttcccctccaagcttgtttctctcggcgctgccaccgtcggattcctgtgctggttcttgctggttttcttcacctcctgaccaccagaacactggcgccgggagggcagggtccgtgtgtttccacggttgatttcctagaggctgcagcagcgcctggcaccgaggaggtgctccatcaatatttgttgaaaagaaagaaaaggaaagcaggatggagatggactgaccctgcccagcacccctgtccagcccctgcccagcacccctgtccagcccctgcccagcacccctgtccagcccctgcccagcacccctgtccagcccctgcccagacccctgcccagcctcccctgtctattttccagacagcagccagaggcgtctttgcagacaccactgtcctgcagcaaccctctaaacccttcgccggctccacagtttgatccaggtcagtctgagttgctcagtcagtcctgagacctgccctctcttgtccctgttctcactgccccctgaggcttccagtcttcctttaggatctgggccaaaatggcctcctccaagaagaccccaggctgttctgtgagctggtttccccctgtgtccaggaatgcccccactcccacagtagtgaagtctactttccacctgctaccatcagagttgagcccagttctgggcctggcacacaggtggggcactccacagggtctgacaacccctcccactgacctggtctctcctctgtgcccaccagggactctatacttgggcctaggactctcattctgcaagtcccgcctgggcccttgcggcctccatggcatccagggcctcttgtggcccatagcaggtgtgggctctgctcttcagccttctgcagcctcctgggatgctgttctgttagcagctcttctggggcaggtcactttggcatcagccacatccacttttgtttttttgaagtgatatatgcacatctgtcttttataaatcaaatgtagtaagacgtaaaacaaaactcagcagtctcctgcccatgccctgagtcccccactcagcaagataactgctttcaactctgtttcttccaggaacctcctgatatgtttcggctgtgtccccaccctaattcatcttgaattgcagctcccataatccccatgtgtcatgggagggacccagtgggaggtaattgaatcatgggggtgagtttttcctgtgctgttctcgtgatagtgaataagtctctcaagatctgatggttttataaaaggcggttctcctgcacacgctctcttgcctgccaccatgtaagacgcgcctttgctcctccttcactttccgccatgattatgaggcctccccagccatgtggaactgtgagtccattaaacctctttttctttataaattacccagtcttggtaatttattacagtgcgagaacagactagtacacctccaaatctctaaataaaatgtttatattactatttcttgatttattaattttaggcattgtttaggatttcactccattacacatttgctcttccccgccccacatcctccctatatactatgtgaacatttttagtttaggccgggtgcagcagctcatgcctgtaatcccagcactttgggaggccaaggcaagcagattgctggagcccaggagtttaagactagcctgggccatgtgatgaaaccccatttctaccaaaactacaaaaaattagctgggcatggtggcatgcacctgtagtcccagctacaaatgaggctgaggtgggaggattgcctgagcctgggaggtctaggatgcagtgagctgtgatcacaccactgcactccagcctgggtgacagagtgagaccttgtctccaaaaaacaacaacaacaacaaaaaaggctgaggcgggcagatcacgaggtcaggagatcgagaccatcctggctaaaatggtgaaaccccgtctctactaaaaatacaaaaaattagccgggcgtggtggcttgcgcctgtagtcccagctactcaggaggctgaggcaggagaatggcgtgaacccaggaggtggagcttgcagtgagctgagatcacaccactgcactccagcctgggcgacagagtgagactccgtctcaacaacaaaacaacaacaacaacaaaaccccacaatacttttagcttaaaaatattccatattta

SEQ ID NO: 1883309 - DNA, 4001 bp, Homo sapiens
aagactgtggtccaaatctctacagctctgcctctcccaagctgtgtgacctgggaggatatttttaacctctctgggctgtgggttcctcatctgcaaaaccacaacaataatcatcctattttataggaaagttaaatgagatcatataatttgaagtgttagaaccaaccctgccccacaacaagaagtctaccattgctagacatttcattataaatgcctcatggagttgtagggagtagaaggtgaagaacatgctttgcgtgataaacaatgtccatgttatacatgcactattattgttcttattattaattgttatttattaccgttattagttccttagattatttgaggtcagaaaacagaagagacaaagggggctcctgccaaaggacccattttggcagcattccaaaaggccttgaatttctgagactctctagggatgatattgaagtgactgtccacaggactcaatggtccaaatgattccagattgttgctctgttcccatcctcagtcagggtcccaccatggacactgggaatataaattggggtggggggtgtggtcctgatccctcaaagagatcacaaacctgcatcaggaaacaataaaaagcaaaacaaggccgggtactgtggcacctgtaatcccagtactttgggaggccgaggagggcagatcacctgaggtcagatgttcgagaccagcttgaccaatctggagaaactccgtctctactaaaaatacaaaattagccaggcatggtggtccatgcctgtaatcccagcaacttgggaggcctcccagcattttgggaggccaaggcgggcggatcacctgaggctgggagttcaagaccagcctgaccaatctggagaaactccgtctctactaaaaatacaaaattagctgggtgtggtgatgcatgcctgtaatcctagctacttgggaggctgaggcaggagaatcgcttgaacctgggaggcggaagttgcagtgagctgaaatccagccattttactccagcctgggcaacaagagtgaaactctgtctcaaaaaaaaaaaaaaaaaagcaaaacaagagaaaaagaagaatcttatgtctgcagccaactatgaaaggaaatgcaaaataaaaaggccacacatccagaagggccacctgatataaaacaaatagcaaaggggcagccatcagcaggcctgccactgcctctccagacgacctggaccggcaactatccaaagtcttccacttcccccagatattctgccaatactctgcccaaatgcagggccactcacacaaacaggaggaaagaacagggtgtcttatagtccaggagatctcttgacaaagctgccagagaaacgtgtccatcttgggcaggcagaaggcccaggcatggcaaacacaggctccagaatccagccagagtgcctgcctaccgctcaggaggcggaaaaaaaaaacaactaaagaacagggaattgatttgatgtgggcagtgagaattcaccaggttttcagaccagcaatcatataaactagtggggatcagatatgtcagaacagaggggagaactcctcctttccagtgcagaaaagctccagccacagaaacacagcatggaggtggcgaggggcgggggaaggtgtttaagacagaggaaaaggaaagttaatcagaaaaaaaacaaaacaaaacaaaaacggacttctatttttcaagagaagccgtttatgcaaaaattctgcactcaagatagatgaggcaacaagaataagccactcttaaccaggcaaaacagcaacacaaccacttaacaaatccctctgggaattcaatgggtacagcatataccccacagtcatacccgtaagtggaattccagttgggcccttgtgccgaagctttagaccacgaggcacgtcctcacctccaagatgtaactcatctcaaataatggagaccaggccacgaggtttctcccagacacggattctgtatttgtccttctgcagcttccgggaaggtttttctcctaataaatcctgtagaaagttccactcagggttctgaggattgatacaacccccttcttgactgatcagagctttagaaagattcgctatgaccacaggactgtgtcaagttgaacaagtctcaacttgtcgctgccagtatgcaaaataggtctgaaacatcttataacagacaacacagcagacacagtccctgcatcctcagggcccccgcccacccaccacacacaaacacatttctctagagtttttttttcctagcaaggaactagccccagtagccaggattcacagtggtggagtgggcgagagacaggctaacagcctctctctggaaaacctaataccagaaaggaaacaccaaaacctcatcctcttgtccctaaatccttgcacgtgatttcttctcctctctaatgttctagaagggcctaaagtcaggagcttagatgaacagaagaatcttccatgcctgcaaaccaccaggaaaaggcatgaggcatccacacacagacgcatgcagcttcatggctgtgcttcctgaaagtctacacccagaaccacaaacactggcataaataagagcacgttagcaagagaaggcaaacctaattaaatcaacagcccagccaagaagaatgaccatgatgagggtttaggagcacccaacaaaccctcacatgcgatgcaaaaactgagaaagtctcaaaacacggagttactgagtttttggaaatcaccttcgcccagccctgagggggtgtgagaggaagcggggagtgatggtcaaaggatggagggaggatcacacattcacagacctctagtttcgccagaggggcctccaaaccacatcatggctccaaatctgttctgactgcagaggggtctatttttagaaattagttaatatgcctttgatcaagttcataaatccagaattgcctctatgcaccggccattcggtgtcatccccctcccctcaccctccccaaacgcccaaactcgccaccagtcttgaggctggtgatgaggacagtgcacgcctagcacacacatattggattccgaaagcccctttcctccgtccgactactcacagcgcatccctactcagggccaagtctcgagagtttccagaaacgcaggggacaaaattggaacttactggagggcagatctggccgtgtctccacaggtcacagggaccgccaacatcctttccgcaaggaaatccactggaaggtgccgggggtcccggggcacatctttgctcgcagctcgtcgtcgcccctcctcgtcccggccgccccgagcccgcccggcccgcgggcccatgtgctcggccgccacacgcgctctgcccggaggagcgcggggctggcgggttgcccgtgacgtcacggcggctcgcgctcgggcctcgggggaggggggaggcgcgcgcggcccggcccgccgcgtgcgtcctcggtcccggcgctcccggccttccccaggtccccgcccgccgcccggtgcgcccctcagcctgcttcccggcagcgcagggcactgagccggagagggccgcgcgcggaggcggggcgggcttgggcgactgcggccgccaagggcccagactgggggagcggagggtaggctctgccctgggctgggggtcctcgctacaagcgcgccggagtcccaccgggccggagggaatccccggtgatgccagctcgcttgtgcgccgagctttccacggtctttccctgagccctcttacccttccccacaccgtcctggaagcaagcggtcttcccactttcctgctgaggaaggcgagttcagtgaaataggagggccagagatgctccgggataggtgcagttcccgcagaagaccgccgactgagctccagctccagtgatctgagcgcctctttgggtaccacccagc

SEQ ID NO: 1883310 - DNA, 4001 bp, Homo sapiens
caaatcgtcaacaaaaaaaaataaaatgcagacgaacctccagaagacaaggacaaaaaccgcaacctgggtgtgagaacacccaggccctaggccttaagagggatggtaacccctagccctgtcatctacaaaataaggtcacagcagagctagatgatctataatgtcacagctgaagttaaaaaattcaatgagttgatcacacccaactcaaggtgctggcttaaggattaagaaggaacacatgtgtcaaaaaccattaggctgcaaagcagtgccaccgatgatcatgtgtacaacaacaaccccctaaatgtgtggcccactcccagtgagccagccctgggctcagaattctacattcatggccgggagcggtggctcacgcctgtaatcccagcactttgggaggccaaggcaggtggatcacgagatcaagagattgagaccatcctggccaacatggtgaaaccccgtctgtactgaaaatataaaaattagctgggagtgcccctgcaggcccagctacttgggaggctgaggcaggagaatcgcttgaaccccagaggcggaggttgcagtgaggcgagatcgcgccactgcactccagcctaggcgacagagcgagactccgtctcaaaaaaaaaaattctacattcattatctccttcgtcctcacaacaaacctggagaatgcagaggtgctacatttctacccactttatagaccaaaatgtgaagttacaggttagtcattgttgaagccagaaaccaggagtcagactcgggcagggggggcctctggagctcctgaaggccatccccactccctaaacaaggttgagaaggtgtggtttaaagaggaacaccatggaaggaaaccagtgctttcttcactttttagtctggcaaaacaatccttcaagttgttccgtggtttggagaacagtaatgtgtatgggtaacaggtgctcagtggtacggacaaggttatacatttccagcctcagagtcttcaaggcagcttgctggtaggagaacctggatttgctcatgcagtcttgggcacagccctcacttaccttagatgctcacccagcttggggtggggcacagcccctccagactccagcccaaacaatccccatcacctccgcatttcctagtacaacacacagcaccgaatctattcagtggcctaagctggacacagaaaagaacattttaccccttccttcctgtaaccccagaggctcttcgtgcaccgcgttcagggacttctctcttgggtctccagtgcatccctgtctcctccagctcaggccccgtcaccactggccaccagcttggacctccctctgatcttgtcttcctatggcagaggccatgctttctgaaatgctaatctctccctctctcacctctgcttaaaatctgcatcatgagaccatcgccctcagcacaaagtcaaaatggtctttctaggatctggcctctgcttacctttcctgtctccctcctgcctcttctctgggcaaactccttccttcccctgaccaccctaagtccacaccctgggcccttctgtgtgcctatggcaccctgtgtccccaggcaggcaccttggctgtgattatctgatttctcatctaaattcctcccctattcgtgcccgcccgccccccccacccccaaacacacacacaagagaacaaaaaatctctaaggaaaaagagcacttccaactcattcctgtacttccagaatgcatgcagcaccatgcctggcctgcagtatgtgctcaattaaactattgcataatgagaaataccctatgttttgaagtgtccaggaaattgaaacaataatactctctccccacaaaaaacagaaaacagttatctatgcctcagtttttgtgtctgaaaaatggagacagactccagaacagggttgacaggaaggaagtacctcaaagcaaaccctgcagaggccttcagtgataagtgttcactttccctatcttcagcttgctgatttccctatcgtggtgcatccatccagaaggccacaaagatcctatctcccaccaactgaacttcaaaagcatctttatctgcagaacccacctcaaggaaggtcgattcctaacttctctcggtgatccttttattctgggctagctaggcacacccgcccagccttatctgtaatgtccccaagctgttgtctttccaggaagggtgtctcctatctacaggcctccaggaggcaagaccagggaggcaaatggaggagagccactctgtgacctgagatctggcttctgccaccctcaagctgtgtgacctgggacaaatcaacccattcatcagaggctcagcttccccatgtacccctctgttcaaaaaagggagtagactcacggaccctccaacttggaaactgcagtaacaggctgtactggacatgttgaatgaacaccacaatggctgcctaagccgatcccttctagcaaaagagggagagtgaagcagaaagaaatcagggaaatttccagaaatcatgtcatcctgggttgcctgaagatgacaaaactacgacgtacaggagaccccttccaggaatcacatactgcatccggggaaggccagaagtaagtgcagacatacatgaaaaggcaggcattagggatggttaagtggatgccaattccctgcttccagaaatgaactcagcctaatgaaaattctgcaggcgcctcacctgtatattgcacttggggctaggagtgcaagccacccaggggctcctgacgggctgctcacctaggtcccaacccccttctgccatttcctaaccggtttgttctcagcctctttgaacttcagatgctgagcagcttaacaatgtctgaacagcctaaatcagcctctggcccattaaagatgtctgtttcctgcctcctttccttaaagagtttcaataagaagagctcctttaagggtaggcactgggtcttttttttttttttttttttttttcctgagacagagtctcgcgctgttgccaggctggagtagagtggcgccatctcggctaactgcaacctctgcctcccgggttcaagcgattctcttgccttagcctaccgagtagctgggactataggcacgtgccaccacgtgcagctaatttttgtatttttagtagagatgggttttcaccatgttggccaggctgatctcgatctcttgacctcgtaatccgcccgccttggcctcccaaagtgttgggattacaggcgtgagccaccgcgcccagcctgggtcttttaacttttatatccccagagtgtagaatatttagaataccagaattcctttataaatgcccactaaatgcgtggataagataaaaacataagacaggaagcaatcaggggactgatagtcatcagttcgcttggtaaaatgcactcacgtggctagcactcagaagacatcccaaatctcccttctgctctttctcccttagagccacacagaagctctgcaggcctgagcccacctaccccaccccaccccaccccgctaaggggcagcacagaacagcagcaaaccatgaggacccaggccacctgctgggttcccatcttggtgctgtgaccgtgacaactgactgaaacccttaagactccccttcgatagtatccacttcacagtgagctaggaggactctgtgagttcaaatatgacatgtgcttagaaccaggcctggcacatggctcccgtggctgtcagctatgggatcattcgtgctactattgttattccgtacaaccagatgttggaaaaattctggagtcaccgagccacagaaggcacacatccagatcccagattgcagctgtcaagtcacactttgagccttggacttggaatcctaaatcactgggtcaaatcctggctctcatctacctctggcgcctgactttc

SEQ ID NO: 1883311 - DNA, 4001 bp, Homo sapiens
aatcacagcagcaataaacacggcaggcaaatgtgtcaacccctggggaactttaacttgttttctgctgttgtagtgagatcaagtgtgtgtgattcaacaagacgggacatgtgaaacttccctgtacccctcaagcccagcacagagcctcatccagagtagatgctcaatgatgacaccttataaaacaacaaataatagccaagacctctcctaagtctgctgaggggtagccacatggcttcttaaaagtcagaggccatttgctattaaagaaagccatgagctttgcgcagtggcagtatcgtagccaatgaggtttcaccgaggtgcgattattgctaatagaaagccacagatggtcctggagaccagagccatcaaaacccttgttcttgtgcggaaaagaaggcaaaccagggaccgaacttggcttttgaagatgactcaccaccaaaatcccaggtcttgatgacaggttaaatcttgtaaaactttaatttggcgaagaagttggctgctgtattactctgtcacatgtcttgggagaggtccagtttctgtcaccctagcattaactgaaaagcgggatgaaatatgaagacattttgcagtttataagagaaaagcaccagggagttttaacaatttggagaagtatcatcctaaaattggactctaatggtcactgaaaccattgctgcattcagtaaaactgggttgcctaaagctactgccatggagaatctaaaacaagacataaagaggcaggaatcagtcacatagaggcttgatgtacaatatgtccaatgaagcttccaccggagaactgaaaagcagtatctcagcagaattgcaacttctgattttaggttcttgtcaatctattctaactcttagcaaaagattcttgctgttcagcctcagaaacacttttatcttagtcgactttcctgaaatcatgctgtattgagctatgattcttactcaaatgtagttcctatgtcagaatctcatcaatgagaaatttcgcaagattgcgtgccaaaatatccagtaccacacttgcatatttttacttcaaacagaattaacactgcatcttagacacagcgtggtttaccctgctagtcatctcaaacactgaagacggtgactgtactacatgattatttacctgctcagctcaggttcccattgttcacattcacatcaagacagatcagcactggcacaaccactgcttttattgggtatatcaagtgttaacagatccttcaatgtgtttctcaaaatctctgttggcctatggtaaagaaaaataaaatctattttgaaaactcacagagctctagttaaaggttcatttaataccacctatatgtctttaatgtctttagacagaaaaaaaaaaagctttacagttcaattaatgtttcccctttgggtgcaatttaacagggagggcttcagaaaaagaatgaaagagggctattaaacacatttcttatataaagatacttgttcttatgcaggacatatagaataggacttttttgtagcaaatattttaaacaagagatattttgttatgtgatgcttttttagctgcagctaaaacaatttttagtcgtggaaattctgaaaagcttgtcatttcttttattatacttactagaatatgattacttttgttgaaggacaatattttcccctcttttccttaccctgtggcccccaaaaatgtttctgctaatgatataagcagatttctaatactttatctgcttttaatctatgaaaattaatatttggatacttcataattatcttgattatgtcacttgataaaacagtgataggtattaatgttagttcagccatatatttatactgcctgggaataggtggctgcaattgtgtggcgagcataatttggcagcgttcactagcttgcaaaaacctactgcaagagcttaaacatctacatgaacactgatatgaaaaaagcatgtaagcctgaccatagcttctagttcctagatggacctggctgtgtttttcaggccccaacctgcagggagccccttcaatctcatcagctgagtgggcagaataaagacatcatgcctgcacatgcttagcattgtgcccagcatggtcagggattgataaaaacacttgtgtattctctttttattatcatcaccaccattataatcattactgagagatgcatccgtagagacatcatgtcagagagaagcagaggaacccagaaggcagcaatgaaactaacatttagaagcaacacaggtgatggggcagcccagaaagctgaagacagaaaccatttcggagaattagctgcaaaagaagtagggaacaggcatgagaaggggacagttctttctggagctaactcagtgaacacaccagagcctgtgggaacatacatttttgcatcagtttcctcattgataaattggaagaaaggtacatggtagagaaggttacattagtcgatatttgtaacaagtcagggcacataacaggccctcactcaagagaagacacttttgttctcacatctcccttcttaaattaaggagcatctgccctgtatacaatcctgcacaaaaataaatccacgtaaacaaaatttcacagtaactacaaaagcctaatgatcattaaaaattcctgggagaaacagatgaccgttcactaattaatcgggtttagataaatcaagcaccacttaaagaatcactgctccttaaagaggtaaatgcaacgattgtcacatggccaatttctaatttttcatttctctggggagaccaaaatgatacaatcttagtaataaatttctccctaaagtttctgaggacaaacaatttccagcctcctcagacaaaggtaagatgagtcaactagcattactgtcaacaagtatgaaatgtaggccacctttgtgtctacaactaacatactttgttaaggatcagatgtaggacagtggtttgtggagtgaaaattaggtgggtgtccactgggcaagacattgcacagcactgcctgtgctggaaaatgcaaaagagaataagctggatgggagtacatcaaacctaaacctacacgtgtagaatcacactcatgcatacaacccacattcttactgttttcccattatcaggagacatcaaaaagtaaaaggtgtctcataccttccaaacacatttcccagaaatgtctgttaacaggaagtacatacccttcacagaatttctcccatgtgtagataaatatgtatgtgcactatattgttctgtcttgctcctacaaaaatgggccaattctatacaaatggtactacaacttatcttttccaattgattgtggacaccatcccatattagtacatataaatctatctcatggtttgtatttaggttttttttttttagtttttattttaaaataatttcagatgtacaaagtaagagtttaaaaaactgagaaattccatttagccttgcaacttctcaattttgacatcttatatacacagtacaattatttaactgtgtcaggaaattaactttagtacaatactattgcccaatctagcaatttaatacaatattattgcttagttgctcaatctagagacgatattcaaatttcatcagtaacacttttttccaatgcagaacgcagcccgcagtcatgcgttgcagttacagttggagcgtgtcccttcgtctcttttaatctgaactcattcctcagtcattctttgtctttcatttttaaagagtgctgatcagttgttaactagaatgtcactccatttgtgtttgcctgatatttcctccttgttaaattcaggttatagttctgtcaaggatagcacagcagcaatggctgattccagggctggaccaggcaaagtgtacactgagcctagaatatcttgtggggtcaaaaggtaa

SEQ ID NO: 1883312 - DNA, 4001 bp, Homo sapiens
caacatatcatgtgcactcaatcaatttcgttcaatgaaagaacaagtgactctctttcattctcttggagttgaatactcaatcgtcccataaatggttccagtgctcaagctgagaatcttacaccacagtcaatgccctgaagaaattgagactgtgctgggaagtcagacacaaaaagaaagagatgaggtccactcttgctgtcatacatgaggaactaagagtctttcaaacagaggaagatgactttgtggcagaaaaacccacagaggaagtgaatgatggaatggaacttgaggacaggtggagtttgaataatcagtggggtagtcaattagaaggttagggaaaaccccattcatttatctgacaagtcaagccccagtaggagcctttagacaggttcttctcacaagaaccctgcaggtaggaactatcagcccaggttaatgtcaaggatacagaggcttggagtggtgaggtgacattcctagggtcacagagccagcaactgttggagctgaggtctgaacccagcactctctgaagccagagcccatggatctctcaggcatccaagggagaaaaaacaatgggatcaaagcacagacgtcaaggaaagcaagtagtgtttaaaagacaagaagtgagacctgtttaccagaactgattccccacataagaggctcggaggcattcagtctttattcacaggctggagtgatgttgcggtggacttaatgccccctgagaggtctgacttcaagcctgtgggtgacacggagctactgtttttgagttggacagggacatggtcagaactgtgctttcagaatttggacttggccactggaagaagagacagttaaactcaagttgcccaacatgaggcatgggatgggagaggttggggaagggatggaaggaaacagagtgggcaccaacaggaaggaagcaaagtcaggaactgctggctggaatgggtccagggagagggaaaaccacttctccttcctcttcttatgattgcaagattagtacttgagaattaggctgcacaggccaggacttcccaaaactcaggagggaaagagcccagagcacgtgtctccaatggaggctatagttccaaatcacgtgatcatcggtcatctccttgcccaccctgaagcccttgtccccagtgtactttgggctcagacagtccctcaggggatacagcagtgtcctttccttcagcattcagggcaaatgagaggcaaagagatcaatggaatgcaaaagcgttactatagatgagaagtcggacgcacagagaggttccaccacttgcctaatatcacacagcaagtacatgccagaatcaaaattcaaacctagagccccggtgtaaaccttacctgaatcagtcagggagcagcagggaggcagtggaaggataggccccctgacctcactccccgcctgccttcccatcctgccagtgccttccaaactgataccagagagcatggcagccctgtgttgcatccaccctgataatgcatccacacaggtcagccttctgggcacaaaacaaggcagagaagagcaaggagtggacctggaggggcccacggaagctccccagcacccaccactccaatggcccagcccctggtaggtctccagtgcccttcaccctacagagccacagaatccccagaccttgacgctgcagctagggcccgcctgcctctcaagagaagggcagggccccacacaggcaagtgctctgcctccgcgcaaagctgggcatgcgtcatcacactcccgccttccttcctcattcactctcccttgccctgcttctatcagtggctccaagacgcaaacatctcgaaatgacctgcttctgtgtaggtcagctaacagaagtgctgtcttaagaaatgagggccagctgatgcccactaccagacccagccagcccctcccagcctccctgccagccctgcacatggaggcctggcggccaggaaaaagaaagggctcctatctctgattcctcagggcctctgataagaaatgtcatcccttgctgggtaatattaccaagccagataaaaatctctatcaagcttaaacatatggctggctgcagaacacagagtccagtggagaagggtaatttatttgcttaagctgaaaaccctgggcagccgaaagaagtgcctgaataaaagagtaagagccaaattataacctcttctgacttggcatggggatttttccctgggaaggatgagacacctgagaacaacagggggctctccacacatttctcctgacacaataagcgctttcgccttcctctttcttcaaagggcactttcacttatgctatcacatttaatcctcactacaacctcaagagaggcatttttagcttcctttacagatcaggaaattgagattcagcaaggttaagtaaagtggccaaggtcacacaggcagccatgctggagcgaggacccaaaccccagcaggtctgactcaccatcagatggggaagctgatcccagcttctggggaggatcggctcatacatccacttaatcagcgaagtcagatctgcccaacttaactgacaatgtcagctacacattgtaatcttgaaggtccatttcaaggctctcccgtctccttgtttctctgtagcctaaaggataatgagaaagccttgcagagcacagaagctcaaggaaaaggacgggaggccagggatagtacccaggagagcagtgagtgacctcagggcttagattccagcctcatatgctcaaggagtagcaggtagaaggaaactgtggaaagaaaactcctctctctgttcattcattcattcacaaatattagtggaaagcctattgtgtgccttctctagcttggccttggagataccaatgcaaatgggcaggctaggacctgccttcatggatcgtctgtcttctagaactgacttacaggtcagtaaagaggcaatagccacagagtgtgttaagtgtgtttgtgaatgcagaagttcacgtaactgatctggggttggtggctgtgcattagtgtgtagctgttagcatactccacacagtgttctaggcactattctttaaaaagtcagcattgttaaggttgactttgctctttggtagttaatatagcttcaagattgttcccaattacttcatatagccactaatttttttagattaatttttaattcacaaataaaaattgtatatatttataatatatgatgtgaagttttgaatgatgtatacattgtggaatggctaagttgagttaattaacaggtgcatcatctcacatactgatttttttttactaattttttaaacagctgtattagtgttccattttatcacaacttaatcaaccaatcactaactaatgagcatttaagctgagtctcgtttttctgtgtcaaacaatgttgtaatgaagattctcttctcatcatgcatgtgtttctgcatgaaaagttcttaggattcgcccagtgttttttaagcttggcttttcctgtgctcttcactgcagcagtagcaaggtctcaatagcgtcctttacaagataatggctcccacgcgcccatcctcttcagacctggtggggctctagtaaaagggttttagttctctttagtgagcaactgccaccatttccacaaaagcacacaagaaaacaaaaacgtttccattctggtggccaagaaaccactcctcttatccctgcctcctctggcccatggtgacttagttcagaatcaagcggaacttagcagcaagacaccaacctctcttctcacaggtcattcctagaaagtgtcagctttccttttcttctggactctgagagattcaagaacacagaaagcccaaggctagcaaatctccactgaagctcagcatacatcaaaaactaaagcctggtggag

SEQ ID NO: 1883313 - DNA, 4001 bp, Homo sapiens
ttacatggcgcacattccagtcaccattaagtgtgaacggtgtctttcatctcatactgtctggcagccgtctcaccagacagggcaaagctttgcgggaaaccccaggacatagggctgtgcacagcaaggtcccctgggctgctctgcagtggccacagccccacttgggggaacactcatgtatgataccccctcatgtgccctgtcccagctggagagctgctgcattgtgtccaggcccttggaggcataaaggtcatggagagatgtcaggaaaaattccagtgaatgggtctgctataatcacagaaactgctcctcactttcctgaatgtcgtgggtcccttccacccacccagccaccccatggtagaaccgctaatattggggaagaagccagaaaacaaacagacagaaaacattcccccgaaagagtggctcttaggtgtcccaacaaggtgagcaattacggtccagagagtgtccagattctgactcccagcaggggtggtgctagccccagcttggaaattgttcaaatatgtaaaaggttatattatgctaggcactcagtagcccttttgaaaacatgttttaaataccttcagtgtctaatttctcataggcttaacctggaacacaaccacacaaatgttctttccaaaatgcaaatcagactgtgtcactttcctactcagagactggtggctctgccttaatgatgaaattgaagctcagcctggcagatgtgtccactgtttcctctttctcatttctctttatatggatgccccaaactcatttatattcctcagacacacagtgatactcctccctgcttgcttctgcacatcattgcattcattcaataacatactcattcattgaatgaagatttattaagcacttactgcatgcccatatgttacttattaggatacaatgatgaataagaacaaatgcctgtcctcaaagatcatatcgtcaggagtactcatgcctggcagcacatcagaatcgtccacagggctgcttgaaagcacagaggtttgggcttcatcctatctcagaatgaaaagagagggaaaggaaacagcaagcaaaaaaatcataagagaatgaggggagctgattacaaatttctcctgttaccttcctgacaaccaattgggtgaatgggctgggctgtagagccaaaaagactggttcaaaactcaggcatttttatattctggcttgctgggacatttcccctttgcatctgtggctgtgaaattattactagttctcccttttactttcaaaagtgccctgttttggatgataagttctataatcaccttattctatagtcagttttaccctttcctacccgtgaacacgtgggggaaatggctgcaactttctgagcctcagtttcatggtctgtatcgtagagtgagccatacctacttgagaaggtgtgagaattaaatgagatgatgtttgccaagtgcctggcacagtagatgtttaattcacagaagctgttgttattgtttgccttgtagaaagtggttttcatctggtctgcatttttcactgtcaaatgaaacgagacctcaacgatgagaacattgagatgaagcacagagcatttatatcggtggagaggatggcctgggtcagcaagacattacttgggtagtcactggccagggtgacaagcctgtcttaagaatctctgttacaatattaaaacttcagctcaatggcctagaaagcttaactttactaccctccttgttggtttaaatttctatagcattaggtcaaatgccagcaatgggcccagaaggagggaaccgcagtctattttgatgtccagggtcaggctgaggagagagactgacacattatctgtctggctgactgtccactcccccccaccacagtggtgactcatcagagggcgagaaagacccgtctccgcctgtctgaacagtgattctgccggtgattcattgttgcccaccagaaagcccccttcttaatgtcctctttctgagctcttcaattagcatttgaggccaaaggatatttagagggaagggagggtagaaagatccgccagtcggaccgagtgtggcttcactcagtggcagtgggacacagggagggagaagaggaagtgctgggtacggcttgctcccagagtaggaacttggaaacagctagagaaaaaatatatatataataaatggtgaatatttataacattgcagaggtccttaggggtgaaggaatctcaccaaagacaggaagaagggccaaaactttatagaaattagaaatctttttggatgacattgcatgaagcttgctatgtgaatggattgtttaaaagtctaaggtatgtcaaactgaagataaagtggatcaacatgaagagaatatttgtagtctaggataaaaggaagactaaggcaggacttatccagtgctgttctagaaagacagttactgaggctggtagatattcaagtctccagaattatccataagttctctagtatgggcctaaaagtgattagttttcccaaagtgtgataggtaaaattagtaacatatatacacataaagaaaaattcttttaggagtaatctgtgcattcataccacttgtacatcaaaccaagattatcacatgtatttttctttgaacacaattaagtaaaaatatgcaaactttttctttctccagacatgccaagcttcagctgaaactcaagcctcatgcagttttctctgcttggaatgttctctgcccagccttcacctgcccagcttcttgtcctacaggtctcaagtcaaatgccttcttctcagtgaagacttccctggccaccttgtcaacataaatgtcatctggttattctctctccagcctgtggcctattttttctaaagaacttttcagaatctcatccatatcttggtttacttgtttgtaaccagtgtctctcctccagaatgtaagctccaggagagcagcacttcctccttgatgttattcctgcttcaatccttagcgtctagcccagtgcttaatacagatttgttgaataaagatccattaaagtgaattatggacttaataatgccattcttgcattggggaaaaaaaattgtggagttgtagtaaggacatggagaacctggacatggccataggaaagtgtaaaatgtttggtgataattatacttttccccctcaaatgagccacagacctgagagttaggtagggatgaactgttttcccatgctggtaaatatgaattagaacacatggcttagaaatgagtcaaaaacaggtttcccactcctgcctcttctgatagagatgacttactcagttacagctagaaaacttcaagcttctctctttcgtttcctccctccttctctttcccacccctcctatcaccctgactcagggaaagggctgtcccaggggactgaccttacagaagaggtagaagctgagagaacacctgtgactctgaaagccattctttcatggggaagagcagactaggatagaagcttcctccaaagctcttctgagattaaaatttctatatggaagtgagctaatgcaggaatgggtggaagtaaaatggatttccctagagtaaatatcatggtcatgcatgtgtcatgggagaaaagggaagctgaggaccactgtaaaccaccatcagttcccagagatccgggattatgtcttcaactactattcagagaccactgatcctagcatgtattttgtgcctggcacacagtagtggtcaatcagtgtgtgcctaacagtgtgctccgaaggaatggaagactatatgaatgattgactatatgagtgattgagtgaataaaatatgcattatacttctgcctcttacaaatctagttaatgtgagtctaatcttaaaccctgctcaccttagaatacagaataa

SEQ ID NO: 1883314 - DNA, 4001 bp, Homo sapiens
caccaccgtccccacccacctacctccttccagcaggcggatgcccagggcccaaccacctcccccccaccgtccccacccacctacctccttccagcaggcagatgcccagggcccaaccaccccccccacctacctccttccagcaggcggatgcccagtggtgacacttggacaatgtagcggttgtccccgatgttcccagcaaagaccgtggggccctgagtggcgaagccactggtgtccagctccatgatctcctgccccgtctgcaggatctgcgggcgacagctgtgagggaggcgccccccgcaggggaccccagccccaggtcccaggtcccaggccctgcccctcaccatggtggagtcttcccggctcagaatcaggaatccgtgtctgcggccgtcgtcgtctgcttcaggggtggtgctgggttcctgctctgtgccctcccccttgggattgtcctcctgtcagggccaaaggggggcaggctggaagccacagtccagtgaaggcaggcacgcaggtgcgacctgggcacccccggcctatgagaaggcagcgccggtcccatcccagggcctccctgcagcaggctcgcacctacctcctccttacgcaccggggcgatgactgtccacatgtcatagcagccgggaagctcaaaggttgtcaccacctggggccggatgctcttctagaatgatgatggggtgggggtgtgatgggggtgtgagcccacccaggtcccaccaggaggcgcccgccccctacctgcccacacacctgcagcaccgacaaagccccgttcttcccgtggccggagcaaaccacaatctccaggtccggctcggggctgttctgaaactgcacaggactcgggggtgaggactatgccccccaccccccctcacactccagcccctgcccccagccccgaccccaaccctgggcacctcttcagagaggaaggcaggctcgcccacggcggcattggcacagggtccaatgttcaggatgctgtcacacacctgcggcacagcaagagtcaggggcccgctgggggcgctggctgggacgggggccctgctgcctcaatctcacctcaaaggagtaggtggccagctgtgttcccgactgggcctcgctgccgtacacttcaatctcgtccacctcatcctgcggcaccgacttacccgcagctgcacacagagagcccacttgagcgcagccctgggtcacctggccccgctcctgaccagccctggaccggccctcacctgaccagccggccgtcgcatccactcgcttcttctttgagggaggctcttcctgtgaggcaggaggggcactgagtggcatgccacagcagtgcccacatgaagggtggtggcccaatgggcccaggaaacccaccttgtcggcagcctcacggacagcactggccgggggctcctgcagcttctccgtgtacttgaggaggagggaattgcccaggcgagaacccaggaacaggtacccgggctccatggtgaccatctgagggagggcaggtgtgtgatggctgggccgggtctggacccagacccaacccctagtcccaactcacgctggtggtgaggacgctggcggccgccttgtcaaagtggaacgctcggacactgcgcatgccgtcggtgatgagggtcagcacgtagctgggggcagggagaattctgagtcggggatggggaccctgggggagtgaagggggccaggggaccctacaggacttgtggggggcggtgtgggcagagttcatgggcgggggaggggctcacatctcgccgcccttgagggagatgaccatcttgtcgtaggagatgaaggtggcctgggcgcagtccagggtgatccgcacaccctcctgggtgcctgtggggtgggtggtcaggccgactaggcaggcccaagccgtccccgggccccccccgccccagccaccccacactcacgaagcgggaaagccgtggttcctgtggtgaggctgttgagagccacgccatacggggggacgctctggttcaggtacaacagcgagttgacggcaaacaccaccaccccacctggaggtggacacaggctggtgggcaggctcagtgctctctccacacactcccctatccactcccaggacacacacctatgggcttgggcacagccagagcctgggtgcagtcaaagggcaggctggtgagggaccagatgacggggtgcaccttctgcgtgatgttcagtgagatggccacaatggagcacgtgtcctgccgcacggccacgcgcctggggacgccagtgggtcagccaagggccttgcctccccgcagagacccaggcccagctcctcccgagcaagccccaccacaccccataggccccgccctaaaccccatgggccccaccccaggcagaggcagctagggggcccacagtgcagaggggcctccttagggggctcacccaggccaggtctggttgggctcaaacaggatgaggagggtaggctcgtagtagccatgcaggaactgcaggtcgatgatgttgagcagcttctcgtctagggcccgcacgtcgatgatgtagctgggcaggaagctggacctctgcctggggggccaggggcttcagcaggagaggaggggaggcggggaggggagctcgggctctggcgcctcccaccccagcaccacagcctgcctcagctggcactcacccctcacccacgagcccctcgtgctcctcagccaggctctccctgcggaagggcaggaccaccagccgcgtgccgtagacaagcatggctgcacagcgcccgtcggggtccacccgcactcgcggcgtgtgtacattctgcacaaacccgtcctgggggcagagggggcatcagccaggcccagcataggagaccccgagggaaacacttggggccacagaacccagctgcagggggagggagggtggctgggcggggcctgggcgggggcgggagcgcggccctacccgaagctcaggctcctcaaagtagtgcagtgacagggtcttcaggtcatgggtgcccgggtcgtactccaccacagacagctgcggtcagagggcacagccgtggctgccgactgccggtcctgacagtgtcgcccccggcaaccaacggctgtacccaggccctggcacccactcccacgccttggccaggcctaccccaccaagcctaccactcaccttggcatccttgaagcttaggagcagggcatcccgcttggctcctgccagctgcacgctggccatggacatgacgttgccaaagaaggagaaggaggcagcaagctcgagcttctcccggtgggccttcccctctaggggagacaccagggctcagggtcagggcccagccatgcctggcacccgcacagccccaggccgccccaccacactcacctgtgctcctgtcattcttggtcagagcctggaggggagagaaagacagggcagtgaggggccacatctggcagctcacctcatccggggaacgagaaaagaccaccaagcctggcccctgcctcctgggagctctgcccaaaccctctctgcagcagggagaagggcttctggagacagctgtgcacagccccccacagcgacccccattcacgctctcatgcccacggcccagccctggcacaggcccctccccaggaagcccctacctcacggctccctagcagccaggccctgtgcggcaagcactcagggttagagtgcactctgtgtctgcacacccccaaacctgcctggttgcacacctacagcagcccagccccggcccctgggtccaaatgtcacagggcaggaagccagagccaaggggtatctgtagctactgatctgcgtgcctgttagagaagaggaagccctgcgctatcctgacgcctcgggctcccccaggctgcctctctatc

SEQ ID NO: 1883315 - DNA, 4001 bp, Homo sapiens
taatcggaggcttaaaccatgcctaagagaagcatccagcggccttcacagtgagcagaaggggcagagcaaggcgcttcacaccccaataaggcccagcactgactgctttcttcttcccaaacctgtccagaaagggcggaggggacaccaggactcagaaagctactggtttcgggggaggtatattttgaaggcaacggcaaatagacaagggcttgtgaaggctcaggggtgagagaagctgttctccctttctgtcctgcagccaagcttgccttctgggactccagaggcagcccagcacctgcagtctgcaggatgtgcactgcagctttctctctgcgggggcaagcaggttgtgccacattctgcagacccagagaaggttctggaagtatctaggtgaggtgcaacacacttaacctctgcctgactctaaacactgctttaggagggcaaatgaagagcctaagagttaataattacacaaggattgcacacagtaggtacttaataaatatttggggaaactgaggccggggaggggccctgatccaaggcatcactgaatactaatttatttagcaggctagactgaggctttggagaggaaagaagtcctcagtaagcttcagtggagactcttagggcttgattattgtgtcaggaatcaaattaatctcctaagcatcccttatggccttggccttgcaaagccaggcctctgccatgctcgggggaagggatgcagcaggcttcctgggcagaaggatccagctcttggcctcctttctctgctcctccctctactgcagggacctgcccctcctccatttcctccacctggaaattaatgagcttaggtcttgccccatccgctgcagcttggtggttaatacagagctggaaatgggatgagactgtggcagcgcagtacgaggggggtctctaggaccagctgctgctcagggtctagtgatgggaggaaggcctgatttgggaagcaggttcttcaggatgaaaagcttaaccctttccattccctgacagcctctttcaaaacagtctttcctcagacccccagttgcacacattctgtttttccttctgttcacatttttaaaggaacacatgtctcccttgggtccatgtaggttattgtgcctctcccttcctctgcagctcctggatctctgcctgaaactgcaataacagctacagggagggcgtgaggtgctccttagagccatgaccacgctttcaactccgatagagcttgtgaacccgctgggagctggctccttcttgtccacatagcccaacgacttccttaagcttgtcaggtgctctcagctctacagcaaagtgtgacaaacagctccccctctcccttcctaccgcctgccctcctccccaaacctcaagcagaacacaatatatccgcagtccaggccctgaggcagtctgccagtctctggatgccaaattattatttttttaagggcaaaccaaaaaactcagctcagaacaaaaacacagtcacggaggaaggtgttgacccacatacaatgagtcctgagcccagagaaaaatctgcacacacaagcactccgcaatgcgctcccaggcgaccccctccccacgcacaccgcatctgtgctgcacagatctgcttctgtcacagaatcagcttctgtttctctccctgagtctgtttgcatctctaagcccctgtctgtcacaggctgcacacctccccaccccacgggctccggtgcgggacaggcagccggagggagctccagacccctcccctcgcgcccgcggccgctgcgcggaggtctgcggagggcgcctggctcggtcggtcgctccttccttggcgggccctcgccgacccacggtgctcagccagccccattcttggcattcaccgcgtgccttaattgtatggacatttaaatcaaggtccgctgtgaacacggagagagaggcctttctcctgaggaaggaaaggaggaaggaaggaaggaaaggtgaaagaaaggaagaggggtgggtagaagatggaataagaaaaccaggaaaaagaaataaaaagcggcgcgtgtgcgtgcgcactgacagcggggagagggatgggggtggggaacgccggaggaagggaccacagcatcctccccgccgcagctcccccaatcacacagacaatgagataacagcgacgtcttccaaaggctctttgttctcccccatcctttcgcatccaggctttttcctgcaaagcggagggggtggagggatgggggtgtgggtggaagtgggagacggaggggtgcctcccccgtgttaattaccccggctcccctcgcccctttccccgcgcctcgcctcccctgcagctccagacaatgaaaaaacaacatcgaccccacctcgccccagcgcagcaacccacccacccatgtcgccctctgcttcgcccaggaaactgaaggggactaggaggaggaagaagagagcgaaggacaaggagagcagcggggactcggcagcggcagccggggcagggcgcgcggccgccgcctctttacctccatcgctgagtgggggcgcagccgggccgggcgtgccgcaggggcgagttgccgcggtccggggctgggacctggggattcagccttccggaactcgcctgctgcagtcctctcgctcaggtcccaagtggtggaggggggaaaggaagagagacgagagagagagagacagagagagagagagagagaggaagaagaagaagaagaagaaaaaaaaaccataagagcgaggcccatctggcccctcatcagctttgtcaagtcttgcatacgctaaaatgctaatgacctagatagctcatgcaaaatgcagcagggagggcgggagcgagggaggtgggagggaggaagagagaggagtgcaggggggagggagggaggagaggcggagggagggagagagggagagagcacccctacactctccccaccccacccccaactgtcagcgggctttaccaggtaaagggtggacgtagatttaaaaggtcactcgtgtataatgcggctggatccccgggtcaaaaaaagggggcgagacagaggatgagagtccctaaagccaaaaggacaataagacatcattttaagcccccacccccatgccctcctccacctctccacactgtttacacacaaatcctgtcgccgcctcatgcatgtgcacggacatgtcaatttctcatcaatttctcagcgctcctatcgacagacacccgaattctcattcccagcaaaactcatccactggacccgagggaggagaagaccccttctcctcctcagtgctcttcgggctggcccatccctactcacctccatctccactctctactcccttagccctccaggcagcagagggctccttctcttttctaagccttgagtcccctgtcccctttccaacccccgcatcttgagaaggagacgcagagtagcaggaaagccaagtcaagtccacctaggtctcccacaattcagctacccctcccagaaaaaaaaagagaccccaacaaccccgacccctctcctacgtagacactgtgaaagcaagccacagggacaaataaaagacaatccgaataccctcagcgttccgcacgccgggcggacgcccttccgcagcggccacgcgtgttctgggttcagcgctcctgcgcgtcccttctcgccgaacccaaggtgctttgtcccggcggccacacaaggtcttcggctttttgttctccttttttaagagactggccgcagtccccagcgattcagccggcccaaccaaaggcagtggatctactgaaatgaaaaggatcgagataatacacaggcagatgaataaggggggggatgctggaggtgcaggaagcatcctgggagcggccgccacggccaagcccgaactgc

SEQ ID NO: 1883316 - DNA, 4001 bp, Homo sapiens
aattattttgtctgttactaattttaacaccctttatgtttgtgaatttatagacaaactcaagcaaatgcatagaaatttcttttgagaaatagccagccagggtggctacgaattggttgattttccgtctctctctctctctctctcccttgccattttgattcattacttagggaatttaaatttgtattgtttacatttaatactttcaacatctaagaacgatgaaatatgctaagaaatttagatttttgaatatatcaatactgactcatccaaccttcgatttctaaggcgaattttcactgcataagatttagtaaaccgccctgcctctttccgtcgcgtgagctatgaggatgtggctgaggtcggtttttccgcagtgcgggtttcaggcctcctggccctccagtgcctcccgccggctgggatgcgccgagcaggctcctgcgcagcagagcggtctgcagagctcagccctctgtacccgtctactaaggctgccgggctgcaaggcctggccgaaggtggcaagctgcatgggctcctgccctgtttcacctggtgggtccccgacccaccccttcctagttaagcctcgaggcccacacttgagtccattgcacgtccctttggtgaccaagtaagcactaaaatccgcggctgaggaccttatgtttctgttttaaggaagatgatttaagaaagaaaaggataataataaagccttcattctcctcaatttccttcttgcaatcctgcgatttaggtttcagcctaaataaagtggaaatggtttccccatacacttacaatgtatgtatgtgtgcattcctacgtgaagaccaaaaagtgtcaggcaagggtagcaaccagcttgagggaacgatttcagtaaaatattgttttgctgtatgtgacctttttctctttttaaatgttatttttcaaattacctaatatcctactcttcttttgagtagggacgggacggtcctattgcttttccagtttgattacggagagagaaaagggccacggtcagcaccgcggacagcgccaggcagggagggcgcggctactttggtgcatcctcttagctcctctcctttgttcccaacccctgcaggccaaggcagaacaaagacatcaaggctcgctttttcggcctgggtttttctttggctccaaagtcgtggtgcggaactgctacctcaacatagtccacctcactggcttccaaacaaattaatttaccgagtccttctaaagtttctgacctggtcctttcaccttatcccactcctttgaccgatttggacattgcgacaatgccaaaacaagagagttatcttggcgtcttaaagccaggcatgaacgcctcgagattgggaagaaaaagggagaagtcaaggggaaatgcgggcggcaagtgttcttcagatctttccaaagtttggacgtttcatttgctgtttcttgcgcagtgtggtcaggacgctatttaatgttacacctctctctgctgttttgttttcccagcttggcccaggactgcagacaatcacactacctgttcttgaaagaactagtgctttctaaatgatttaactctctggaatatttgcacaggcgggaactactgctctccagacagctgtcaatgaagcttccctaaaattctcctcggagatttgcctgcggatttccgcggctgtaatggaaaagtaggagcctttccctttcgaacactaggttgcttccagaatcagtcctgggtgggggtggggggcatttatgcggcaagagatgggttccttttactaccccctaaattccctgcaattgctttttcccctttctgaccctgagatgctttggtgtccttcaagtgcagccgtaggctccgctcttggcattcaccgcgtgccttaattgtatgacattaaatcaaggtccgctgtgaacacggagagcagagcctctaatcttgatccggaaagtataagacccactgcgattaccactcttctctccctgcccatccccctctctccgctctgagtctctacccctagagtcataactcataagcccagctcctgtctctgctcatctctgacacatctgccagagccgctgttaattagtctgttccgtggaagtgtagacggtgcgtgtgcctgcgtatacatatgcatatatctccatgccatttacagcacacgcctaaaaacatacataagcctataaatctagttttcaaatgacggcgtggatccaagttaattacccctctggtacagatctaattttgtaatcgtgttattttactgaatgcaattaacccagttggttcgccctgaatcctttctaaggcacttgtaaggaatggcaggtttttaaggaccacgctattgcatgttctccgtcataaccattgccaatcattttctgctgtcagggatgaaatctagcatataaaagagaaaaccatgcgtgtgtgcctgtaagataaacacacagatatgcctgggctctgtgtcctttgataacgttaccgcgggtttggttgggagattttgggaaaagagagtccaagggcgggctgggtcatctttctttgtaatgcggaaaaattaactcatccgcacctgcctagtcccgagagagctgggcggcccatctggtctggctacaagtttgctgcggagagaaaagcctgctcactaaagcttccccactgcccaggagcgcggacctcgggtctgggcccggaagagggattaggctcagggcagcgcagccgactcgcactcctcagccagtggccacagtctggggctggaagcgcctgggccgggcggagggagggcaagcaggagagagaaaagggtgagggaagttgacctctacgggcggagccctctgcgcagcgggcaggaggcagcgggcgcgacggctcttttcacggcgtcccctacggcgtggtcgacccgagggaaaggcccgctcccgctccagagtccgaggaaaggagagagagctgagagctggtcttgcgcagagaccccagaatgcgcccctgaaaaacagaatcaaagcgcagtgttagggaggcgggagagaggagggggagggtggggagagggacacgaggcgggagggagcatgcgagggatacaaggtgacaagaggacaggaccccagtcggccggtcgcgacctccgtccccaggcttcagggggacgcggaggggaccctgagcccacggagcgcggggcccgcagcccggggggagggggtggcgcgatgactgtaagcgcaggtctgggctgcggaagtccagaggagggtgcatgcgctgcggatactgccgcgtccagagaaacgatttcgggagctggagcagtgaaaacgagtccgcagatggtccttctgtgcagtcccagccgttcccgcattctgcaccccctttcccagcctcaccccctcccttggaccacacgccagacccgcactctcgaatctccacccctcttcgtttaggaccctgcaaactgcaagaccggcaagagaatcgaaacgatcgatgagagaaagaattacatatacccatagccctagaaatccggagagagacctgctagccctgttcaaacctgcagaggaccaaaacgttttcaatcgctgctcagcgcgttcgcagaggaaagaagaggctgagagccttccgtggtataaggtgctttaaggtgggaggtgggggtagggagggggtgggtcggagcggtccggtctttccccctcgcttgctgatccagaattagggattaatggctcgctccagccaaacaaataaggcatctgccttcagcacaagaggattacacgggctgctgacgtcaccagtcagacagatgttggctcccaaagtcctgagcagctcgctgtgtccttgaaaccaaagagccgcagaaggctcgcagccccca

SEQ ID NO: 1883317 - DNA, 4001 bp, Homo sapiens
atagtttgcatttcattatttttgagctcacaaaaccaccactccatttaaagatccaaataattgtagtaaacaggaaataatatctttcaacctgcaatacttttttggcggttttcaaaagagacatagacattgttgtacaggaatccttgtccacttttacatatggtttaacaagtgcagaaaaattacaaaaatgacaaattcaggggcaaaagctaaacaaccttttcaatcatctctctctccatatttacatcactatatagaggcatatagatagcacacacacacacacacacacacacgctaagagcattaaactaaatccatctctaacaccttacactttttttgtagcaaagcatatgttccagtggctaagatgcggaataattcttctagccaaaatagcatttcatcttcagtttaaaaaataagagactgacccggcagagtaacatttaacatctcctggggtttcctcgagcgtgagaaaggagaaagggaaagaaatattccctctttcaaaaacgtaattgtccttcgttttttattttctccttcacattgtcaggaaaaatatgttttttatatatatgtatatatgcatatataaatagacacttatttttccaaaccccaagagccgctgttgatctttggaggacaccgatccgcacaaaccggtcatatctgtgctttgatacaagtaccccaacggtaagaaaacaggcccttggttttaaactgaggtcagcacccacgccaggccatggggccgagcctcagcgattcacactttcttgggcacgagaaggctactttctcaagaagtatttcgaacttgggaaaatcctagtaccggaagaaaatggcctaaacacaataggactcgccattttctccttgtgaagcacaaagcgcttggcgctgcccgccacacaaagaaagcctgggcccgcggaattcttgcacattttcaagaggccaaaaaataccttctcagaaccacaatttctccctcctgggcgccgtgagacacaccctctctcccaccctcattcagtcctcgtcccaagaagatcccatatttgagatggagataaaagacgcaccgaaggcgcgatgctggcgtgcgagccaaccccggcaagaataagtcctgaaaaccaaggggcccggcccgcggctggccggggctccattctaggcccggggtgggggaacacggatcccctccctcctcttcagatccctccttccaattccattctgtctcccaagcgtgtctgagagcctggcaagcttagggatctctgtgacctgatttccatccattgccaggaaccaaccttacagcccggagctgagccggcggctctcaagcatgctcgcgacgcgggaactcctcgactccgcgcctcccgccgccccccgcccgccaccccaagtcaccgcatcaaagtcaaccaggatcgtgttctgcacgcccacaaccggcgaaacgcttctcccgctcacgtgcgaaaagtgtaagcttcgaagaagcccctgtgaaccaaaacaccaaaacacaagcaacaacccgattcacaaagcgaacactcccagcccagccggggacgcagagcccggctaccgcaggaaaggatggtacttacagccggcgtgcgctcgggtaatccgcgtcgcagtccgtgcggtggttagttggcttttaaaaaaatcactacacacctctacatctttgattttacacatcttccaccggtgagaaggaacgaaaacaagaatcttgtagcctagtagaatgggggagggggatgaagattttcattgtctacgctcggcacacgcagcccaaggaaagacgctcactgcctttggagctccttctactttctgcttgaaattcagaagctttcaacgcagtaaagcgggggtttggtctccctccctgcctccctccctctgcgttctctctctcctttctctctctctctctgtcatttccttctccctcctctcctctcccctccctctctcaagctcgaagtctctctctctctttctctctctctctctctctcgctttttttcaaaagagggcaggtcgcttcctgcatcccaatgagttaaatcagtcacttacttctcatgcatcagcagcctctttaacaacccgagggctgcaggcacaaaagagcatttagctgcctccaatttgtgtagaaggcctgtccttaatttgtttttggagtataattaaatcatgtatttcacgtaatataaaaataccgaattctcaactttagtgaatgaactgctaatggtaacctttgaaaataaatccctcttgttgatgttcttatcaagggcctagaacgccccagaattgcagaggcctaaggtctgggccccaaactacctgcccctcccccctttcacatgtcaaggtcacagtcatatgattcccccattgctttaaaatggagccttttatcaacccgtcgccctggaaaggaattaagtctcttttatggggtgggaagatctgaaggattaaataaataaataaataaataaatacatccttaatctgaaatacacacgtcagcagaatcaagcctgatcagacattgggatggtggcgtggggggactgacagggcatgtgagagtgagtggttttcctctccccgcttatccccctggcgaattttgaggtcgctgggttttgcttgggtttcttccagcgactgcgtgggacttctgggaggacagggcggcgcctttttagctcccagagtatctgaggggttctgatctcccggacaccgcccagtggtcagggggatcctgtgtatgactccccctcctctaaaggggctggggtacaaagagcaactctgccttcctgcagtttctctttcaggaagaactccaggcctggccattgttcctcctcaatgaagggggctgagggtgacaacagagagagaccttctcttctctacactcaccacccacctcctccctcactccacccaaggccactgctagggagaaatttgggaatattttcttgttccggagagacgcttgtctggaagatcatgagatgtaatatcatgaatatctcggttatctttgtattttcttcagtaagattccgttaagtcgtcagtgggctccctcaccccctcccattttccagttctaacagagcttgttcagaaacattgcactccgatgcgagagaggttaggaccgcagataaccgcatttagttccatcgaaagggaatgtaacaatataactcaccacttcccgcctctgaatattcgctcttctaccctaaatcaccctggggttttgagtaaggccacatttcaccttgagcatttatcaaaccgtacttggctgctgctgctactgcaggaggactcacaggccgccaacacccacctgacatctgcttgaaatatccaacaatatctccaaccgggtcgtttgcaaaaagcagcaaaccaaaaatgaaagaagaattttaaaaaatacagaaagaatataagtgtgtgtataatataatcccaaggtgctggatttgggggctcgaattacctaagacaaaacatctctgcagttgagaccagaccaaaggcctcaccacaagggtgttttattagcggcgagagaccacggttttttggaggcactacaagaaatgcgcatcaccccgctgccctttatctctcatccatgattctcattctatccgtttccagtttattgacctgggatgcgggactgctaaagatcgtcaacgacttgctgagcctgggggaggcaaagtcacgctgtgcgcactggggcccgccgctgggaaggtgcggctctctgctctggttagcagcagaatctgctctgtggggtgacgactttagaccaccccgggtgggcactttacccagcatcctcccctctcccccgact

SEQ ID NO: 1883318 - DNA, 4001 bp, Homo sapiens
tttaaaatgatagcaaaagggggaaatgctataggctttaggttctcttcctcatcccagttgttctcatttttctatatttgccaccaaattgaatgtacaggaagcagatagtttgcatttcattatttttgagctcacaaaaccaccactccatttaaagatccaaataattgtagtaaacaggaaataatatctttcaacctgcaatacttttttggcggttttcaaaagagacatagacattgttgtacaggaatccttgtccacttttacatatggtttaacaagtgcagaaaaattacaaaaatgacaaattcaggggcaaaagctaaacaaccttttcaatcatctctctctccatatttacatcactatatagaggcatatagatagcacacacacacacacacacacacacgctaagagcattaaactaaatccatctctaacaccttacactttttttgtagcaaagcatatgttccagtggctaagatgcggaataattcttctagccaaaatagcatttcatcttcagtttaaaaaataagagactgacccggcagagtaacatttaacatctcctggggtttcctcgagcgtgagaaaggagaaagggaaagaaatattccctctttcaaaaacgtaattgtccttcgttttttattttctccttcacattgtcaggaaaaatatgttttttatatatatgtatatatgcatatataaatagacacttatttttccaaaccccaagagccgctgttgatctttggaggacaccgatccgcacaaaccggtcatatctgtgctttgatacaagtaccccaacggtaagaaaacaggcccttggttttaaactgaggtcagcacccacgccaggccatggggccgagcctcagcgattcacactttcttgggcacgagaaggctactttctcaagaagtatttcgaacttgggaaaatcctagtaccggaagaaaatggcctaaacacaataggactcgccattttctccttgtgaagcacaaagcgcttggcgctgcccgccacacaaagaaagcctgggcccgcggaattcttgcacattttcaagaggccaaaaaataccttctcagaaccacaatttctccctcctgggcgccgtgagacacaccctctctcccaccctcattcagtcctcgtcccaagaagatcccatatttgagatggagataaaagacgcaccgaaggcgcgatgctggcgtgcgagccaaccccggcaagaataagtcctgaaaaccaaggggcccggcccgcggctggccggggctccattctaggcccggggtgggggaacacggatcccctccctcctcttcagatccctccttccaattccattctgtctcccaagcgtgtctgagagcctggcaagcttagggatctctgtgacctgatttccatccattgccaggaaccaaccttacagcccggagctgagccggcggctctcaagcatgctcgcgacgcgggaactcctcgactccgcgcctcccgccgccccccgcccgccaccccaagtcaccgcatcaaagtcaaccaggatcgtgttctgcacgcccacaaccggcgaaacgcttctcccgctcacgtgcgaaaagtgtaagcttcgaagaagcccctgtgaaccaaaacaccaaaacacaagcaacaacccgattcacaaagcgaacactcccagcccagccggggacgcagagcccggctaccgcaggaaaggatggtacttacagccggcgtgcgctcgggtaatccgcgtcgcagtccgtgcggtggttagttggcttttaaaaaaatcactacacacctctacatctttgattttacacatcttccaccggtgagaaggaacgaaaacaagaatcttgtagcctagtagaatgggggagggggatgaagattttcattgtctacgctcggcacacgcagcccaaggaaagacgctcactgcctttggagctccttctactttctgcttgaaattcagaagctttcaacgcagtaaagcgggggtttggtctccctccctgcctccctccctctgcgttctctctctcctttctctctctctctctgtcatttccttctccctcctctcctctcccctccctctctcaagctcgaagtctctctctctctttctctctctctctctctctcgctttttttcaaaagagggcaggtcgcttcctgcatcccaatgagttaaatcagtcacttacttctcatgcatcagcagcctctttaacaacccgagggctgcaggcacaaaagagcatttagctgcctccaatttgtgtagaaggcctgtccttaatttgtttttggagtataattaaatcatgtatttcacgtaatataaaaataccgaattctcaactttagtgaatgaactgctaatggtaacctttgaaaataaatccctcttgttgatgttcttatcaagggcctagaacgccccagaattgcagaggcctaaggtctgggccccaaactacctgcccctcccccctttcacatgtcaaggtcacagtcatatgattcccccattgctttaaaatggagccttttatcaacccgtcgccctggaaaggaattaagtctcttttatggggtgggaagatctgaaggattaaataaataaataaataaataaatacatccttaatctgaaatacacacgtcagcagaatcaagcctgatcagacattgggatggtggcgtggggggactgacagggcatgtgagagtgagtggttttcctctccccgcttatccccctggcgaattttgaggtcgctgggttttgcttgggtttcttccagcgactgcgtgggacttctgggaggacagggcggcgcctttttagctcccagagtatctgaggggttctgatctcccggacaccgcccagtggtcagggggatcctgtgtatgactccccctcctctaaaggggctggggtacaaagagcaactctgccttcctgcagtttctctttcaggaagaactccaggcctggccattgttcctcctcaatgaagggggctgagggtgacaacagagagagaccttctcttctctacactcaccacccacctcctccctcactccacccaaggccactgctagggagaaatttgggaatattttcttgttccggagagacgcttgtctggaagatcatgagatgtaatatcatgaatatctcggttatctttgtattttcttcagtaagattccgttaagtcgtcagtgggctccctcaccccctcccattttccagttctaacagagcttgttcagaaacattgcactccgatgcgagagaggttaggaccgcagataaccgcatttagttccatcgaaagggaatgtaacaatataactcaccacttcccgcctctgaatattcgctcttctaccctaaatcaccctggggttttgagtaaggccacatttcaccttgagcatttatcaaaccgtacttggctgctgctgctactgcaggaggactcacaggccgccaacacccacctgacatctgcttgaaatatccaacaatatctccaaccgggtcgtttgcaaaaagcagcaaaccaaaaatgaaagaagaattttaaaaaatacagaaagaatataagtgtgtgtataatataatcccaaggtgctggatttgggggctcgaattacctaagacaaaacatctctgcagttgagaccagaccaaaggcctcaccacaagggtgttttattagcggcgagagaccacggttttttggaggcactacaagaaatgcgcatcaccccgctgccctttatctctcatccatgattctcattctatccgtttccagtttattgacctgggatgcgggactgctaaagatcgtcaacgacttgctgagcctgggggaggcaaagtcacgctgtgcgcactggggcccgccgctgg

SEQ ID NO: 1883319 - DNA, 4001 bp, Homo sapiens
ccttttactaccccctaaattccctgcaattgctttttcccctttctgaccctgagatgctttggtgtccttcaagtgcagccgtaggctccgctcttggcattcaccgcgtgccttaattgtatgacattaaatcaaggtccgctgtgaacacggagagcagagcctctaatcttgatccggaaagtataagacccactgcgattaccactcttctctccctgcccatccccctctctccgctctgagtctctacccctagagtcataactcataagcccagctcctgtctctgctcatctctgacacatctgccagagccgctgttaattagtctgttccgtggaagtgtagacggtgcgtgtgcctgcgtatacatatgcatatatctccatgccatttacagcacacgcctaaaaacatacataagcctataaatctagttttcaaatgacggcgtggatccaagttaattacccctctggtacagatctaattttgtaatcgtgttattttactgaatgcaattaacccagttggttcgccctgaatcctttctaaggcacttgtaaggaatggcaggtttttaaggaccacgctattgcatgttctccgtcataaccattgccaatcattttctgctgtcagggatgaaatctagcatataaaagagaaaaccatgcgtgtgtgcctgtaagataaacacacagatatgcctgggctctgtgtcctttgataacgttaccgcgggtttggttgggagattttgggaaaagagagtccaagggcgggctgggtcatctttctttgtaatgcggaaaaattaactcatccgcacctgcctagtcccgagagagctgggcggcccatctggtctggctacaagtttgctgcggagagaaaagcctgctcactaaagcttccccactgcccaggagcgcggacctcgggtctgggcccggaagagggattaggctcagggcagcgcagccgactcgcactcctcagccagtggccacagtctggggctggaagcgcctgggccgggcggagggagggcaagcaggagagagaaaagggtgagggaagttgacctctacgggcggagccctctgcgcagcgggcaggaggcagcgggcgcgacggctcttttcacggcgtcccctacggcgtggtcgacccgagggaaaggcccgctcccgctccagagtccgaggaaaggagagagagctgagagctggtcttgcgcagagaccccagaatgcgcccctgaaaaacagaatcaaagcgcagtgttagggaggcgggagagaggagggggagggtggggagagggacacgaggcgggagggagcatgcgagggatacaaggtgacaagaggacaggaccccagtcggccggtcgcgacctccgtccccaggcttcagggggacgcggaggggaccctgagcccacggagcgcggggcccgcagcccggggggagggggtggcgcgatgactgtaagcgcaggtctgggctgcggaagtccagaggagggtgcatgcgctgcggatactgccgcgtccagagaaacgatttcgggagctggagcagtgaaaacgagtccgcagatggtccttctgtgcagtcccagccgttcccgcattctgcaccccctttcccagcctcaccccctcccttggaccacacgccagacccgcactctcgaatctccacccctcttcgtttaggaccctgcaaactgcaagaccggcaagagaatcgaaacgatcgatgagagaaagaattacatatacccatagccctagaaatccggagagagacctgctagccctgttcaaacctgcagaggaccaaaacgttttcaatcgctgctcagcgcgttcgcagaggaaagaagaggctgagagccttccgtggtataaggtgctttaaggtgggaggtgggggtagggagggggtgggtcggagcggtccggtctttccccctcgcttgctgatccagaattagggattaatggctcgctccagccaaacaaataaggcatctgccttcagcacaagaggattacacgggctgctgacgtcaccagtcagacagatgttggctcccaaagtcctgagcagctcgctgtgtccttgaaaccaaagagccgcagaaggctcgcagcccccagttgcagagcctaggtacagcagagggcaagagccctgcccttgccgacaacctcttggcgtcaacccagtgcccgcaggcagctccctaagacgtcgagcttccagcctctccaagcgctcccttcgccgtcctgctgtcaaaacccaggctctctcaaaacaagccaaagtcaccgttctcagttgcctctccctaacatggagacaaacgcccacaacccagtcgacaccttatctagatcccacatttaagctctcgggctcctgttcactcacactcggttggccaagtaacaggaaaataagcaccttaggccggacacagcccacgctccagctgagggaccgcctcttaattatgtgcgcaagcagcaaaagcagagctaatctgcatctcctcttctcaaccccgcagcctgccttcccccgaggccaaggtttaggtttatgtttaatcttatcacgaatgccattccggacgaatgtgcctttcaaaacaatgacgctttgccaacctaactcagcgtcccaaccagagccctggaccaccactcggtgaaccacggggacctcaccatggtcctgattaggacacggaaaaaatgtcattgcatattcttctcaagtactttgaatacgttgtctaaaactaaaatattaaaataagtatgtgtgttcaaaatatatgtagcatctaattccagcaacctgcacattcaaagaactgcagtttcattttatagccaaatctgatgaataaagatcaaaaattaatttatttataaactccaaggtccttttaaatgatgtaattttaacttaattttaattatgaactattttaattcttctaacctgcatattgtttttgctttatatgattttccaggcctttacaggtcacactaaagtcaggttatgaaataagctaaaagacacatcaaactggaaatttaaatgagcaattttgaataagttatgtaatccacaaatgaaatggttttaaatgaattttaattctgtaaaggagtaaagactattcaaacaatgtataaaacaaaataagctgatctccagcacagacccacactgaaccaatcctgtgtcccaaatctaatcagtatatatgaaaaaatctgtgactttcttggaaaaaaaataaatgcttgctcacaacattgcactgtcagttatagagtacaatgcctacacgggagtagaaggaatagccggattatatctccattcatattattcctgtctatcaaagtggcatttaattttcccaattttatgcatttagaaattcattcactgataaaaatcaatttaattttctgtagtgtcattcagccaatgccagtctaaaatagtaaaatttctccatccccattctgtttcaaggccttataaaaaacgttctacatctaaaactgatagttttaaattttatatttaccagtaccaaaaggtgggctttatcttattttaattggataagtaatatatactatttgaggcagggtaaaaactgaacacataatcattgtttctttgaaacttggtagaataagtttgaaatgccacattttaccagtctaattccttttaaagaccataaagattatttttgacttctaacatgctttgaatgtaaactttcactcaggtctcaaaattttattagagtccttttttgctcagtgatttaatattagttcgctgtccatggtcttgatccacatgaaaggacatgctagtgttaccttttgaaaaatgaaagtcacaatgcttctgcacaaattagactccctagcatt

SEQ ID NO: 1883320 - DNA, 4001 bp, Homo sapiens
tgggttccttttactaccccctaaattccctgcaattgctttttcccctttctgaccctgagatgctttggtgtccttcaagtgcagccgtaggctccgctcttggcattcaccgcgtgccttaattgtatgacattaaatcaaggtccgctgtgaacacggagagcagagcctctaatcttgatccggaaagtataagacccactgcgattaccactcttctctccctgcccatccccctctctccgctctgagtctctacccctagagtcataactcataagcccagctcctgtctctgctcatctctgacacatctgccagagccgctgttaattagtctgttccgtggaagtgtagacggtgcgtgtgcctgcgtatacatatgcatatatctccatgccatttacagcacacgcctaaaaacatacataagcctataaatctagttttcaaatgacggcgtggatccaagttaattacccctctggtacagatctaattttgtaatcgtgttattttactgaatgcaattaacccagttggttcgccctgaatcctttctaaggcacttgtaaggaatggcaggtttttaaggaccacgctattgcatgttctccgtcataaccattgccaatcattttctgctgtcagggatgaaatctagcatataaaagagaaaaccatgcgtgtgtgcctgtaagataaacacacagatatgcctgggctctgtgtcctttgataacgttaccgcgggtttggttgggagattttgggaaaagagagtccaagggcgggctgggtcatctttctttgtaatgcggaaaaattaactcatccgcacctgcctagtcccgagagagctgggcggcccatctggtctggctacaagtttgctgcggagagaaaagcctgctcactaaagcttccccactgcccaggagcgcggacctcgggtctgggcccggaagagggattaggctcagggcagcgcagccgactcgcactcctcagccagtggccacagtctggggctggaagcgcctgggccgggcggagggagggcaagcaggagagagaaaagggtgagggaagttgacctctacgggcggagccctctgcgcagcgggcaggaggcagcgggcgcgacggctcttttcacggcgtcccctacggcgtggtcgacccgagggaaaggcccgctcccgctccagagtccgaggaaaggagagagagctgagagctggtcttgcgcagagaccccagaatgcgcccctgaaaaacagaatcaaagcgcagtgttagggaggcgggagagaggagggggagggtggggagagggacacgaggcgggagggagcatgcgagggatacaaggtgacaagaggacaggaccccagtcggccggtcgcgacctccgtccccaggcttcagggggacgcggaggggaccctgagcccacggagcgcggggcccgcagcccggggggagggggtggcgcgatgactgtaagcgcaggtctgggctgcggaagtccagaggagggtgcatgcgctgcggatactgccgcgtccagagaaacgatttcgggagctggagcagtgaaaacgagtccgcagatggtccttctgtgcagtcccagccgttcccgcattctgcaccccctttcccagcctcaccccctcccttggaccacacgccagacccgcactctcgaatctccacccctcttcgtttaggaccctgcaaactgcaagaccggcaagagaatcgaaacgatcgatgagagaaagaattacatatacccatagccctagaaatccggagagagacctgctagccctgttcaaacctgcagaggaccaaaacgttttcaatcgctgctcagcgcgttcgcagaggaaagaagaggctgagagccttccgtggtataaggtgctttaaggtgggaggtgggggtagggagggggtgggtcggagcggtccggtctttccccctcgcttgctgatccagaattagggattaatggctcgctccagccaaacaaataaggcatctgccttcagcacaagaggattacacgggctgctgacgtcaccagtcagacagatgttggctcccaaagtcctgagcagctcgctgtgtccttgaaaccaaagagccgcagaaggctcgcagcccccagttgcagagcctaggtacagcagagggcaagagccctgcccttgccgacaacctcttggcgtcaacccagtgcccgcaggcagctccctaagacgtcgagcttccagcctctccaagcgctcccttcgccgtcctgctgtcaaaacccaggctctctcaaaacaagccaaagtcaccgttctcagttgcctctccctaacatggagacaaacgcccacaacccagtcgacaccttatctagatcccacatttaagctctcgggctcctgttcactcacactcggttggccaagtaacaggaaaataagcaccttaggccggacacagcccacgctccagctgagggaccgcctcttaattatgtgcgcaagcagcaaaagcagagctaatctgcatctcctcttctcaaccccgcagcctgccttcccccgaggccaaggtttaggtttatgtttaatcttatcacgaatgccattccggacgaatgtgcctttcaaaacaatgacgctttgccaacctaactcagcgtcccaaccagagccctggaccaccactcggtgaaccacggggacctcaccatggtcctgattaggacacggaaaaaatgtcattgcatattcttctcaagtactttgaatacgttgtctaaaactaaaatattaaaataagtatgtgtgttcaaaatatatgtagcatctaattccagcaacctgcacattcaaagaactgcagtttcattttatagccaaatctgatgaataaagatcaaaaattaatttatttataaactccaaggtccttttaaatgatgtaattttaacttaattttaattatgaactattttaattcttctaacctgcatattgtttttgctttatatgattttccaggcctttacaggtcacactaaagtcaggttatgaaataagctaaaagacacatcaaactggaaatttaaatgagcaattttgaataagttatgtaatccacaaatgaaatggttttaaatgaattttaattctgtaaaggagtaaagactattcaaacaatgtataaaacaaaataagctgatctccagcacagacccacactgaaccaatcctgtgtcccaaatctaatcagtatatatgaaaaaatctgtgactttcttggaaaaaaaataaatgcttgctcacaacattgcactgtcagttatagagtacaatgcctacacgggagtagaaggaatagccggattatatctccattcatattattcctgtctatcaaagtggcatttaattttcccaattttatgcatttagaaattcattcactgataaaaatcaatttaattttctgtagtgtcattcagccaatgccagtctaaaatagtaaaatttctccatccccattctgtttcaaggccttataaaaaacgttctacatctaaaactgatagttttaaattttatatttaccagtaccaaaaggtgggctttatcttattttaattggataagtaatatatactatttgaggcagggtaaaaactgaacacataatcattgtttctttgaaacttggtagaataagtttgaaatgccacattttaccagtctaattccttttaaagaccataaagattatttttgacttctaacatgctttgaatgtaaactttcactcaggtctcaaaattttattagagtccttttttgctcagtgatttaatattagttcgctgtccatggtcttgatccacatgaaaggacatgctagtgttaccttttgaaaaatgaaagtcacaatgcttctgcacaaattagactccct

SEQ ID NO: 1883321 - DNA, 4001 bp, Homo sapiens
agagcgactaaattacagatggagcttttcacagatggattttcatgtgaaggaccttgggtttttcaaacaggaatcttaaagatgggatctagggattgcaacgtcttgataccaagaggcaaactactgcagagatcaacacaagatggacttgtacgaaaaaagataatgatgacaaactagaatttttgccaattgctcagaccctactaaagagaattcaaagcaaatgagagcctaagaaaatgccaataggataaaacagtaaaacaatttgaatcatttgggacagagtaaaaaatcagaaggggaaaatagaacgtgttaagaaaagacgagaacaaaccagggacaaaaaaggctaggtttttaagatagatttgggtcattgcttaagacattttaagtaaaatcagttgagtgcatgatgaaataaaataaacaagcacacagaaaaaaaagttattactatgcagtttaaggcaatctaaggaacaaataaaggttttattttataaatttttggatttgttttttaaaaaacctttaactgacaaaagcaagatatacatttaaactaatggaattatttaacttctattaataaataatttcttggaaatcagtgaacaaaaaaattcaattaaattaattaattaatttatttatttatttttaaatagggtctcactatgttacccaggttggagtgcagtggcgcagtctcagctgactgcaacctcctaggctcaagcctagcctcccgagtagctgggactacaggtgcacaccaccaaaccaggctaatttttgtattttttttgtagagatagggttttgttatgctgcccaggctggtctcgaactcctaggctcaagtgatctacgtgccttggcctcccaaaatgctgagataaataattcaattttaaaaacatgattatattaaaatttctggcttgggaaaaaaaacaaacctgtttcaccagtatgataatctatgctaacaaagcacacaggactgatacatgaaaccagagtatcaagtgattgctgtacaatgaaaaatgagaaaatcaaccatcattaaggttgtaggtctatgtttaccagcacaccatcttggaaaacaagtttacatagtcagaataagtgaaggtaactgtatgaaccctatgaatattctctccatcaaaatctttcaggctgactagatacaaggagcagacagcttaggacagtacttcaagggcatgtcaaggtctgcctctgagacactacaccttctgggatgccactgccaaacaatgtctcttcatgagtgaaacattctttctttttctgtttttctaagagctagggtctcactctgttgccaatgccagactgcagctggaatacactggtgcactcatagctcactgcagcctccaattcctgggctcaagtgatcttcctgtttcagcctcccaagtagctgggactacaagcacgggccaccacacctggctaatttttttaattttttgtagaaatagggcctcaccacgttgttcatgctgatcttgaactcctggggtcaagtgatcttcccagctcagcctcccaaatgctgggattataggtgcgagccactgtgcctggcctggaaaattctttctttacatgtgctggcatcttcattacaaatcttgcaggcctgtgaagcctttttgtctctagtcagctgctcatatctgttctgatttattacacattcatttcctagttcaaatttcaaaaagcaaccatatttttaggttccttgggtgaagtgggaggggacagggagatttcattgctgctccaatacaatttattaagagctccctttttttgttgttttttgtttttttccaagaaagagtcttgctttgtcgcccaggctggagtgcagtggcgcaatcttggctcactgcaacctccaccacccgggttcaagcaattctcctgcctcagcccgctgagtagctgggattataggcgagcgccaccacgcccggctaatttttgtatttttagtagagatgggtttcactatgttggccaggctggtctcgaactcctgacctcgtgatccacccaccttggccttccaaagtgctgggattacaggtgtgagccaccaagcccagccaagagcaaactggaaagacagaatgttgatcattgctgaagcttagtgaaggtatatgggggctcattaaactgttttcacataaaatttttcttaaaaaaataaaaacactcagctggctgtcatttccaaataatgactatctttcattaggtttataatacgttgctacaaatataaacatgccaatgagttcatgaattttttcaatacctatcacagcaccttttatatggcaccttcagtcctgagcatacaaggtaaacagagcagactgtcttcatggacctacagtctcacggagaaaaaaaatattaaaggtgatgtttgacatttaatgttcataaagatagtttaagatattaaagtgaaagattaaacaaggtgataaacagatactcttttttctagagataataataagaaagcaatggcttagaagttaagagtatagggtctggagtcagaatacttggtactaattccaagttcaccaattgctaaatggatggcgttaggaaagcattcaacttccctaagtctcagtttccaaatctgtaaaataaggataccaatctacctcttaggattgtctagaattaaataaaattatccatataaagttattaccacagaacctaacagaaacattaacgaaacgtcaggtataatagataatggtgtttcagagaagttcaggtgttggcctttctggaaacaagaggattaaaagaggatctataaataaataaataaataaataaataaataaatgaggatctttggagatccttttttggtctataatcctacagtattcaaaaatcttaagactctatgcataactggggtaaacatcaggaagtggggaaatgagtgggtagctacaagccagaaagctggctgctgtgcttgttcttcctgaacccactttactagcaaacatgacaaaatgcgatgcaacacgagaaccctgctgattctgtgctcagtgattcacagtgttcaggaatccaagcctggccgctaattgggacaccatctctctggtaacaaaaacaaataatgtaacaaagcctgaatagtaattgcccagcactccagaaacaacctaattgtgaagacaccaaaatttaccataaagctataaagaggtacctgattttccacattcaatcaccagccaacctcacccctcacccatgtccattcatcttttagaaaacagagcttgattcttaatgctgctgctgaatagagaaataatgagctctgttagtgcacctgaaaatacaccatcagcctagagaaggagaacttagctcgtgacactttaatgaaaatgtcaggaccaccctgaagtatttaggtcctgtaaatgccaagtaaagagaggagctaaacaattaaggtaatggatgacagtgagcaaaggaaaaataaagctgattatcagagaaaaatcttcaacactgccccacttatgccataaagttttttcaatggaatttgtgattacacccaaggtcctgggtgttacctcagacttcattggaaaacactgtaagaacaatccaaattttacgggggaggagctacatagtcttaactggttttttctctctcaatctttctagggttctctggaaaagtaggcaaaagaaagcacattcttgacccttgatagaaagaatgcttggggagctgcacctgtgctttgttcaccaaggtgttcccagcaccaatcacagcctaaggtatagtaggtgtttggtaaatgtttgtggaaatagcaataacatgtttaggctaggaaaaatgt

SEQ ID NO: 1883322 - DNA, 4001 bp, Homo sapiens
gtcatggtgaaaatagccgtcatctattaggctcattgcttgtcaccggctgttctagtaattttatatacatcctctcacggaactcacctaatgacatttgagggggaagtgcccattttccaattaaggaaactgaggcacagagaaagcacatggcctgcctagggtgatcagctgggagacaccctgggaggcccgtcctggggtttggggccttggctctgatgccatgccaccttgcatccctgacttctatagggcacatgcgtgagagggaatgtgcagggtctagactcacctgttctcaactcgatttccctagatggtctcccaaaggatcatgttctaaattgctcacatcaacagtgtgtgcaactttttatgcttggaattgtcaatcttctagatgcttaccattctgatggatgtggaatgatattctagggaatattgacataagcatcacatgttagtgaacatgttctcctacctattcatgatgtagatttcctctttggggagttgcctgttcagatgctttgcatgttttttctttgggttgtcaccttattggtttgtagatactctttatatattatggctatcaatccattatttgctgcatgttgcaaaaatctgcctcacaaagtcacttatcttttaattacgtttatgggcctttttcatacagaagttacaaattttgataattcaaactgatcatttttctctttatgtctttaattttaaaaccctttttttaccctgagatcatagaaaagttttctgtgctttaattggttaaacgtgttttatcacatttggatcacacctggatttttcttttcttccatgtgcacagtcaactactcaagtgcgactcacacttgggcattaaattgaagatgatatgggcagttgcgaacattctccttttactcctcactaatggaaatgcttctaaagtttcatcagtaagcgtggggcttcctgtaggttaagccagaaattctaagcaccgtcgtcaccgctgtcaacatcgtgaaaatgctttctaagtatccatgtggcctggactcctagggctctgagccttcttgcatgaagcccacccaagcaggagactgcagcccaggcccaggggtacagaagggatgggcaagggggcttaaaagatgaggctaaacccagaggggtgagtgtggcacaacctgggggtgagtgtggcagagagggaaggcctgtgtccacggggagagggcagagggtggagacctgcccgtgctggcacatgaggagagaggagggcagtgaacagcataaatctggggctaagtctgcctcctgcctctgctactaacagtcagcctcacacaagttacttggcctcctcaggcctccgtttcctcctgcgtaaaatggggcacgcagcagctccttcccagcatccttcgaggactgagttaagtgctgtgagcagagcctggtgcagggtgtgggccgggccgggtgctgctgctgctgctgccgctgccgactcagttgctgcgggtggcaggtgtggctgtgattggtgttgaggtaaacgcggctgcagcaccgtccatcctgtatgccccggttgacccagtctaaggcattcaggccctgccacaggtcccagatgtgtcaggacattggtagaggagagctgggaggactccagggctgtgcctgccctcctggcatgctgagcaccagcgcagagccccggacctgacagcgctgctgatggacatggctgggggccagcctgcctgggttcgatctgagtcactgagccatccgttccaggattccacagatggtgaggaaagaggccttcggggtagggtttccacatgaaaacaggaggcccagctaaattttaatctcagctaaatagtgaacactaatttttttagcataagtatgtcccaattattgcaccagacatacatgtcctaaaaacatgttgtttatatggaattcaagtttggatgaattgaaatgtacctacgtttagctggtgctcaatatcttttagttactaaatatggggccctatttgggggaagagcatggacaggacctagagagggtctgtggtctgctaaggttggaaacagggctgcaggtggggaaatcaaggcagaccctctggaaggggaacgggtctagccacgaggtaccagcataactacgaggtggggggcacgtattatggggaggcttcagggtgtggggcctgggcctgcatcctgtcaccctattgaccctaaggccttggaaaatcactctctcggcctccctttcctcagctgtaaataacggggctcatcctcgtgcccctcgcactcagggctgcgtctgaggtggaccccacaggggaagagtctgtagcaggaggcggagtgatggatgccaatgtccagacagacaggatgggagctcagagaaagaagtctgcctgctgggtggatgtgagggcttccagggggtggtgacctggagctgggcccggcaggctgagccaagctttctaagcagaagcccccgagagcagcaccaggcggtgttaggttcagatggcccctcctggtccctcctgtcaccctgcccagcagggaacacggttgtccccccagctcccacaatggctgctgatgtgctggaatcatcgaacaccacgattttttagctcctctgcgtgagtggctttggcctgggggcaggggctcagctaagggggagggcaggggagagacggacgccgatcagcagccacagggctgccctcctcccctgcaagtgcccagggcttggaaccatccaagagcttcctgcggctaccccctctgatctgtgagtgtcctggctttgccaacagccagtggccctcccgagagctggtaaggactagaaagaaagccacagagccctaggcctgctcggcccctcatcatttagcactgggctcattctgcggccgcctgaagggcctgcaagcccagggaagctggtcccatcctccaggacggcttctcctccgtgagctctgcgggcgcgggtgctgccacagctgctggggactcgctgctttgaatcatcctggctggaggggaggaagcagcctcctcagagctggggctggcgacagatttctcctaattggcttctgagcttagagactgactctcacagcagcggtgaccggtgaccgtgagtcagatgggcagagaacagagagggagggagggaggcatccagcagtgccagagaggggcttgcagcactcaggccaccctcgctgctgcaatgggagccagcagggcaaggtcacaggcgagtaggtgacggcatggagccagaggctgggccagctgcagcgccggccaagaggagtggggccagccctgatctggagccctagagcgaggtcaggcttctgggccagtcctgtccttacgccatgaccaagtcctgatatcccgtggctccgacccttgctcccaccacgtgggctgatcgtgagatgtttctcggtcacctgcctgggatccttgaccttgacgtaggtaaatgaagaccaagtcttacatctcagctttgcatcatccctgcctcctcgagagcccagctccttggaggtccatgtgctccctgccccaatccactaaccctctgctccatgcatttgtgggggccgtcagacactccgtgctgatgggacattctagaaaaagcccctccaacactgtttcctgatgctcaccagccgtctgcttcctccacccgcatccccagaaaggaggcgactggtgtggggttccagccccacagacctcagggccaggctgtactgagacatgctttctggcagagcatagggtcctgacccaggttgcaggccgaggtttccatggtgaagcacatggcccggcctccttccttccctgctcagctctcctctccctgtc

SEQ ID NO: 1883323 - DNA, 4001 bp, Homo sapiens
ggcagagctcctgcggccaccagccatcctgtggtgtgggccaggcctgtcatttctgtgccctggctagggctcccatgatgccccgtgtcaggggttagactggtctcccctggtggtgggagaaaggggctccttcaggactgcactctggacagaaagtcagggctgggctcagaatggtctgggtggacggtcatctcagcctggagtcagggctgggctgagaacgccctgggtggacggtcgtctcagcctggagtcagggctgggctgagaacgccctgggtggacggccgtctcagcctggagtcagggctgggctgagaacgccctgggtggacggccgtctcagcctggagtcagggctgggctgagaacgccctgggtggacggccgtctcagcctggagtcagggctgggctgagaacgccctgggtggacggccgtctcagcctggagtcagggctgggctgagaacgccctgggtggacggccgtctcagcctggagtcagggctgggctcagaacagtctgggtggacggctattgtcagggaccccaaacagagggaccggctgaagccatggaagaagaacataaattgtgaagatttcatggacatttattagttccccaaattaatacttttataatttcttatgcctgtctttactgcaatctctgaacataaattgtgaagatttcatggacacttatcacttccccaatcaatacccttgtgatttcctatgcctgtctttaatcttttaatcccatcatcttcgtaagctgaggaggatgtatattgcctcaggaccctgtgatgattgtgttaactgcacaaattgtttgcagagcatgtgtgtttgaacaatatgaaatctgggtaccttgaaaaaagaacagggtaacagcaacgttcagggaacaagagagatcaccttaaactctggttgcctgtgagccaggtgaaacagagccatatttctcttctttcaaaagcaaataggagaaatatcgctgaattctttttctcagcaaggaacatccctgagaaagagaatgtatccctaaggggaggcctctgaaatgtctgctttggggacggctgccttttacagttgtagataagggatgaaataagccccagtctcccgcagtgctcccaggcttattaggatgaggaaattcccgcctaataaattttggtcagactggttgtctgctctcaaaccctgtctcctgataagatgttatcaatgacaatgtgtgcccaaaacttcattagcaattttaatttcgccccggtcccgtggtcctgtgatctcgccctgcctccgtttgccttgtgatatcttattaccttgtgaagcatgtgatctctgtgacccacatcctatttgtacactccctccccttctgaaaatcactaataaaaatttgctggttttacggctcagggggcatcacggaacctgccgacatgtgatgtctcccccggacgcccagctttgaaatttctctcttttgtactctgtccctttatttctcagactggccgacacttagggaaaatagaaaagaacctacatgaaatatcgggggtgaatttcccccgatagatgaccatctcagcctggggtcagggcagggctcagaatggtctgggtggacggccgtctcagcctggagtcagggcagggctcaaggtctgggtgaatggccatctcagcctggagtcagggctgggctcagacgaccagcagtctttgacctgccatgccgggagccacatctcgtgaccaggtcctggccttccacgctggccagacgcctgcatccaagacgtcctggtccctctgactgcacagtgtgacagccaccacccagccatgccctgtactcctggatgtgatttgctaattagggtcaatggggtaagatgcccaattaaatatgaatttcagataaacaatttttagcataagtatgtcccaaacattggtaaaaatgactatttgttgtttatctgagattcagatcaaactgggcatcttggacattttatttgctcaactagaaattcatgagtgcctaaggagctcaagggacattccagaccccccaaatctgtgtcggacacaggggcagtcacaatggggtgcagtggttgtacctggtgactcaggacattcgtctacctcctcatgtcccccctgcctctagcaccacagtgtcatgccctaccctccagggggcccagaaagcagtgcttttgcccagggccattgtcccctagatagagggttcagcccaaggagggcagccctgattcccaagcctcctgcagcactgactctccactgcagcaggcctggggtttctggccatggctcgcctttggctcacctctccagaaggtctctggaagcttcttccccacagggtcctcccttccactgtaaccttccctggttctgggaaacaaacttgagaggcccaggcgcaccccacctcttctctttaggtctccacagcttttcctctgcctcgtccccaaggggatcactctggcctttcccctctccagtgaccctctccacaccctcccggcttcccccttcctctgagcaccccagatgccaaaggacaaggtgagggagcctttggagaaatgttgcctgacgtcactggtcccccacgctcgggggacccacacggcccgccctgcaggcagccccctccccgcaggcagccccctccccgcaggccgccccctccccacctcacctcacagctgcaggggtcggggctcggaagtgctgggggcagttcaggttgaaggctgggcagcgtgcacttctcccccagcctcctggggcccgggcatcaccggaagcggagtttgttcccactttgtatcagtcgcaaagaaagagcacccaattggacaaaaggcaagcaggctgcgttcctggcccggagtggagaagagtgagcccctgccctgtcagggaagctgaggctgggggttgtgaggagtcccgtgccgggaggaggctgcaggagcgcctcaatgcacctcttgataccacgcatgcttagcaaggcctggggactgtcctctcgggcaggacttccgccttgtaatgacatgtcgctgatttaaagggaactgggggtcaccagctctggtttgtgcaagtctggtgcgttcttatctcccttgtatttggcaggggatcctaaacctctcctggtatgttgagacatctggagctcattaagcctcggcgcctgtagataaagagattaaaggaaaaaagaaaagaaatcccgccctggggcagctggggtaggattagcctggaggccacgcctctgcagggtctcccataggctgggccagcctctgccctccctgcttccagaaccccggacgctgatggcctgtggcggccactctccgcccaccccggagcccagcctagcggggagaaggccgccggcccgttcgaatgtccctctgcttccagggtcagcctgcacgccactctcacagaggccagacgggcggtggggcggggactcagttcatcctctgcctgaggagcaggtctcgggtgcgactgagcttttcaccctttgagaggagtcagggacacgcagcgtctccagcaagctggtggcagaaactgatggagcatcctaatcacaaaataggaagagagtttgcaaaataggagcatttaccagaagcctctctctctccctccctccctccctccctctctctctctctccctctctctctctctctctctctctctctctctctctctctctctctctctctctctctctctctctctctctctctctccctccctccctctctccctctctctctccctccctccctctctctctccctccctccctctctccctccctccctctctctctctctgtgtgtctctcaagtagaagtggggtct

SEQ ID NO: 1883324 - DNA, 4001 bp, Homo sapiens
cagaaatggctttgtatcgattgacattttcccctctgcagatatagcctctatctgcagagaccttttgcattaaaaaaaaatacaaaaaactacaaaccaagctggagttgagcctttaaataagtatgataaaactgacatttaaaattatacaataaattagctcaagttagaattataaactcaggaccagggaaaggaataattatatatcagaactaaaacgatataaccaaccaggtgcagtggctcacacctgtagtcccagcacgctgggaggctaaggcaggacgatcacttgagcccagaaggtcaagtctgcagtgagctgagactgttcctctgtgctccagcctgggcaacagagtgagatcctgtctcaaaataaaaataaaaataatgatacagctgatatttaggcagtagcaaattttacaacactatttgctactgtaatcttagtagagtaaaattttaatcttcactcttcccaagctatgtacaattgcatcttcctgtttgatttcctggacgatacatgagttgcaatatgaatcatcctcatcaactaagtgaatgagttacagtcgttatcagcatacccactggcgaaaatctttattatctacaatgctgaaaaagcaaaagttccatgaaatgggtcatttctaataaatcataaaacagaacctaccttagaacttaatagtcacttacaaatgtatccacattttacaaaagaggaaactgagtctgaagggaaatgggtaggtgacttgtctgagcgagtaatggccagagtgagattttctgtgatctaagatagtccaccctagaggaaactttaaaataagtgtgcaccgtgattggaaagctagctgataaaccattcttttcctcactccctggacttttgcttccttctccctttcctacgtaggcccagtctgcatgtccttcccgtctccactccagctcttctctgcaatctgacaatagatccgagaatccttctgttctgcatactgactccctcttctccccaggcaaggctaatagatacagaaccctcgctggaagacagaaaacgaaggcacgaggcactcagcggtctcacagggtcacccagcaaaggagtggcttaactagaaatagaaagcagatgctcccggcatccattagattaaagcagattacagaggcttatcccagcctcagcaaatgcttcagatgaaatcatgcatgcagtctggcatcaaaggaaaattagaagattctacctgtaaaagtgaaagcgtaaaaggctgccacatcatccgaaagttacaggtcactgagttttattaatttgctctgcaacagcaccttctgtgatctctagtttttctctacagtctaatgaaagaagaaatgctatttcagggactgggtatgaagtgagcatgtaccctctcttcaaaaggactgagggccaaggaagcctgtattctgttccatagcacgctggggtggagaagaaccccagtcagaagggatacgggcgacagccaagaaagttccatgtgagagaaagaacggaggaagcggaagagccacggctgctggagagggaagggaggcccagcctctccctgcacacaatccccaatccactcagctctgccacggcctctcacctcaaccaaacccagccctcacttttgggctcctggccctaaatgaaaagcatcatcaatacttcagagtagtggggattccagctcccactgctatccaggctggctgtacaagttaagagcttcccagcaatgccctgatacgcatgacattcctagaagaccaaagcagagatgtgctgttcctggcatatcaaggtagaaacacatccaacctcccaggaaagaaccatcaacagagactagatattacagcatcagcagcatcatcacgcttcttatgtaaactatgtaataagtaggtttctaattcatgatactgttctacagacaaactggggagttggttctattaggttaaattgcttctttccaatgcaagatcgccacctagtggctgaagacaacaaccgcatgcacaaatgatttcacatactgggaaggggctagggaggtggtgatgaaggaataggaattctcacccaggtctcaaacggctttttacccgacttggcaatgactatggaatgcctacgctgtgaaatggagaaattacgtggaataaagggtcaaccagggagtgtgctttatcacactggaggtatcaatatagagcataattctctaacctggcgtattaaaagctatttaacaccaactttcagctgtgaaaaaacaccatgcagctaaaaatgttgggcaagaaattaaaattattttctgacctagctacataaagtcccgttttcctctaaatataagctgattccattttttagctcagccacaggacttgtttacagtctaaaacctaatctgggtcccatctcagatctcctagatctgaattctaacaagatcctcaggcacaccacagtcaatgcgaagactccagcgctgtttcacagcaatgcagtcggagctgtccataaagcatgaagtcgctattggcccagagctaaaatgcttcaagcaactcaggacaaacacgtagatttcaataacaagtaaagaaatgcttaatcttaccttttgtgaatttcatatagtgaacacggtttttggagattttggacttttcctcaaggctaaaagatttcttttccttcttgtccgaggaatctttaaaaaagatgaaaaaaatacattaaagtctttctaatccaatctcatttattctcctaacagtggatagtcttgaaagaaaattttaggagccctatcattaatgattgaactctttcattcatttgctctgcaacagcacccttctgctggatctctgttttctttctaggagtcaaatgattagaaatatttccttaatttgcatactatggatcaggccaggctgccctccagaaatttagaaaatccttgaggaagaaatggaaacttgtgttcacacaaaacctagacacaaatgttcacattagccttattcatcatagcaaaataccaaaaatcacccccaagtccttcaacgtgtgaatgcatgaacagctgagcaacccctgggccatccttacagtggaataccactccacagtaaagagcggcggccgctgccaccgcaatggccaaaacaaactccagggcattgtgcttagtcagaggtccatctacaaacataacatatgactccatctacagaacattctcgacatgacaaaactacagagagagaggacagatgaatggtttcgaggggacaaggatgaaggtacagtgggtacaaatacaaagatgaggcatgaggttgctgtgccgtggtggccaatcctgtatcttcaccattgtggttgctgcatgaatctgcacttgtgataaaattgcacagaaccatccgcccatgtacaaatgaatggagaccaaaaaaagatgatgaaaactggctaaggtttgtggtgcagttgacagtaacaccaaatgtcaacttcccggttgcgaaaagccacagcaatgtaatgtctctccaccctgggagaacagggggaaagacgttcaggactctctgaattattttgcgaattcctacaagcctgtaattatttcaaaataaaaagttcctttaaaaagtaaataaaggtaagacaggttaaatgatcacctaaatacagatcagagatgacgattaggtgacgcatggaggagcagcaatagctccaagccaccttttcagggtttcgggaaggacaactggaagggcaaaaggagcaggaacacaccattgaggaagacatccgagtggtaacgcctttgacggaagggaaaatgtgagccagaaagtaggtccttgcctgaaaggttgatcagagcagg

SEQ ID NO: 1883325 - DNA, 4001 bp, Homo sapiens
ttaaaatatacaaaaatcataacacaaaattttaaagtgataattgtgtttactgccctaatttgcctaaaatatatttaagaattttaacattaacctaaaatatttttctaatatgagataaagctgatgttcttttttaaaatagtggtaccaacaccttagtcaagaagagtactgttgggacatattatttttgaacatacctgcaaaaaggcaaataataaagctgtttattatggtttccctgtcatagtacctaacaaagaattaactgaagtaaccaggaattaaattaaaccccccccccccttttttttttgagacaaagtctcactcttgtctcccgggctggagtgcaatggcgcaataccggctcactgcaacctctgcctccccaggttcaagcgactctcttgcctcagcctcttgaatacctgggattacaggtgcctgccaccacgccgggctaatttttgtatttttagtagagacggggtttcaccatgttggccaggtttgtctcgagctcctgacctcaggtgatccacctgcctcggcctcccaaactgctgggattacaggcttgagccactgcgcccggctaaatgatttttcactcaaaaaatatttggtgcgctcttataacctgacagtcataaagcacaaaaatgctagagtacgcattataagaaaatttcactgttgatcaattgaaagtattcctattgaggaattttttatacttgataataggccactggcaggttaatctcattctacttctcaatgaattcatacctatgaataagtaaacaggatgtaggaaggacaggttccttgagtcacagacatcacctcatcaaagtaggaccaaggtgattttcctatgagtttgcccaacatgttccataccaaaaatcacttctcaactaatatagtcaaaaacaaatatacaaggctgggcatggtggctcatgcctgtaatctcagtactttgaaaggccaaggtgggtggattgcttgagctcaggagtttgagaccagcctgggcaacatggcaaaaccccatctctaccaaaaatacaaaaaattagctgggtgtggtggtgtggtgtgcatgcctgtagtcccagctactcaggaggctaaggtgggagaatcacttgagcatgggaggtggaggttgcaggcagcagagatggtgccaccgcactctagcctgggcaacagaggagaccccgcctcaacaaaataaaatacacacgcatacactccagttaaagatgaggggaatcccacagtaatttgagtctacttgcaaatattctttcaaggtagggaaggagaattctttcgaggtcaagaagaagaatgggatttgggaaacatttttaactaccataattttaacgaccaaagggctatccaaacttattatttctttgttaaaatcttggaaataataaaaattttgaaaaaaattaataacctatttagttattgtgatacactgttatatgcaaatgtccaagtaagcaattatattatatagtgacattttataatataaaatggtggcctatttggtagcctaattgtatatgttcaaaacgcaaagttaaacaccatttctaaaacagaacaatgcagaatgaatgaatgctcaactacctgtgctagtagtatataagaagatatccataaattatactacaggtacctatttaaagtaattatatgtagttctaaaaatatgtattggatactttttggagataatttacctcagtggagcattccttagtattaagaatcactcatatgttctaagccttgaattcagtgcctgggtgactcttcctgtatctagctagctaggctactggcctggaggtttgggcaacaccgaggtgagtatgaccatccctgtcctcaaggagcttcagtctagtaggggatgagacatactagactgtgagctcctcgagggcaggaaaagtgttttagtcatctttgccccagtgactagcaccaggctcagctactgtaggtgctcaacagtgtttatcgaactgaattgaacacgggttgcagccatctatagcagcatagggtaagcctgacaagaagaacaaagagctttggagactcagagggtgaaggctagtcagctgtgaagtcacagaagacccagtgcgtgaaagaagccgagaaagatgggtaagatctccccaaatgaagaaggaggcattctgggctgacaggagggttagtttagctactgtgtgtgaaagggatgagaagacaatctcaggccataatgaaatgaggcctaaatgttactgtggaagcctttacccaaacataaaaggtgacaaaaccccactgaaagttgttttgaccaggggagttatttttccagtgacatttcaggaagattgactaagctggtcatgccagacagatgggaaaagagcgtgggatggagggtggggggcaggcacaaggagtgaagcatgactccaagatggtgccgaagataaaggcactattccaacctggaggaagtgaggaggaagggctggcatagaagagaatgtaacagcttgctttctggataaacatgatgcccagccagcaatttaaaatgtaggtttgggacttgagaaaagggcaggaccagaactatagacagacagaggtaagcagcaaagccatgtgaatgggtcagacatcctgggaagagtaatgagagaaaatgggagaaaataagaggctgaaaacagaaatttggttaatattcatggtaaaggtggagagatggcaagtcaatgaggtagaaagagatgccagggaggtggggtgatagaactggtatcagagaggaacaatgccaaggacagaatctgtcaaatcctgaggaaagatcaaggaggaacaaataggagcaaaacaacatgcaataaagcatgtccaaaagccagctgtaaaggtgagagaataggcagttaagttatatgagaattaattaaggaactgaagatttttggcttgaagaaactaagaggaggtaaggaagctgtttagaattaccctgaaggcctatcgtgtgaaaggcagagtagggttgttctatggggccttgaaaagtagaaccaggccggtgtgtgagagttatggggacggagaccaagagcgtggctggtctttccaatgtggggctcactgtattgtaataaccagtgatacctcggtctcctccaccagactttaaactctctgggggcagggattgggtcttgttcactgttggacccacagaacctagcttagaataacaaaggtgcttagcaaacattttcagactggatgaatcctttgtgcttctacctataggtcttaattcttctttgaaatactctccttaaaaggaatcctgtctagcaggttgaacagcttgaacatgtggtgagaaggctgggctagatggtgaaaggcctggaccctgcagttgatgatttttaggaaaaagactaaaatacagcatgaaaaacaaacccataaaaactcacataaaatggaggaagtccccaagtgtgaaaacaggtgacacagcacacactgaaccatggtattgtttatataataaagcttctcatgcctatgtgttatattacagtatcttgtttattacagtattaagtctcattctagactccaattcaattcaattcaacaaatgtttattgagcacttatatggtgccaggttctaagcttggcattggggctacagaaatcagtaagacacaatgatgcccgtcaagagctctgagtgtagctggggacatgcacaagcgaacaagaacctctccaggccaggcaacagggtagagtatgcacatgcttctctgagggattcagcacactaatgtccctgcgtgcttcctccaggggtttaacagtacctggcacaaagtagtagccacaaaatggcac

SEQ ID NO: 1883326 - DNA, 4001 bp, Homo sapiens
gcagacaatgtctcatacataaaaacactccaggagcatctggactggaattttgcccagttaagtgacagtttatgaaaatagcccaatagccccagttgcagttaaaaaaaaagtccaaagactacaaagagttgcatactatcagggcacaaatccataaaactggttgcaacattgtggctagaaaaagaatattttgagtgactaaacaagaaaatgaattctggttgcttaacctgtctgactttgtagctttcttgatacctttcagactctaccatatcgatactatcctaattgcttgtatgtattttatttttatttcacagactttgtatttataacagtggctatcactctgtcagcatgggtgtattctgaagaagactttcagcctctcctgggcagatgtggccattagactcaatcggttttaaaattatttccaacctcaaacactcaatgtaacaatatagcacccagcagtgcctcacatatttagatcagatggtaagagctttcaggtgacgacagatatctacatgggagggaattttaactcacaaattctctgattcaaacactgactgtgcatcacaggcttagaatgtagttattttataaatattgaattttcactagtcacattgacaaacaccataattagaaaatgcaatagtgggatgtgatgaaattctgtggtactctttttatttcttaaccaatacattttagaaaagtgcatttgacctaaaatgggcacgcctcacccgtgtgcatccacttcacgcacttgcaaatcctccccaacgacttcatttctgcctagaagcagaatatgcccttccccgccaagaagcttgtgaaaaaaaattttctgagagctgtccagtccatatactaagaattcattttccagtttttacatgtataaatagattagtaattgttttcaggttttcttatttttacaattggttaagcatggattttgctgtctgcacatctttaagaagtcatcttttatactacacaaacactatggttttctttacctgctctcgttgccagcaaatgaaacaatgatacaagagaactggagaccaaggaggcccctcgtgctctggttcgtgcaagaaccaacattgcacataatcttgggagttggactaacactggcagctcctgaatttcgctatagaaaggacttaggagtgagaaggtttttggaagtgaacgctaattaatttgcctggaagctacattacagagcaagcacacttgattttacttagattacttagattgtaaatttatgagggatgacttagagggggttgctcatggagatttatgaagggacaaaactccctcttccccaagtgctataccttggcaatgccactgctaatgttctcagaagtacaactactcaagtctgtgtttatttaataaatgaaagtcaggtcatgtccattgcccacccacactgttctgcaatttcatatttccttgtgaaatgacttggaggttcaagctggatcctgccctggctctgacgccagacaataatacttcctgctcaaacctcataccaactgcagagcagaactgctttgctgaacagttaacacatgtgatggagtgattctgtattttactttaatagatacttaatttctattaccctgtctccttgatgtgtcgtcttttagaattttatttccttctaacacaatttttctaatgatatcttagttgtagggatataaacagcatatgatattttttttcccgaacatttcagaagtttagtttttttctgatttctgcttgctatccatgggcctagttttatcgtaaatatatttttatttggagtcagttacactagaatctgcttctctgtaagggaaaggagttagtctgctatggactgcaacttgttttgatagctggtaactttgaactaaagggacattactgttatcaaaacagcaaccagcttttcttggaagtagaaactgacatggtctttttttcccccttctttctgcctaaggtcgtatcccttgactacaagcaccatctctatgttttactgaaggcttttccctttcaaatctcacaggccaactatagaaagatcagactcttggtcagagtcctcaaaaggaaacagtctggggcatcaaaaggccataaattcagccagagtagtggtatttggaaacgaccttaagtatcaatcttagaatgaaaatatatgacttttacatccagttcaatttttgaggttatttactttttagagaggctgaagagaaagggttagtacatcaactttcaacctgaaacatatggaagaacgttaaatacttttaattttactagaaaaaaaaatgtctgcaaagtattttaactgagtgggttttggcaaacataaaaactcaattaaataattttttcctatgaaacttttggcatgtccctaaactgggttttcttgtaatattgtctgaattagaaatcaaaattgagacagacattaacagtagtcaatcaaactctgatgcaaaagttgccccatttagtggaagatcctgacatcctgacatcttccactggaaaaaaaaaaaagaaagaataaaagtaaaggaagttcagctgagctgctataccatcatgaccagtgcaactttcaataatgatgtggccctatgctttagagcacagtgatattattcacagttaacttctggacatgttttaacaatacaattatcctgccatgcttatcctaaccattgaaagaggatagtttgtgaagattgcaatgttaaacttgatatgttgccaatatgtatttttctcctctgcctcctgaagttcttccaaaatttccttaaatgaaatgtttatcaagtcaaaaaagataaaccatttgggagatctcagtagatgaaacatttcaaccaagttttggaagatgagaagtgtaggagagagattactgaggtagctgagtgacagcactgtaattctaagtgcagttatccccactttgggatcctgaggagaataaagttgattcaccctgaagaaatcccagagaggcctgtaggcatcagatttagtaaaaagaaaaaggggaaagtctgagggctgaggataggaggaatggaagtctatatgaaaaagaaattgctggatctcctatggccagatgactactaccctcctgacacctcccaggagatcatagttttattctctgtagttagtgcctggaaagactccatctatctttggcacacatggatgttagtgaggcaagaagcataaaactattgcatgtgtcccttggtcacttcctcaagatgcactgtcccgaaggaacaaccaagcattgatcacatgccaatgctctcattgccaagaagtatagaaagaaaatatttgtctcttaaggccttctttagtggggaaaggacctctgctttccagtaacttccacacattgcagatacccacgaaaagaaataaattttagaaaattaatagaaaaaaaatcacagatctattcccatatagatatatgtttcccattagccagatgttcccttcctcctattcttacctttccctcaaaagagttaccaccctactcaaatatcccttttacaacccaaaatataactactcctctccaaaagtaggcaatccatagtctgataaattactaaattcctccaagtacaggatctccacttattgtaatatggtagcaccggtgcttatcagtgctacctgatgggtatcattggaaatacacatttgtattcctaaggatgcttaatcctcagctatccacaatttataaggctgtattaacccgctatcagctttgactagactcatggtggtatgaaaggggaccaaaagagatcacttgactttcatccacatgacttccagatcccacagcatagcagaaa

SEQ ID NO: 1883327 - DNA, 4001 bp, Homo sapiens
caaatactgcttataattagaaatgtattagcacatacttcaaattcaaacttggaaagttgagccatgttctcttggggactgcactaattctcagatgctactgagtacacttttcttctctagtgctgcatgcacacctgttattactaggaggtagcataagcaaagataatgcgactgctcaattcaagagaggagatagagatttgttcaccctctgtctctctcactgctgatcacatggatctgtttctttgtatttcagcattatgtggaggagatgttagagggcctagtggaacaatcttatcacctggttacccggaattttatccaaattctctgaattgtacatggactgttgatgtaacccatggaaaaggtaatttgcctcatgaaataataattggactatcttctgaattttcattgagtctattcttatttcactttcctttacatgttattttgcatgagcaaaaacagatcagtactacaatatgctaaaacacatttcaatttaaataattgccacaaaaattatatttactcttctatagtattatattgtgctcatgtttttaccaggctgttgctatgagagatttgtttacttttgatataataaactaatgtcatttgaaatttttgtaacaggaaaacctcaaacaagagggctttagtttctggcatagtgttaagaaatggatttcaggagttcaaaggggaatatgagatgctctgatatgctaagccaatttttaaagcaactagtatgtgtttatatatacttgtttataattgtttgtaacaattatattctctatataaatttatagccattctataaatatctgtgtctcagattctttagtacagagctatagatatgtctcacatagagtgtaaaattgcactctgcataaggtagatgttaataaatgtccttttacaaataaacaaataagtaaaaggctctgtagtattaaacatggttcattcatgagattcaaccactcataaaacttttacaacctacttcactgttttgaaaggaatctgtaaagaatgacatgtatccctataggaatctataacaaacaattttgcatgattaataattcgttttcttactgcttaataagagggactgctaaacaattactcatgtttaatttaccatccatttttgcaaatattgcttataattagaagtgtataagtatgtatttcaaatttatcaagatacagtgtaatttatcaaggtaacaacttatgaatggtaaaatgaccattctaatatatgaaaacaaaaaatatattaaagttatttacttgaaaatctccatgggttgatcttctaaaagagctagtttattcattttaaaatctgattttgaaaagtacttttttttagctctgttgatgtattatattattgaattttactattaaaatatatttattgattttaatatagaaaatctaaaaaaagaaaaagtcaaaacaaaatacttttagcaatgagaagatgttattaccattaaaactaaaagcttgtgtttaatacatttaaatttgcgttttcagaaataaagtttgcctttgattaaattacatatatattttatcaggaggtgagaattatgtcaggactagtttggttaaatttctacaatgaattaaatattactgagaaaaagcgttgttaaaatgagtattctggtactgaatagcaggaatgaggtagaagactttgtaaactgtgatttttgtcaatctttattaatagaagactctttgctggaagttaaccaaagtgtcccattatcccagtgtgcaatagattaatagagtttaaaataagctccctgatattatagaagggagtggagggctacatactgcttgctatgtaaatagaggtttaattaacacttaaagttttgcatcttcacaggttgcaaatgttaattaaatctgtatttacatggcaagagatgcggacgtagatgcctttcttttaagagccaactaagtttgtctgaagtacaactcttccaaagtgtagcaaatttacatgaaggaaaatttcaaagttgggagaaatattcaaggtaatatagtctaacctcttactcagaaaactagcttctccgtatggtgtttcagaaacatgatgaactggcctgttatgggtatttctgttgataaggactgtactccttgggacaaattcctcattttttccatatttgattgtttaaaaattattctgcagccgttatccctgttctgctctctggagctataccaaaaaaggcagcctaatccttgctccaaccaaaagctcctcaaacacatcaactcaccattctgagactaccatgtttttcatgtcctctatccctagatcatgattccaagtcttttcttcccagactaaacactcctagtttctttaattcatcataagataatattttcatgttcatcaccactctaatcaacttcctctggatgcattccagcttatctctttaaaatgtggttttctaaaactgaacacatcatggcacagtgtaacactaaaattattttcattgaagaagacagtatttgtgttaattaacttttttgctgccatgttataatactaattgataagaagtttgtagtaatctaaatcatctttttagattactgggacttaaaatacagataaattcaattcttaaaattctataattatgcaattgcttttttctatcttcagtgcaagcttttatatgtatccctgttatgctttatcatattgattttgattcagagttcctatgagatcattttgaagtgatttacatttcatttacatttacattgtgtagtcagatgttcttatataactatgatcattagtattttaagggtttataagaatcttaacaaggataaatctaaatatctaaatatttaagaaataataaaatgtatatgtaccatctgtaatctcttcaccattaaacattaagtcaaggtgtttgaacacatacaattgttcagtagtttcaaactcagttaacgacagtgtcattcagcctacattgctccttatttacaaggacaccatgagagattttccttaaacacgttgtagaagtcaggatgctaattataaatagttacgggaaacctagagaaaaaaatgtacatcaggaaaaacccttagacttttagaagttggactgtccttaaataaagcatagtccacacctattactttacatattagaaaaaaaaagtcaaatggcaccctttaggtaatagctggtggcatgactataactaaaacctagatattaacgctattttgactttaagtacaagtcatacagatatatatatatataaacataaattacctttattgggcatcttgaattagcattcttactagaagtaattacgatattgaaaccactgactttttctccctgccttattagaattggttgtcttttcctgtctaatccccttctttccaaaatgtctatactaggtcctcaccatcacaaacttctcacttttgaaagtcattgcctttttgatttaggaggtcattgctttggggttttttgtttgtttgtttgttttttatgtttttcctgagatgggttctcaccctgtcacccaggctgatcctggctcactgcatcctcagtcttcctgggctcaggtgaccctcccacctcagcctcctgagtaggtgggactacaggtgtatgccaccacactcagctaagttttgtatttttttgtagagttgggattccaccatgtttcccaagctgatctcaaacttctggattcaagcaatccacccgtctaggcctcccaaagtgctgggattacaggtgtgagccaccagacctggattgtcattacatttgaaggtcatttttatacccctctacggacccctttgacaaattagttac

SEQ ID NO: 1883328 - DNA, 4001 bp, Homo sapiens
atgtatagcttcttctaagagacaaagtgaggcaaatctgatagcccacatgatcaaagaccttattacataatcaggaatgtatgtaatataaagatataaacatatggccattaaacaagaagaaaaaaggcaatgaattaaacactagaattaggaatttaacctacaggctattttgtagcctaaaccacatgcatatgctgagtatttttcacatctagcatatgaaagaaaaattctatattttatgcactgaggttcaaaaacaaattgatgggcaattcccaaatatgcttaatttgggagaaaaacacttcataaaactacctttacattatatgctttgtaatgcattgcaatatgtttctcaaagtactataaattataaaataatgtaaaaatttggcaagtttcaaattaacatgtggagctcactaaaacatagtatgctatgcacctaagtacagaataaaacagctctctcgtaatgacaaagaaaattaacaaattattcattaaacaaataaaatatataattagaaaaacagcactcaccttcaacaagtctccatgctttcatttcacatttttatttaatcatgtatttctcataacatttagacatcttccacaggagcaccaagcatgaattctaattctggatttaggcacaggcaagagcatacagacacttgccaagctgctaggatgtgtgtacttcttacataattttcgttttatacttgtttgttttgcttttcacctatacagaatgtggatgtatcaccaaaaaaagaaaaggcaggctgatttcatggaactgaaaaacaaagctataaaaaattaattttcagtattttaagtaaagacatgaaaatggaaataacgtttagaccaatcagtacatatatagaactaattatcaggtattagcttatttttaaattgttacctcatttagtctcaacaatcctatcaggtaggtgctattataatttcaatttagtcgactgaggaaactgaggcacagagagattaataacttcccccaaagtaacatagcgaagtaactcgcagaatcaagatatgagctccagaagctgggattcaaaattctttgccactatattacaacaatatcaaagattcaaagcatttccattaaaccaaaaagttggcatcatctttattgcaaaaataaaaacaagttatgtctgctttaagcattatggcaactatttactgaacacctacaacacagcattaataataactagcatttattgagtacttaatatgacaggtactgtactaatgaacaactttatattcatcatgtaagtcaatccatgcaatcacatacttattttacagatgagaaaaccactgaggtatggaaacagtgcctttccctcctccaaatcccgtagcaaattcacttgtggagtccagatggcaacaaatgtctgatgtcaaagcccatgcttgttaaagcacactgcaatactacaaacccgaccccaactaccaaacaagggcattcttttgtcccaatacccagagccttatgtcatgttagtgctatagcaaaattgaaaagatacaataaaaatttaaattgagtaacaaatttaaaggaattttaataaatttagagtaatttttcctctataagcatactgtttttctgttttaactactcctactgcaaccatgctttcttctgcttttctctgcaaacatattcaagtagatccctgccagctagacaattaacacactttttctctgggagaacaaaatggtctcacatttccaacaaacctttaattacattaattacattaaaaattcaagcctctgtatactattcttgccaaatcttttatcaatgttaattggttgacattccaagtcagctgaagtaaacatccacctcccagccaatccatgtattacagctgagtgtaggatgtttacatgaactgaaacttggtttaaagcaggacttaaactctttactaagtttgtacggttctttacgtaagactctgttgaaaaaaagaacaggcacagcattcacataaatgaggcaagactcaatcggaaagatatcctgagagaaagtgtagaatccaaggaaaaggcagaagtgagttgggtgtttgtttttttggaagtgggggcgtgtccagggcagtggggggcactacaggcacgctactatgcccggctaatttttcttattaataaaattttttttagagacaaggtctcactatattgcccaggctagtcacaaacaagtgataacgtttttcaccaaaggaatttacaacaataaatgccgacatcctgtagtgttccatatctaaatgtagctgattatccagccttcctatatccttcccttcaaaacaatcaaacttgcatttataagaacttacttgatgaccagtatgatgcatcaaccaatcttcattaagaagattcctcctttaggtaaaagacagttaatgaaacactgtgaggagcttagtcatctctcctccccctcaaccctctcctcatcttctcccccacattcagaattcagataatttcatctcaggcacatctttcccacactctgatctctttccaccttctactgttcccagtgtcattaaggtgtctcaaagaaatgtctccccctctttttgcattctttctgattaaaaatatattcccacaaatatctccactaactattatcagtggtcctaccaacacacttgcatcaaagaagaggaaatcttcaaatttggaagtaaaactacatataataaccactgccagcaaactttaaaaatctttggcatttcacaggtaacccaggactttcaggaacctcgccagtctctacctagtctcttgtcccttcgggctgttttccaaaagcattggttctcaagattaaatacacatatacctccccgccaccccactctacaaccatactgcttttctgttttaactacttctattacaaccgtatttttttcttctgcttttctctgaaaacacattcaaataggcccctcccagctagacaattaatatactttttctctgggagaaaaaatggtctcacattttcaacaaacctttttataatcaaacttctggattaatacatgtttttaagttaaggatttttctgttttacttcatgtattaattgggcataatatctagcaggaaaagaatgtaagatgagctctgtgattctgaaagcatgggcctagaggagcagcatcagcagtacttgggaactgtggggggaaaagcacattcttatgttccaccccagacctactgaatcagaaactttttttgcagggcccagcaatctgtgttttaatcaataagccctccaagtaattctgatgcaagctgatattgaacagcaatggactgtttcaccaaacctgttggaaagctaaagcaaagacagcagtgaatgtcaaattactaggaagtttgtaatatggtacagataagaaaaaggcaatgccaaaacatgtagcatgggtccacccacaattaaccaggctaggcaaagtgtggcagagactatctgaaacagccttattttaaaaagtaactaagcccaaactgatattcaaactaaaaaaaagaaacaaaaatattacctgagcacacacagcaaataatgcacattgatccaatgaataaagctgtaacaagagtagaagggaatcacagaacatgctcgacgcaataccacatgcatgctggggtttataggttcacagtccatttctgggtaacctcaagcccatgactcatgtagaaggaactgaggtgtggagatcaatgagaacaagtccaacagtgtatttatatgactatttctaaccaagaatatttgtacaaaagcatctaatttgaaataaattggaagacccaattttgtaattagttatttgctttaa

SEQ ID NO: 1883329 - DNA, 4001 bp, Homo sapiens
atctgaaaactactaaaaaaggctgtacctatgtattatactatactgaagcaagggcatccagaattaaaactgacatcgtctttgattcacctcattagaggcagaataatatagaacaaatgttacataacacagattgccccattaatctgtagcatctagggataactggcctagctgggcagagtataacagctttattataaagaatgcctaccccctcatttagcttaggtttggccttatcattttgaaaaacctttcaaatttcactgcataaattatgcatccatcttactaaattttaaagcagtatatcaaaatttttcataagaaataaacagtgtcacctggtcaaacaaaataatcctattaccacagaacacattacattctacctttggcagggaagacttctgagctcagcaataactatcctttcactgctatttgagtctaaggtttccaatgtgctaaaacagagggccacagaatatgcaataaatctgctttatttagagttcataggaagggatgcttgatgcatgctaatcatccagcctgaaaattgtatttacaagttggaaagccacctgagtctgaagcaactgacccccatccccaaataagtcttataaactactactctaacaaaagagcatttaaaaaataaaagctgtagcacaaatacatctggggtaactacattatgaccaaaactgtcatttgctcatctggataaaagataagaggcaacagtagacactgctgcaataagataatataaaatcattactaaagtactatacatgcaaggtgctttacttgctgtttataacaggaaaaaatagaattatcaagatttaatgtctctgacctcagaaagcttataatctaatcaaagaaaataagcatgtaaatacattagattggcaagacctttatcttttggtggtttaatcatgtatggaacctaacatagtatgtttagcagtttaataaaaataaatgatttaaaaaaaccaatgctttattgaaaagaaaaatgccaataaaatagaaatgttttccagtgtctgaaagactaacagaaataaaataacaattttttaaaactcagaaaatagttgctataaaattatacattatcaattagtccacactgagtgtcatctgtgagaaaagccctggattattcagatctgtggggaaacacaaaaaatagatacaatacagctgctttcagggcagctatattttaaggaggaagcaataaatctgaaagcaacaatctgaaaatacttaggaaaaatattaatataaaaagacatgcatacccattagcaaatgtaaacaggcttagtggcttgacgtcttgcagtttttcttagaggagagttctgattaggagctgtaatatcactcagggtgaggggaacaggaagtggggggctaagaggacggagaaaaatgttgcacacacatctcttttaagtatagggaaagctgaaatttctagattgcatactgctgggtggtagtgatgaaattattctccagaacttccacagaatttacaatggagaaaatcagtctcctgaattgttgggatgttaaactccagcctacttggaaaggttataaagactaaaatttcattgacagggcagaaacaggaataggcggtgacactttttatttaactaaattctctaaggcccagcagcagcacgctaagtctgggaagctcgagacggcatatcctgttattaggagagcaccctacattcaactatcataatacgtgcactgtcagtgcagtaaaagaatgcagctaaagatttctgaggttttcccacacattttatagcctcctcaactccactccgggacagaattatatcaagaggatgtctgtgaatagccggtagcagcaaacatctgactgaaagcttagctgtgtcttacagcttccagtcggggatgtttacaacaacagactttctgaacaagaaatttaagaggaggaacagacataaatgttgccagtcatcatcttcagctaataatttatataatttctagtgctgaacaatagctgtgacatcttgaaacaaaaatgataaagttaatgctaataattaaagagaaagtggttcaccaagtgcaatttctcctaaataaatctaattttaaaagaaaatacgcattacaaatttatcttggtaagtatgaaacattaaagatattaccctgatatcctacatgaggatacatttttccaacatatgcaaaaataagttttcttctccctagagtttcaaaatagtaaacacattagaatgataaccctaatgatcagtgaccatacatttcatggatgcctgctgccctgacgttattgttaaaaatgactccttttatttaaaaaagcgttaatttagttgacaatgaatagagtgggttttcctggcagaggatctaaactgagtaagaatctaacactttcttcccctgtctccagctgatttaggttagggatgtacagttcaaggaaatgagcaaaacaaagaggataataaaagaaactcatgatcttaaatttgtttataaggcaatatactaaaaccattttgtttccacaccacttttctgaaagaaaggaaaaagactaagtgaaatataagtaaatctgcattccatcaaaaaccaagatttgctttaatttaaaatatgtaaaattgccaggcacagtggctcatgtctataatcacagcactttgggaggccgaggcaggtggatgggtagatcgcttgagtcccggagttcaagaccagccttgggctaagtggcaaaaccctacctctaaaaacatacaacatattagctgggtgtggtggtgcatgcggtcccagctattcgggaggctgaggtaagaggatccctgagcttgggaggtggaggctgcagtgagctgagctcatgccactgcactgcagcctgggcgacagagtgagaccctgtctcaaaaaaaataaaaataaaaataaaataaaatatgtaaagtaaccttcttttggggaaaaaaactatgaaaacaattaaagtccacaattaagtcacagtgatttatgaaatgatttaagaaatgaacatacatacatacatgagcatgcatatgtacacacacactctacagaataactactgaagaaaaccaatatacaaattctgagagactattaatttcctaataccaaattttttgagaaactatgagaaaaggatttcagttgctgatatttaccctgtgataatatttaacggttgctctctgaaatactttttgtttaatgttgtaaataactctacccattatataaataatgctggaaataatgaggaaagtacatgtggtctctatggatacaagatgaccttcactgtttttgaagaaaaatacttttttaaaaagtccagtggctatttacaacaacaactattcaaactgtactacaactgaaactttccagatttaaatcaggaaaaaaatagctatttcatgcctaggtaggcacatgatacttgactaatgaggatgctgcacattaagttgcaataaaccagttaccacaagtctccaaatctcccctttaatttaccttcctgtcctcagtttaatttttttaaagactgatcaaaagacatttttatcagagccactgtatttaactcacacaaacaatacatagaatattttcttcagagttatgaaggaattttgtcaaatgctatgactttgtataatatattcttgaggaaacatgaaaattaaatgtacagaagttgaatattaagtatatgtgataagaaaccctattataaaataccttctatcattataaagtatcttctagacacaatctttgtaataatacacagtaagaaggtaaagtctaatgaggggatagctgaagctaaaggtttaccatttttg

SEQ ID NO: 1883330 - DNA, 4001 bp, Homo sapiens
tgaagacagttgtggaaccaggctcacccctaatatcagcattgccttggccaagagtacaaatggaggcccacatagattatacatccaatgtatgagttatatatcaagctagcatcactagttaaaacattgctacttccacaaatatacccaaattcagaatccttagacttccagaaatctactgaaaaatggtctcttcccacctccagttcctaccacaagcagtccagtgtacaaccaagaacgtaagttaaagcttcacccgtggtccttgaaacagtaatgatttgaccatcacttggctcaagtgggcacacacagtcagcatacttcactctagagaggaaagacctcagaaagagggccacaagccttggaagtttaattgtgaccatttgggcagagaattctgaggtctcatgtatcaggaatgtgttccagaaggaagatatatggggtccagatggttttattctcttatcccaaggacttcttgcttaatggggagggaaaggaacaaagaaggatgagagtggagctctctaaagcatagggctcaaagcaagaggtcttcttgccaggatttagggcagtactagcgggaatcccaattgcaagacgtcaggcagaaaaggaaagatgaagttgtcccatggggccagcttgcagaaacccaatcatgacagcgattgcaaacactgtggggccagtctcggtgcacctgagctttcttttttctgatgagaaaacccaaagcgttttatttagctttctgagctaatcttataagaaaataaaattccagcctcaattgttgaaattgttacttaggagaaaactaaatagagaaatttgagattaaattcataaacagggatgttagtaacaaaccactttgtaggagttagtgagagacgatgagtcataaagacaaatttcaagcaaacatttacccattaaacaagtgtcattagcatccatattataggtactagggatatgccagtgaataattcaaagttcttgcccttgaggaacttaattattttaggatcagcacatatatgtgtgctcacacaccacacccacttcacgcacacacttgaatagtgataaattctacgataaaatgtaaacagaggtgggagtggtgagtgaagaactctctgaagctgtgatacttaagcagagacatgaaagaaatgagctttgtacacctctaggggaagagcattccaggcagaagtaacagtaagtgcaaagtccctggggtaagaataagcttagaatgatcaaagaataatgcaggaaagtatagctaggtcagggtgtgtaaaggggagacaggtagaaaatatgagagtggaaaggttggcattgccagattgtgcaatgtaccatgtggatctagaattcaagacaaaggtctggactccagctgaatattcaggagtgactagcaagaggtgacagttaaagctcaaagaaaaaaaaattcacccaagagtaaacagaataaaactaatcaaatttgagaggagtcctggaaagcattgatagtgaacatggcaagaggaatcaacgatgaagcctggaaataagtgatcctttctggaggaatgaagtgtacaggagggttaaatattaaagagaagttagttcaacttaaaaccaccagaggtccattggctttgatgagcaggaagtcactgggggcccctgccaaggcaactgctatgcactggtgagagtagaagtcaaaactctacttgagttttgaagtcaaaacccttgagaaatgtgttagaaatgagtgaggagattctgcaaatttggattggttttttaagaatcttggctgtgtaggagggagaatggatagggcagcaatttcaggatgaattggggaaaatactggagttaagttggaaaaaactgatgtatgcttgttggctacatcaataagcacacaccagttttttccatcttaactccagaaaggagctgagaaagaaagagacgtttaaggtgcatgggagaggatgttgctgaagcagccttctccattccacacattgccttcctgtgggaagacttcaattaacattgcttactctatcttatttgattggcaaatttaggaagaaaatggcaatcttggctcaagtcttccctttgccctatcagaagtgaacctgcccacagaaggcacaaatttgcctctgctcctccatgatgtaattttgacctgtaaaggctaccatacagcactgctgagaactgaccagtcctggggttcagatctcaggtccatttgacagagacaccaagccacatcctccaactcagctctatccataatattgctgtggcctctgtctttattctttgattcacttcctgaattgtgcagcactgaggtggaaaagacagaaggctgcttactggtcctcagtggactcaacattgtgaataattgattaattaagatatgaaggaaaggaaaggaaattttacaaagaaggagcaaacagaagaaatgacttcccatcctctcaaaccaaaaagtaggagagaagcatgtgcatgggagacaggagttgaaagtgttcacagctgatattgtctactttctctatgcagctggaaacaaagctatttgctgagagtgagaatgttaaagatttgaagccttgaagaggttgaaacactacttgagagaatgagagagaggggataaaggataagtaaatgtgaggaaagtcccctcattgcaatatgttcacaactaaattgcacttgccccaaaaacaaagccaagggaaaaaaatgtagaaaatgtaggtagaaatggctacataatcagcttacaatttcaactacaattgacaatcagtattcctcccagggtagactcttggggaaagagcaagggcctagaaacctggatttatatcccagaactgccagtaatgaatacattgggtgagctgatgaagaagataattgcatgtggttggaagctgctggcagggccctcatgacccctccctcctggtgtccactcctttgtgtaactccctcctcttgtatgtgagcttgacctaatgactcacttctaaagaactgagtccagcaagagtaatgggatgtcacttctggtattaggttacaaaaaactgacttctgtctttatccacgctctcactctctccatgtttgctctgatgaggcaagttgaagaggtacacatggtggggaactgagggtgacctccacctgactaccagcaaggaactgaagccctcaatgcaacacccatccaggaactgccctgggtccataaatacatgagtgagattgaaagaagatccttccctgttgagttttcagatcagaatgcagccctggtcagcacttctgttgccttcttatgagggatcccaaagctgtgcctggattctgacccacagaaactgtgagcaaataaatgtgtattatttgaagctgctaagtttgggggcaatttgtaatgcacaataaataattcatgatgtgaaactgtctgtcatgctggtaggagctgactggtgtttccgtggcagctgagagatggatcatttaatgggatattgtattagttcattctcacactgctataaataactgcccaagactgggtaatttataaagaaaagagatttaattgactcacagttctgcatggctggggaaacctcaggaaacttataatcgtggcaggagggaaagcaggcacatctaacatggtgacaggcgagagggagcatgtgaaggaggaaccgtcaaacacttataaaaccattatacctcgtgagaactcactatcatgaaaacagcatgggggagacggcttccatgatccaatcacctcccacaaggtccctccctcaacatctggggattatgggaattacaattcgagacaagatttgggtggggacaaagagccaaac

SEQ ID NO: 1883331 - DNA, 4001 bp, Homo sapiens
aaggaatttggagtttgcaaagcctaatcataacatgaggcccttgatctaagggctctccaatgggcagtggcaggtgggatcgctggaaggaggaatctaaggacaggaaaccagtgaggaagtaaatgtaacagagaaaatccacatctgggattagacaacagcagtgagagtggagaggaagagatgagtctgagaaacagtgaacaaggaatccacagaacttggtgactaagtggagggacagagaaaagaggagggggaagtcaaaatggctagatggcttctagtctgtgacagaggcagaggaaatgctctgctattcatagaaatggggaagttaggaggtagtgcataaggctgtacagttttagacataggacattggaggagatggaaagtcatcttcaggtggttagaaacccagggccacttttggttggtgttcaggaagggaagtgcagagaggtggaaatctcagccacaggtcaaacacttccctggccccagattaaagaccaatccaattaagcatgagagcacacgagccacacaagtcgcacaagtcagtaacgaaaaggactcccaggtgatcttaagtcacataattaacatattttcagggccctacttgtatgtggccctgaaaacgttgagactaatcagctggaatatatccatttttttttctccttctttttaaaaccttattatagagaattttaaaaatatacaagagtagaaataattctagaacgaactcccatgttttcattacccagcctcaacaacgatcaaatcatagccaaccttgttccatcccaacccttacccacttctccctgcgttattttgaagctaattccagacataaatatttcagtctgaatttctaaaaataaggactctatcctttaaaaataagcacaatgccattatcatgccttaaaaaattaactatggtttcttatatcaaatatcaagtcaggttcaaatttccactaaagttttaagtttccattaaaagcagttgatttgaatcaggattcaaattaggacatcaggttgggattggttggcaggttttaaagtctcttttactctttgggtttctcccctaccctctggagagagctccccacaccgtggctttgctgactgcattccttgggtggactttcacttgtgcctctgtcctcgacatgtcctgtaagctggaagccgggatcagattcagatccatttttattttaagtgttatgcaaaaagacacccagtgaaggtgttagaatgagccatggcagtggatggggttcgcaggacccctgcggaagggggacgtttaaggggcaagcggaaaaggagacacctggaatgggggaggaggagcagcggggcgaggcgggggcggtgccgcgtggtctgcgagcccggatattccctggggagcgcacctgcgacttcacctccagtccctccccggctggggcagcggggcgcgggcgctcgggagaggtggcgctgcctactcggcctcatcttgctgagaatgcgacggggcgacagcttcctgtcttttccagtggcttttggcatccccagaggaaaaaacggggagacccgctttggcctcaggaagcgcagaaacactgtcctggctgcgcgcgcaagggcgagaacctaggggacccgcctaaagcgccgttggggctgagcaccgaactcgcacagctccgggcagcgacccgcgatgcggcatccttccgtccggtcggagccctcctagccctcagcgcgtctattcctagcttcggtccccgcagccatataagcaatgacaccctcgccgactcgcctgccagcttggccgcctccctgcagagggctgacgcttctccagaagttgtaagaaaaggagggaaagcaggccaacctcgaggatctccccagccttggcgttcaggtgctgaggagatcgtcgaggttggcctgcttcccctcactcctcgggccttgctcttcccccaggtgcccactgccctccctgctgtgtaccactttcttgctgcctgtgaaggtatttgtcctcactcttgtgctgctccttcaatgatagaactttgggactttctcatccagcagcaccagcctgaaaaagcagtggcttgcaccaccacacacatacctggtctcaggtgggtggatcagggcaacttggccactagtgccccagtaatgcccatctgcccaacctcaatgcaggagcaacaagtatttctctgtcttggagagatctagaaaaaggctgaacataccacgagggtgttgcttcagaagaaaatgctggtcagggttccaagccatcataggaacttgtgagctgagaaacatggtcaactctactctctctctcttctctacctacccaggcagccacaaatctcagtgtcagtcactgctttggtttgacatctaagggctctgttacaagggtaactaagatgagtaccagtagatgcccaatgacacttgtaaacatgaaagtgtataccagtataaaggatgctgcagcctcagccttgaaaagtaaggcttttagggaatgaaacaaaggatagtcaggttcttaggggacagggagggttctggcatggggagcagccctgggcaggtctgggggtgctgcgaagtagggcaccgcaacataacggccctgtgtcttaggtggccaggaaggggaaggcaggagatacagaaggaaaggaaactaacattttattgagacaggcattgtgctggtcctgaggtttatgcgaagattaatttctgggggtgagaaggtaaaaaatgatgaggtggaaaccagcatcttctgttactcccatctgtgcagagttaaagaagacttgaaagaaggggatgtgagtggcaggaaaatccccagtgaccggccctgaaccttctgccagcgcagctcacctcctccccaaatgcctcccaataggatctcagccctaaacaagcacagggcgtggggtggtacagatgatgatgtagctgcttctgagatgcccctgggcgctgctggagctgagccctgggactggaatgacttttgcccgctgccctcaaaattcccacaggccacaccgctaccacctcttgggtaaagtaggagggacacatctccaccaccatccaaattgttacctaatgaggaattttgccaggaactacttacagcccaatggagccaggctgggtatttccaggacatgagccattttctctgtgcccactaaacagggtgcaggtccctgaagccctcagggaagctgcaaaggttactggggtcggctctggggcaacagctgacctcttagctcccactgcaggcgtaggaacctccaggacagcctgtgggggtggtgagtctgcaaagctggctggctaatgagggtgcagtgctggtagtgtctgccttatgcttttttttttttttttttttcttttggagacggagtctcgctctatcgcccaggctggagtgcagtggtgagatctcggctcactgcaaactccacctcccaggttcacgccattctcctgcctcagcctcccgagtagctgggactacaggcgcccgccacaatgcccggctaattttttttttttttgtatttttagtagagacgggttttcaccgtgttagccaggatggtcttgatttcctgacctcgtgatccgcccacctcagcctcccaaagtgctgggattacaggcttgagccaccgcgcccggccggttgccttatgctttaatattaatcatatggtatgaacacatgcaaagctagctggttttactgtttaggaaagtagatttaatttctatgtgatctggattatcaccattattatttccttggtatagaaattgctttttactgcttgtgtttttctaaaattatattctccctctgaccaaggcaagtaata

SEQ ID NO: 1883332 - DNA, 4001 bp, Homo sapiens
aatggtgataatccagatcacatagaaattaaatctactttcctaaacagtaaaaccagctagctttgcatgtgttcataccatatgattaatattaaagcataaggcaaccggccgggcgcggtggctcaagcctgtaatcccagcactttgggaggctgaggtgggcggatcacgaggtcaggaaatcaagaccatcctggctaacacggtgaaaacccgtctctactaaaaatacaaaaaaaaaaaaaattagccgggcattgtggcgggcgcctgtagtcccagctactcgggaggctgaggcaggagaatggcgtgaacctgggaggtggagtttgcagtgagccgagatctcaccactgcactccagcctgggcgatagagcgagactccgtctccaaaagaaaaaaaaaaaaaaaaaaaagcataaggcagacactaccagcactgcaccctcattagccagccagctttgcagactcaccacccccacaggctgtcctggaggttcctacgcctgcagtgggagctaagaggtcagctgttgccccagagccgaccccagtaacctttgcagcttccctgagggcttcagggacctgcaccctgtttagtgggcacagagaaaatggctcatgtcctggaaatacccagcctggctccattgggctgtaagtagttcctggcaaaattcctcattaggtaacaatttggatggtggtggagatgtgtccctcctactttacccaagaggtggtagcggtgtggcctgtgggaattttgagggcagcgggcaaaagtcattccagtcccagggctcagctccagcagcgcccaggggcatctcagaagcagctacatcatcatctgtaccaccccacgccctgtgcttgtttagggctgagatcctattgggaggcatttggggaggaggtgagctgcgctggcagaaggttcagggccggtcactggggattttcctgccactcacatccccttctttcaagtcttctttaactctgcacagatgggagtaacagaagatgctggtttccacctcatcattttttaccttctcacccccagaaattaatcttcgcataaacctcaggaccagcacaatgcctgtctcaataaaatgttagtttcctttccttctgtatctcctgccttccccttcctggccacctaagacacagggccgttatgttgcggtgccctacttcgcagcacccccagacctgcccagggctgctccccatgccagaaccctccctgtcccctaagaacctgactatcctttgtttcattccctaaaagccttacttttcaaggctgaggctgcagcatcctttatactggtatacactttcatgtttacaagtgtcattgggcatctactggtactcatcttagttacccttgtaacagagcccttagatgtcaaaccaaagcagtgactgacactgagatttgtggctgcctgggtaggtagagaagagagagagagtagagttgaccatgtttctcagctcacaagttcctatgatggcttggaaccctgaccagcattttcttctgaagcaacaccctcgtggtatgttcagcctttttctagatctctccaagacagagaaatacttgttgctcctgcattgaggttgggcagatgggcattactggggcactagtggccaagttgccctgatccacccacctgagaccaggtatgtgtgtggtggtgcaagccactgctttttcaggctggtgctgctggatgagaaagtcccaaagttctatcattgaaggagcagcacaagagtgaggacaaataccttcacaggcagcaagaaagtggtacacagcagggagggcagtgggcacctgggggaagagcaaggcccgaggagtgaggggaagcaggccaacctcgacgatctcctcagcacctgaacgccaaggctggggagatcctcgaggttggcctgctttccctccttttcttacaacttctggagaagcgtcagccctctgcagggaggcggccaagctggcaggcgagtcggcgagggtgtcattgcttatatggctgcggggaccgaagctaggaatagacgcgctgagggctaggagggctccgaccggacggaaggatgccgcatcgcgggtcgctgcccggagctgtgcgagttcggtgctcagccccaacggcgctttaggcgggtcccctaggttctcgcccttgcgcgcgcagccaggacagtgtttctgcgcttcctgaggccaaagcgggtctccccgttttttcctctggggatgccaaaagccactggaaaagacaggaagctgtcgccccgtcgcattctcagcaagatgaggccgagtaggcagcgccacctctcccgagcgcccgcgccccgctgccccagccggggagggactggaggtgaagtcgcaggtgcgctccccagggaatatccgggctcgcagaccacgcggcaccgcccccgcctcgccccgctgctcctcctcccccattccaggtgtctccttttccgcttgccccttaaacgtcccccttccgcaggggtcctgcgaaccccatccactgccatggctcattctaacaccttcactgggtgtctttttgcataacacttaaaataaaaatggatctgaatctgatcccggcttccagcttacaggacatgtcgaggacagaggcacaagtgaaagtccacccaaggaatgcagtcagcaaagccacggtgtggggagctctctccagagggtaggggagaaacccaaagagtaaaagagactttaaaacctgccaaccaatcccaacctgatgtcctaatttgaatcctgattcaaatcaactgcttttaatggaaacttaaaactttagtggaaatttgaacctgacttgatatttgatataagaaaccatagttaattttttaaggcatgataatggcattgtgcttatttttaaaggatagagtccttatttttagaaattcagactgaaatatttatgtctggaattagcttcaaaataacgcagggagaagtgggtaagggttgggatggaacaaggttggctatgatttgatcgttgttgaggctgggtaatgaaaacatgggagttcgttctagaattatttctactcttgtatatttttaaaattctctataataaggttttaaaaagaaggagaaaaaaaaatggatatattccagctgattagtctcaacgttttcagggccacatacaagtagggccctgaaaatatgttaattatgtgacttaagatcacctgggagtccttttcgttactgacttgtgcgacttgtgtggctcgtgtgctctcatgcttaattggattggtctttaatctggggccagggaagtgtttgacctgtggctgagatttccacctctctgcacttcccttcctgaacaccaaccaaaagtggccctgggtttctaaccacctgaagatgactttccatctcctccaatgtcctatgtctaaaactgtacagccttatgcactacctcctaacttccccatttctatgaatagcagagcatttcctctgcctctgtcacagactagaagccatctagccattttgacttccccctcctcttttctctgtccctccacttagtcaccaagttctgtggattccttgttcactgtttctcagactcatctcttcctctccactctcactgctgttgtctaatcccagatgtggattttctctgttacatttacttcctcactggtttcctgtccttagattcctccttccagcgatcccacctgccactgcccattggagagcccttagatcaagggcctcatgttatgattaggctttgcaaactccaaattccttcttttacaacctcaaaaatttcattcaaagaaagcaggaatgattatcaggcagccagcaaccccacccctcaaatagagtct

SEQ ID NO: 1883333 - DNA, 4001 bp, Homo sapiens
gtctcagaagaagccctgtctgaatctgattcagctgagaaaacaactcaggccatggtagctgcacccaactctctaaatcaacagtgacctgtgctgaagggattaaggcatcccaacattcctcagagcccaaggcaaggagaatcccttatgaagatgaaattgatcttcaagcaccctctaccttactctgcgtgatgccatattcttcctgaatcccacccaactcaagagcatgatttgcataataaaatctctaatactttgatgaacaaatgttatccaagatactttaaaaactgccttcacggtgagaaatgaacttaattccattaattcattgtctgttcgttattctagaaacattatttgagtgttcagcatgtgctgagctatttagagatgtttctgagggctaggactagtaactgcaaatcctatgcttttttttctctcttccacactgccttggggattaaagacagtggctcttaaatctggctgtgcttcaaaatcatctaggacaggagtgggcattggaacacagacacgctcattcatttatatattgtctatagctgctttggcattaaaaacagagaagttgagtagttgcaaaagaaatcacgtggcccacaaagcctgaaatatttaccctctgtccctttacagaaaaagtttgctaacctctgatctaggacctctggaccagcagcatcagcatcacttggaagcctgtcaaacatgcagaatctcaggtccaccccagacccacgaaatttcactctccactgacctagagaacatggagacactgcaggttttctagctgcactcccactaccaaatcagaagtgcctggggtgggacgtttgtttgagattccccaggtgaatctgatatgcagccactagggaagcagaaagatgagtaaggtgattactgccaggtcttcctatgggacggcagcaccagattctccagctgctaggagagttagccgctaaaggatcacagctgagtgcctctccaggcactgctcctgtggaaggaaatgaccttacccaaggtcacacctacttgctaggggaagactgcatccagcgcctggccgatacagggtaaaaaggcccagtcttctcaattgctgaatggccatcccagctccagagctccccagggcatcagctgaagcccctattacaacagccattccactcctccctctgccctggactgtgcccctcaccctattagagaaactgggatgctgactgaattattattacattagagaattaagaagttttcattaatttttaggtgtgatgatggtatcatggttatatattagtttgaagtatatgaaattgctaatattacactatttcaacctacaaaaataacaaaatggtccaatctaatatctttttggtccaatctaatagatatggtccaatctaatatcttttttaaagagtcccagtttattagagattcatactgaagtattcatggatgaagttacatgacttgtggaatttgcttcaaaaatgtttaattggcgaagtggaatggaggcagagatgaaacaagctttgcaatatgttgataattgttgaagctgatgatgggtacatggaggtttattatactattctccatatatattatatatatatatatatatagcttgagataggtaagaggcccacatcacaggtggtgttactagagctctctccagtaagggtttacctcagagtctgtttcttggctctgtctttaagagtatacagtataatagcagagataagtcacaatcataaataagaaaactcaaaagggagtaagtgtcctaaatggtgtgtgctatcagggaacacataactgaagcagaagggcaggagcagcaggcttttggggtgacaggtgggctgtgggatcaggtgggatgccctttgaggcacctgatcccattgccccacccatcaccccaaaggttgtatggagaggctggagagaaagccttgaattccatactaagacatttgtattcagtagatagtgggaaatcatgaaaggctttgagtggaagaataacacaataatgatcccagctgtacttgggagtatttacctggcaataatgtgaaggggattggagtgggagtgactgggggtgtgaagactagtccaaaagttgttgcaaatgtctaggtgaaaggcggtgaggacagaagctagcaatccatgaaggggctggtgtacaggaaagaccacagggctcagaatgagacagacctgagttccaaaccccaccccactgctcacagcccgtgtacatttagacaagccatcccaccgctctgactacccccttctgtaaaatggaaataacagagttagctaataaatctgcaaagcccggcacatgctgagcacccaattaatggaagccacaccatgaggtcgtagctgtgttcgtttgtgcttgtacatcatcacttatcaccccagcaagaaagtgtgagcctgactgctatgaagactgcccttgaaaagtgattcttggaggtaatcgtttaatgaggcctcggtttcaaacatgccagttgtttattgaggtgcttaagcctgaatcattcctcttaggaagggtgcacaggcggtctctgcttccattgtaaccgctgccatgccctgttgtcatggtgaccagtttcccaaactgccctgctattttctgcaagcctttccagtttcttaacgccctaaagtccacaagccctagagacagcagcaggttgggttttttgaacttccacagaaaacactgtcaactctttaaatttgccagttggctgcgagctgcttctccaacagaagctcccagcctgagcagcagtgtgaccctgcacagcagacacccacaaatgttcccactaactggaaattggtgccatggaatattagctggcacatcagtctctggctggcattaatcttgcaggaaaataaggcagaagacaagggaatgtccaccatgcatttcacgtacacagcacagtctgaagttaaaagaccattctaaaagattaaagtttaaggtattgcattatttttaaaaattatttcaatattagcatatgtggtttttccagagaatgttcaccttatgaacttacttgaaacatgaaaatattaaaaacaatattattattgttgttacggcaaaattgtaacactagcaatcatgtcaccttggtttctggcagaacttctctccctcctcacttacctaattcctttcccccttcttgttcctggaaatcttctctcctctctgaccacagctataggatgaaagaagtgaccactctgctggcagcctgcccagtatctgttctccccatttttcctttgccaagaggaccctgatacttttagggtagcttgaaagttccctgtgtggaaggaaatgacctcacacaacatcacatccccttgctggggaagcccacatccaatgcctggtcaatatagggtaaaaagctaaaagttttgagttcctagacacccttgtagcccagaacacctacatcatacacttctgaccaataagacccaagcaaagtttactgggtttgaggaaaactgtcattttacagataaggaacagatcaggcagaatgcccctttctgcccgtctccttcttcccatttgaaataagatggtgcagcatctcgcagccatgaggatgaaatccacacactaaggatggcagagcaataaagccaaaggagcccagctcctccacagtgtccgtgactgggtgtggccgccgacctccagacctctgtgcagaccttccatgggctaaatcccattcctggagttggtttctgttcaggcagccagatgcaatccctaactggtacaaaaggtgtggagggttcccttcattcaacaaacatccaccgagtgcctactctgt

SEQ ID NO: 1883334 - DNA, 4001 bp, Homo sapiens
gggtgaatggttaaacaaaccatgaatactctgcaataaaatggaacgaactattgatacacacaacttggatgatctgcggggaacaatgccgagtgaaaaaagcaatcccaagaagtcacatactgtatgattccatttatgtaacacttttgaaataacaaaatggcagaaatggagaacagattagtggtgggaggaggtggggggagggaggtgtggctataaaagggcaactagagggatccttgtggtgatggaaacttcttgtatcttaactgtaccaatgtcaatattctggtggcaagaggttactactgggggaaaacgagtaaacagtacttgggatctctctacattatttcttaccactctacatgaacctacaatgttctcaaaataaaaagtttaatttaaaaaatgtttttagagatagggtcttgctgtgtcacccaggctggaatgcaagggctggatcatagcttactgaaatctccaactgccgagcctttcaagcgatcctcccacctccgcctcccaaagcactgggattacaagcctaagccaccgtgcctatcgcaaatatttacttaaaaaaaaatcttcttttggccagttatcccaggacgggaaatctatcccgggaatataatccaaaagaaaacaaaaacaaaaacaaaatcgaaaaaaagcaagtcaaatgtaccagacattcactgcagcattatttaaaacagggaaaaaagaaacaatcagggaaatacttaaatcatgatacagccactggagaactacgcagtctttgatgtcgcaacagagaaatgttatttgaaaaaggaggatacaggccaggcgtggtggctgatgcctgtaatcccagcacattgggaggccgaagcgggtgggatcacttgacctcaggagttcaagaccagcctgggcaacatagtgaaaccccgtctctacgaaaaatacaaaaaaaaaaaaaaaaaaaaaaagaaaaagaaaaaattagccgggcgtggtggcatgcacttgtagtcccagctactcaggaggctgaggtggaagcatggcttgagcctgggaggcagaggttgcggtgtgttgatcgcaccactgcactcccgtctgggcaacagagagaaacctcgtctcaaaaaaaaaaaaaagaaagaaaagaaaagaaaaaggacacgaaattgtgatacgacaactctgtgaagactactagatacattacaaaatttttaatagtagtactctacgtggcattctggtagaaatgatttcctttcctcaaactccccataatattgttacatggtttttatacggtctgggggatgggggataacattaaatgacaccttttatgttaaatcacaaacgctggagtcaacaaaagttctttaaattcctccagcagtagagcaaacttggtattccaattccctccaggctttgaccaagagcgcacacgagggccaccgccttcgtgatcagaagcgggtatgactgggcaccggttggtccactgcggctgttccaagctgcccccacagcctcaccccaggactccaccaggagcacagggaaggggtccccgaaagtgggcgaggtcgctgcccggaggtaatgaccactccaaggtcaccatggagaacccgcagacagggctcggtgtggcccaggactccccgactcttaagtccaggtctcactctctgcgccgcgccgcgcccctcgccccatcccgagcagctaccccgaagctcccaggggctccgccgaggcgaatcctcacattgcggcgtggtggccgacaaaacccgggaccctgatcttggcgcctccacgccaccgcccggaggccaagacccccgagcgccgcagcatagcgtagcccagaccagtcacctcatcctttttcgccctctcaacccagcttttcccgactccgggaagaaccgggaagagaaggcggaggggagcgaagcgccgcctgataaatactgtggcccagtcccgcccccctaacgtcacttccgccccgcgccaagatggcggcgcccaggccctgccacgcagacttccgcccggcgcggagaccgaaggctggcggctggtcgcgttgcaggtgaggttgtgacgcgcggtgtggagccgcggcccgggtgcgtccctgtctggttcctgggcggggttcctggagagggcgtgtcgcgagccaaaggctctcacctgggtggtcccgggagtctcgccacgtgggaggggaggagctgagaggccactggagggacgcaccgactgggggaccggaaagcaagggggtggggttccgccagggtccgcgtgtcagtcccctctggtgatctcgtcgccccttctctcccaggcaacatgtcggaaggaaacgccgccggcgagcccagcacgccgggagggccccgacctctcctgactggggcccgggggctcatcgggcggcggccggcgcctcccctcacccccggccgccttccctccatccgttccagggacctcaccctcgggggagtcaagaaggtacccaacggcgcgtttctaaagaaactcaactaccttgaattccaagccccaggattcaactaatgtttgtgtaggacctactgtgtgtcaggactgtcgttgggcctctcaagcctacccctctttaaattctagggagtctgtcctaccttcaaatctaggtactgagtacaagatgttgaaatgactcccagaggtggttgaagggcagagaatcctaataagttaaagtcgttcaaaagcaatttgaacagtgtttatttacttttattgtgtgtttggacatctttaagaaacccatgaaagccagacaggcataaacttcgcagtcttagagggttcagaattcaccatctctgtgtgcaaactttttatctagagtatgatgaatcctaggtatggcattcgaggctctgtggcctctcccatgtgtatatgactgtggatgtcaagagtagcccagaaaggggtggggtcaggatgacagaagaacaaagcaggttttggttttggttttggttttttttgagaggaagtctcgccgttgtcccccaggctggagtgcaatggcacgatctcagctcactgcaacctctgcctcccaggtttgagcgattctcctgcctcatcctcctgagtagctgggattacaggcgcccgccaccatgcccagctgatttttgtatttttagtagacacagggttttgccatgttggccaggctgttcttgaacccctgacctcgtgatccgcccgcctgcctcgacctcccaaggtgctgggattacaggtgtgagccaccgctcctggccgaataaagcggttttttggttttttgttttgtttttaagggaatctctttctgtcgcccaggctggagtgcagaggcaccatctcagctcactgcaacctccgcctcccgggttcaagcgattctcctgcctcagcctcccgagtagctgggattacaggggcccgccaccgcgcccagctactttttgtagtttttagtagagacgggtttcaccatcttggccaggctgatcttgaactcctgacctcgtgatccacccaccttggcctcccaaagtgctgggattacaggcatgagccacaacgcccagccataaagcagtttttaaaaacctaactttgccttggaaaattgtggtgacagtccatagtcacctgattgaaagtgttggcagatctatggccttccctacttaggccttgctgctagagctgttcccccatgatactgactggtctctatagcagtttgaagagaagaggtgagaccagagaaattcctttgcttttagaagtcccagaggatcttctttcagaggcagaacctaaggctgctggttaaaagtgggttttggtgcccccttctatgtgtaactccactgctaccacactat

SEQ ID NO: 1883335 - DNA, 4001 bp, Homo sapiens
agggggaaggatctctgaagatatttctaaccctgcacactagaaatctcctctgttttggttctaacatcctttgaccaagagttttacaatcagacagtcgtaggttcaaattaagctccctctttgctcagttgttttgtaacggtgaataagttacttctcaactataaactgggataatattcatcaaaaaagattatgaaaattaaatacaagggcacacctaacatagtgccactgctgatgcgaaaagtaactctgaagacaatcttgcagcaaaacattaaccagccagtataatcatgcctaacaactctggtttgacatttaaactaaaaacacaaccttatttctcaagaattagaaaatttccattctgtaccaaactgtaaaagcgtttcttagaatttgtatgtttcacaaaataattcaccagaaattcttttgtaattctgacttgtgtataaaaaaaagcactatgtctattagttatgcactgctgtcacctcaactatacaaactgttaacttatttgaagatcagatatggcgtatgtcctcatcaatgcctttccaaaaataattagttgcctccgacattaacaaaggtatttaatgacttcacgatttgagaaaccttctcctgcctgtctccaaaattctatagactcgcactgcccgctggcatttacacccaatttaagaaaatagaaatttttgcctgaaaaccaattactcttctaaccagtataatgacaacaaagattaactttcccttgcaaaaagaagccgataaacacaagcctttcccagaaactcttcgcacaaacgctgttttttttttcacgctgaagacactaacaaatcagagtgaccaagtaaatcccccagggtttccctcttacaaatttgaagaaggccgctaagtctggcagcacaacccgacagtgtcaccccacactatcaaagcggatcattcgcaaaaagcctttttcagcgacgaaaagggcatcaagcatttatcagaaacacacacctcccccagagcgtctctacaacacccgatatccttaatcactttaaagaatgatcagaaaagttcaggggaaaaccaattatgcaaatatccttggaaaaagaagcaacttccctccgtctctttttccacgcgtctgtgaaatattcagcattcccaacgtaaaaattatctttttaaaacgggagggcagcagcagtcactggccgaggggcacccgccgaccccccgccccaccccgcccagccccaccagctccgcactttcttgagccccgcacccgagttcggcggaaggttgctgctcccggggctggcaccgcgggcgccgggcccgccaccgcctcctcccagacagccatttttacccgcggagtaggcggcccggtccccagagcgggctcgttcaaacctcctcccctccctccgcagcccagggtttccccggcctcctgggggacgtgagatggacctgcagggtaacagcctttgtagatctcagaatggatcagaatcatttgttaccgaacaagcgatgatgcgggcccaagctgcatgggtccgggccgagggcgggcccggggcgaagggggctgggcgggtggcgccgccgcttgggcgccgggagggtggcagcacgcgtgggcgcggcgagggctgccttctccctcgccctcccgcccccaggagtccggctccccgacggcagagcggcggggaaagggtggggggagggagctggaggaaaagaaggggtcggccgagtctcttaccttgctctccgctgggagttgggcgggctgggtggcccggggaggggaaaagggtcgggggagggggtggggaaaggggggagcccttgcgaggtgtagcttccgagcagctcccgccgccgccacagccggcgcctcctttccgattcactcaaacaaacaagatggctgccgttacgccgcggctcttcctgccgcccaaatcctcggttcaaatcggcaggatgtttacggtcaaaatggtacctgtgcgcctgcgcagccagcccaagcccccccctccccccagaaggagcggcgcaggcgcaatgactatttccttttctttggaacccgccctctgtttgtggagtccacaactgagcaagcgcaaaggtgattctcttgcgagggtctttgagagttgcggtgttagccaatagcgtaagatagcgcacgcgcagtgctttccagtgcggtgaatatttgcgtttagctttattcttgtgcttgttttaaagaaaaaagctgtcgtggtgcaattttgtgtgcccccaccaaaaaattcattttatggctctatagggatgaaagtaacataaaaacctcaaactaattccataaaatatagaggttcatttattcagtcaacctatattatagagggtcttctgtttgctacacgttgggctctggatataatgattaatataacagagataataactgccttttggaaattttcagtattgcttgggaggaatcttaaaatttcttatcttaaaagacttacttgtaccacgaagaaatttacttttgtttttattgtagagatctttccagtgatgaaagaaattgaagaggacacacaaaaatggaaatatattccatgttcatggattggaagaatcaatattgttaaaatttccatactacccagagcaatctacagattcaatgtaatccctatcaaaatatcaatgacattcttcacagaaagaggaaaaaaatcctaaaatttatatggaaccacaataagaccaagaatagccaaagcaatcctgagcaaaagaataaagctggaggcatcacattacctgacttcaaattatactacaaagtgatagtaaacaaaacagcatggtgctggcataaaaacagacacatagactaacggaacagaatagaggacctataaataaatcaatacatatacagtcaactaatttctgacaaagctgccaagaacatacgttgggaaaaggatggtctcttccaaaaattgttctggaaaaactagataactatatgtagaagaatgaaacagatcactatcttttgccatattaaaaaaatcaaaacaaaatggcttgaagactggaatctaagatttgaaactattgaaactactagaagaaaacgttagggaaatgctccagaaccaaatatttcttagtaagaccttaaaagcataggcaagcaaagcaaaaatggacaaatgggatcatgccaagctaagaaccttctgcaaagcaaacaacaaagtgaagagacaacccatcaagtgggggaaaatacttgcaaactactcatctatcacagaattaatagccataatatataaggagctcaaacaatataataggaaaataatccaattaaaattgagcaaaagacctgaatggttatttctcaaaaaagacatacaaatggccaacagggatatgaaaaaatgcttaacatcactaatcatcagagaaatgcatatcaaaactaggatgaggtataatctcatcccagttgaaatggcttttatccaaaatacaggcaataatgaatgctgataaagatgtggagaaagagaaacactcgtacactgttggtaggaatgtatgttagtacagcactgtgaagaacagtatagagattccttaaaaacctaaatatagagccaccatatgagccagcaatcccactcctgagtaaatacccccccccaaaaaaaaaggaaatcagtacatcagagtggtatctgccctctcacatttattgcagcaagattcacaattgtcaagatatggtatcaacgtaagtgtccatcagtggatagatgggtaaagaaaatgtggtacacatacacaagataatatttttcagccataaaaaagaaaaaaagtcctttcatttgctgcaacatggatagaactggaag

SEQ ID NO: 1883336 - DNA, 4001 bp, Homo sapiens
ggtttgtagttcaagccccatcttgaaggtgctgtgcaaccttgaacagatcccccccaaccctagtctcagtttatccagactgcacctgcatcctgggaacaggcatggctgtgcgtttgataaccacacccattgccggttgggagaccaggtttttctctcaagggagccgcagtctgttgccttttgccaccattttgcaaatcagatctcaattctgggcccacccagccaccccatcctgtcccctccagcctcaccctgacttctcagctttcacttttttctgctgatgggttggaaattgctactctcctgttttctctccacctgcactaacaaaccccaagtgctgcccccagcacgaatccctggttcccgggtcctctgccaggtgcaggtgctgcggcttcatgttcaaaggattctgggcactgcgctttctcccttgatgtgcccagccaggctgcggggatgggaggctcctctcctgtgcggctcaggctgtttttctccccagagccttgtggccaagtttccgtggccctgtgctctggaccctgggccagggctgtggtgtgggcagccttgaggccctgggttccatgccagttctcgacaggaaggcctttcatgtgggtgccagctggcctctgggcccagcttcgggcctggcagggcctgaggagggagagctgcgagtgtgaaaaacactttctgtttgggagctggttggtgggaaggaaagacaagagggagggggacaggcaggtcaaagagcttacccaggtttagaggagcgaggccaaggtgcccctgtagaaatgaggcgattcggcctttcctccccaaaaagaggtcttggcagagatacaaggaagcaaagtctgttgggtggggatggaaaacactttcccaagcctgccttcactccctccctcccccgggctcactgagcctaatcaggtcaagcacgcagctccctgccagacactgtggcattgtttaaagccgctgcctccccagtaccctctccccacagaactgagttctgacaaaggaggccctgagggacagggctgagaggacagagacccaaggtccagggacgcgtcactcccctatggctcgctctccttcccactggttattgtttttctaccctggaccccagggagaaaaggagccaggccctggcaaacctgaaggctgtttgtgttgacataaaggcactttctgagcaaacagcactgaaaggtcagcagtaaccccaggcagtgccaggactgggcagcgggtttgggaggtgtggagagaaaggaaactgtgggccacttggggtcggatgacttcaccagaagaagaagaaaagccagccaggctgcagggagggggcttcctggagatggagccctggaagaccttggctaccccataaaacttaaataggacttgaagtcagttgtttatctgctttccagaacaccaatgacatgggagagaggctggcgccctaggcaggacccaagcgagcctggtgtctggggcaggatctgccactacgcttggctttctcactgtaggactcagtttgcatgggaaaccaaaggagaatttcaagtgtcctactcacacatattctagcctttcaggaaacatttactgagcatacatcacccacctgatagggggctaagcctgggaatgctttcagagatgagtagcacaaggtctcagataaggtgacccattttccccgtttgcctgggcctcccagttttagcactgaacatcccttagctcaggaagcccaggaaaccctttggtttggggcatacttggttggttggtcaccctagcatcagtcatcaagcagctcacgatctgcaaacaatggtagacatacgagtgatataatagagggtgcacaggcatgggaggtcaggtgagctcagctccctgcctcacctgagctcccgtgcctgtgcaccctctattggctatgatcacaccactgcactccagcctgggtgacaaaacaagaccttgccactaaaaaaaagagaaagaaagaaaagaaagaaagagagaaagagaaagaaagagaggaaggaaggaaggaaagaaaaagctactttttgaatgaaagaatgaaaaagcatctctcagctaggaaatgtcttgccatgatgacacctgtgttcaatggggagctacgagaacattttaaaaaaatctactgtactgaggcataatttacatataatacaatgcatacacttcaatgtagactttgatgaattttaacaaatatatacactcagtaactgttaaatcaatcaaaatatttatagcaccccagaaacttccctatttctcttttgtagttaatcccatcctaaccatcccatcccaggtaaccacttacctgatttctgtaactatagattcattttagtttttctagaacatcatctcaatggaataatacagtctgtactcttttgagtgacttcctctactcaatgtgcttttgagatttatccaagttggtttgcatatcactagtttttttgttttttttttactggtgagtatggatttatcataatttttccatgcatttgcctattgatgaacatttgacttgtttccagttttttgctattctggacaatgctgttgtgaatagtatgtacaaattttggtatagaaaaacattttcatttctcttgggtaaaaacccagaagtgaaattgctggatcataggttaagtatgtgttcagatttataggaaatcacctaacttttccaaaagggttgtaccacttcacagtttcaccattaatgcatgagagttctcgttgctccacatcctcacaacattttgtattgttggtttttgaaattttagccattctagtggtatctcagagtggtttcatttgcatttccctgatgattaatgaagctggaacactttttcatgtgcttacatggtcattcatatacttttcttgcaaaatgtctgttcatgtctttcatctttttttttttttttatttttgaggtagagttttgctctgttgcttaggctggagtgcagtggtgtgatctcagctcactgcaacttccacctcctgggttcaagtgattttcctgcctcacccttccaagtagctgggactacaggagcccaccaccatgcccagctaatttttgtatttttagtagagacagggtttcaccatgttggccaggctgttcttgaactcctggcctccagtgatttgcccatctcggcctcccaaagtgctgggactttcatccatttttaatttgagctgcatgtctttttcttattgagatgtatgagttctttatgtatcctgaaagcaagtcctttgtctcatatatgtattgcaaatattttctcttattctgggattttttttcttttcatgttcttaaagggatattttaaagaatagagggttttaattttgatataatccaatttatcaaaatttttctcttatggtttgtgactttcatgaccatatttcttaaagtcacaaaaattatcttatgtattttttaagaagttttatagatttagtttttacatttaggtttgtggtccatatcagatgaatttttgtgtattatatgaggtaatatcaaagtttgttttttgcatataaaaatcatttgttgaaaagactttgaaatcattggtgtctttggggaaaatcaattgatatatatgtgtaaatctatttctggatctcaatgtggttcaattgatctatatgtctgtccttacaccattatctcattgtcttaattactgctgctttagagtaagtctttttttttctttctgaaattttaaatttttattttttgtagagttggggtctcactatattgtctaggctggtctggaacttttgggatcaagtgatcctcctgcctgagcctcccaaagtgctgg

SEQ ID NO: 1883337 - DNA, 4001 bp, Homo sapiens
aaaataaaaatttaaaatttcagaaagaaaaaaaaagacttactctaaagcagcagtaattaagacaatgagataatggtgtaaggacagacatatagatcaattgaaccacattgagatccagaaatagatttacacatatatatcaattgattttccccaaagacaccaatgatttcaaagtcttttcaacaaatgatttttatatgcaaaaaacaaactttgatattacctcatataatacacaaaaattcatctgatatggaccacaaacctaaatgtaaaaactaaatctataaaacttcttaaaaaatacataagataatttttgtgactttaagaaatatggtcatgaaagtcacaaaccataagagaaaaattttgataaattggattatatcaaaattaaaaccctctattctttaaaatatccctttaagaacatgaaaagaaaaaaaatcccagaataagagaaaatatttgcaatacatatatgagacaaaggacttgctttcaggatacataaagaactcatacatctcaataagaaaaagacatgcagctcaaattaaaaatggatgaaagtcccagcactttgggaggccgagatgggcaaatcactggaggccaggagttcaagaacagcctggccaacatggtgaaaccctgtctctactaaaaatacaaaaattagctgggcatggtggtgggctcctgtagtcccagctacttggaagggtgaggcaggaaaatcacttgaacccaggaggtggaagttgcagtgagctgagatcacaccactgcactccagcctaagcaacagagcaaaactctacctcaaaaataaaaaaaaaaaaaaagatgaaagacatgaacagacattttgcaagaaaagtatatgaatgaccatgtaagcacatgaaaaagtgttccagcttcattaatcatcagggaaatgcaaatgaaaccactctgagataccactagaatggctaaaatttcaaaaaccaacaatacaaaatgttgtgaggatgtggagcaacgagaactctcatgcattaatggtgaaactgtgaagtggtacaacccttttggaaaagttaggtgatttcctataaatctgaacacatacttaacctatgatccagcaatttcacttctgggtttttacccaagagaaatgaaaatgtttttctataccaaaatttgtacatactattcacaacagcattgtccagaatagcaaaaaactggaaacaagtcaaatgttcatcaataggcaaatgcatggaaaaattatgataaatccatactcaccagtaaaaaaaaaacaaaaaaactagtgatatgcaaaccaacttggataaatctcaaaagcacattgagtagaggaagtcactcaaaagagtacagactgtattattccattgagatgatgttctagaaaaactaaaatgaatctatagttacagaaatcaggtaagtggttacctgggatgggatggttaggatgggattaactacaaaagagaaatagggaagtttctggggtgctataaatattttgattgatttaacagttactgagtgtatatatttgttaaaattcatcaaagtctacattgaagtgtatgcattgtattatatgtaaattatgcctcagtacagtagatttttttaaaatgttctcgtagctccccattgaacacaggtgtcatcatggcaagacatttcctagctgagagatgctttttcattctttcattcaaaaagtagctttttctttccttccttccttcctctctttctttctctttctctctttctttcttttctttctttctcttttttttagtggcaaggtcttgttttgtcacccaggctggagtgcagtggtgtgatcatagccaatagagggtgcacaggcacgggagctcaggtgaggcagggagctgagctcacctgacctcccatgcctgtgcaccctctattatatcactcgtatgtctaccattgtttgcagatcgtgagctgcttgatgactgatgctagggtgaccaaccaaccaagtatgccccaaaccaaagggtttcctgggcttcctgagctaagggatgttcagtgctaaaactgggaggcccaggcaaacggggaaaatgggtcaccttatctgagaccttgtgctactcatctctgaaagcattcccaggcttagccccctatcaggtgggtgatgtatgctcagtaaatgtttcctgaaaggctagaatatgtgtgagtaggacacttgaaattctcctttggtttcccatgcaaactgagtcctacagtgagaaagccaagcgtagtggcagatcctgccccagacaccaggctcgcttgggtcctgcctagggcgccagcctctctcccatgtcattggtgttctggaaagcagataaacaactgacttcaagtcctatttaagttttatggggtagccaaggtcttccagggctccatctccaggaagccccctccctgcagcctggctggcttttcttcttcttctggtgaagtcatccgaccccaagtggcccacagtttcctttctctccacacctcccaaacccgctgcccagtcctggcactgcctggggttactgctgacctttcagtgctgtttgctcagaaagtgcctttatgtcaacacaaacagccttcaggtttgccagggcctggctccttttctccctggggtccagggtagaaaaacaataaccagtgggaaggagagcgagccataggggagtgacgcgtccctggaccttgggtctctgtcctctcagccctgtccctcagggcctcctttgtcagaactcagttctgtggggagagggtactggggaggcagcggctttaaacaatgccacagtgtctggcagggagctgcgtgcttgacctgattaggctcagtgagcccgggggagggagggagtgaaggcaggcttgggaaagtgttttccatccccacccaacagactttgcttccttgtatctctgccaagacctctttttggggaggaaaggccgaatcgcctcatttctacaggggcaccttggcctcgctcctctaaacctgggtaagctctttgacctgcctgtccccctccctcttgtctttccttcccaccaaccagctcccaaacagaaagtgtttttcacactcgcagctctccctcctcaggccctgccaggcccgaagctgggcccagaggccagctggcacccacatgaaaggccttcctgtcgagaactggcatggaacccagggcctcaaggctgcccacaccacagccctggcccagggtccagagcacagggccacggaaacttggccacaaggctctggggagaaaaacagcctgagccgcacaggagaggagcctcccatccccgcagcctggctgggcacatcaagggagaaagcgcagtgcccagaatcctttgaacatgaagccgcagcacctgcacctggcagaggacccgggaaccagggattcgtgctgggggcagcacttggggtttgttagtgcaggtggagagaaaacaggagagtagcaatttccaacccatcagcagaaaaaagtgaaagctgagaagtcagggtgaggctggaggggacaggatggggtggctgggtgggcccagaattgagatctgatttgcaaaatggtggcaaaaggcaacagactgcggctcccttgagagaaaaacctggtctcccaaccggcaatgggtgtggttatcaaacgcacagccatgcctgttcccaggatgcaggtgcagtctggataaactgagactagggttgggggggatctgttcaaggttgcacagcaccttcaagatggggcttgaactacaaacccaggactccggacctggaaagaatctcctaggaggttctggagggttcattcttggacagaaatctgggagaacctacagcaaaatggcaa

SEQ ID NO: 1883338 - DNA, 4001 bp, Homo sapiens
ccagggtggtcggggcacagcttggttttatacattttagggagacgtgagacatcaatcagtaggtgtaagatgcacattggtttggtctggaaagatgggacaactcaaagtgggggcttccaggtcacaggcagataagagacaaacagttgcattcttttgagtctgggattagcccttctttcaccaaatacacaatttacatgtgaaaggggggtagaggaacagtcactcttgccttagtctggcttagtgaatctgcatttttttcttattttttagagacagggcctggctacatggcccaggatggtctcaaactcctggactcaagcaatcctcctgcctcagtttcctaaagtgctggtcttacaggtgtgaacaactatgcccagcctgcatctgcagttttaagtaaaatgggaggcgggattccctgatgcagttcccagcttgattcttccctttggcttagtgacttggggtctcgagatttatcttcctttcacaagagcctgtggttccaccgtaaggactggagtggccgatgcagggggaggagttttgggtgtggccacagaggcagctcccagcaaaggctggccactgcatcccccttcctcactctgactccagtctttctggccatgaaacttgacctctgtcatttcaggggtttcttgtggcccctccacccaggctagcccagctgagccctcgaggctcctcctgcaccctaggccttgttcctatcacttccagagcctgtctggtcagtccgaaggtctctgtgttaatgttaatgccatcggctgttcctgaccccaaagggagaggatacaatgaggcgtatcagaccctccccttcccgtccggcctgacttgtttttcaggtttgtttggaatcctcttggccaagagtaggggtccattcagttggatggggggcttttggttttcggaattttatttttggtttaaaacggatgctcacatgggagcctgggcccagagcggcccaggaaagcacgttccaatgctccctgcagtgatctaatgcgctcagaaggtgggaatgactgttctagttcccagagccccttttgcaggggacagatgctggtgtagagtccatggtgcattcaagtcatgtttcctgcccattccatccgagtgcagtagcctcagtatctcatgctactaaagtgattgtccaatcactgtcaccgcctgaaggctggctacaaaattaagaaattaaaactcctgcccactgcacagagaaaaccaattcactgaaaccatggtgttgcaataaagaaagtttaactgacacgaggccagccacgccacgtgggagatggagttattcctttcatgcgcgtccgtgtgaagagaccaccaaacaggctttgtgtgagcaaaatggctgtttatttcacctgggtgcaggcgggctgagtccgaaaagagagtcagcgaagggagataagggtgggaccgttttataggatttgcgtaggtaaaggaaaattacagacaaagggggtttgttctctggcgggcaggagtgggggtcgcaagatgctcagtgggggagctttttgagccaggatgagccaggaaaaggactttcacaaagtaatgtcatcacttaaggcaaggaccagccatttacacttcttttgtggtggaatgtcatcagttaaggtggggcagggcatattcacttcttttgtgattcttcagttacttcaggccatctgggcatatacgtgcaagtcacaggggatgcgatggcttggcttgggctcagaggcctgaccattacttaaatcaatttccctgaaaatttggaggctactgtatttcaagggtagtttagcaggccagggagtccgcttctgagtggggccacaggatcagtcggacatcagaaatgcaaaaacttgaaaggacatctcaaacggccaatcttaggttctacaatagtgatgtttatctgcagaagctgcaaatcttgtgacctccagagtaatggctggtcgtcgtttacatctatattttagcagaatccaggctcctctcatcctcctaacctactggcctttcattagctttacacaggcagttcagttcgggagaagggctattatcgtttaaactataaatatcttccaaaattagtttggcccaggcctaggagtgatgaaagacagtttggaggtcaaaggcaggatgggggttggttagatcaggtatctttcaacgtcatagttttctcactgctgtaatttctgaaaggtggtttcatcacttccaagagggtagaagacatgtcctactctggcggcaattcctgcgggtggctgaaggactgaatctgcacagagcggctgtcagaggccagtgcgttctctgctccttgtgttcctatcacccaactctcctgtaagccaggcaataagagacgggagaaaaacatcctcatgcaaagcagccggacccaaaatgaagaaatgaaaagatcagtggatcgttaagacccgaagtcaaatttttaacatgcccctgactttgtggttttaaacttgcctgtttgagacatgtaaatactcactgatttataaaaacaccagtcatcaggcgtgccagtttgattccagagaaaacagtagagagtgccttatcgggaagaacaaatggctgcccttatctagacgctttcacttactgcatggttcagcacacggcattttcatgatatgcagaaaccatcttcataaaaagtaattttccacttgcccaattaaataactgtcaaagcgtatttccgaggaaattacactgcattgttcttaactttgcttagttgttaaaaaaaagttgacattttattgtgaaataaaacatatgcagaagaattcacaaatcacacatttactaaatgattataaagcaaatagctatgtaaccagatcacaagcagagccctgccagcaccccagaacccccacggatcccatcctaaccacagccccattccctcattgggaaatgtgtttggttttatttgcaagccaacccataacctcacctcatgttccaagaaagtcccacagtgatatgaggccaatctgttcagctatttttatagggaattctttaccgcctaaatccaaaatacttccaaaatacttcccacttctgggagcctggaactcactcccacgctcttggcctcatccagggaggagctttctcgcaaacctgtcgctccaggtcctaagaaaccagattttattaaaagattgggtttaggacaattaggtaactgattagtctatcacagttgtctgtgacaagaacataaatattagagttgagacgtcaattttgtgaataaaaccaagcagaaaccctaacaaaggcaagaaggggtttgtttagatcagatgcaagggcttctggtccaacaggcagacagagccctcatgtccatccatttcctgctgaaacctggctaaaaatatttaagtgttgaaagtagagaaagaagatagaaggcatggccgggtgtagtggctcacacctgtaatcccagctctttgggaggccgagacaaaaggattgttcaaggccaggaattcaaggccagcctgggcaacatggtgagaccctgtctccatttagaagaaaaagaagaagaagaagaagaagaagaagaagaggaagaggaagaggaagaggaagaggaagaagaagaagaagaagaacaagaattggaggaggaggaggaggagggggaggagaaggagggggaggaggaggagggggacggggagggggagggggaggggggagggggaggaggaggagaagaaggaggaggaggagaagaagaaggaggaggaggaggagaagaagaaggaggagcaggaggaggaatacaatggtccagtgccaagacagtgaaaggcagagggccatggcaaagt

SEQ ID NO: 1883339 - DNA, 4001 bp, Homo sapiens
gatcatattatccacaacactgaacaaaacccagtgccccaagaataggaacttgacccataaactgtcacctaaggtggcttctggcttctgagttctcttggtacaaagcacttgcacacaagaaataatagtggtttactgagtctatataaatatctttttatttgtttctttttttttccaacttttattttagactcagggggcatgtttacaggtttgttatctgggtatattgcatgctgaggtttggggtatgaataatcccatcacccaggtactgggcatcatactcaatagttagtttttcaatccttgttccccaccctctcacctctagtagtccccagtgcctactgttgccatctctatgtccatgagcacgcaatgttttactcccacttataagtgagaatatatggtattttgttttctgtttctccattaacttgcttaggagaatggcctccagctgcacccatgtggctgtaaaggatatgattttgctcttttttatagctgcatagtattccatggtgtatatgtaccatattctcaagaaattctttttaaagggagattggatgtgaaaaaaaaatttaaaaatccagagctcaagctatctgcctgccttggcctcccaaagtgccaggattacagatgtaagccactgtgcctgacctatatccactatcgtgattgcagatgtatattatgtccaaacatttaaaattatacactttaactatgtgtagtttcttgcatgtaagttatagctcaatatagttgttaaaacagtttaaaatagctttaaaaaactgtcatagcttgattcaatgaatctttttatattaaaaaaaaaagaaatacataaaagaccagttggccacaagacagttggccacaagagggtagagaatagacataaggggcaaagaagaagaggaagaggaagaagaggaagaggaagaggaagaagaagaagaaggaggagaggagggaagggggaagggggaaggaggaagggagaagggggaaaggggaaggggggaaggaggaagggagaagggggaagggggaaggaggaagagggaaggaggaagggagaaggggagcatttatagaagcatgggcaatagttgcagaaagagaaagaactctggtcagatcatcaaaatgccagagaagagaattgaactccaaagtctgtgctcttgatctctacaataagggccacagatcctcatgcctctggggccagtcgagtaatagaaatgagaggtgggtgcctgaggaagcctatgtgaaagtggagcgtgcacagcctttcaaaagggggaagccactagtgtattttgataaatggtactctgtgggaacatgagccaaatttatcaggtcttctgacttttcaagagaagacaggaattcagatatccatgggaaaagtccagtgttttaatgtttaaaactaatttggtcttttttaatcactgtgcaggcaaaaatacatacacacacacacacacacacacatcatttttgggttagatttagtctacagaccttcagtttgagaatactgccttatactatcagccataagacaagggagatgtttggtgcaatgtccaaactgccttctctgaccacatatgcaaacaagaaaggagaagatgtgctatcagcccaatgagaaaatatctcagagttccagttgaactctgagagaagaatccacagaagatgtttcatcaaatggcccaagccatttcataaatccaaaaggagagcatatgtgtgtttctggtcaagatacagtaatagagactagatttaccttccccttgaaacaactaaaaagccagcatttaaaacacatgaaacatttttgagacattgaacctaagtctcacctctttcatttactttctcttacagatcactgtccagtgcagaaaagtgatctgtaagagaaggtaaatgaatgaggtgagccctctgactgccccagctgaccgcacagacagtttccaggccacagcacagggagaggaatccccatggagctgggtggtcccactgagttgagatgatggatctgagaatgcaggaaaccaaaatggctgaagtttgaagaacagagcactaccacaaagagagctacctaacagaggcaccagagattctacagagtcctccttgagtctttagctgtgcactaatcagcacatgcgtgcagagactttatgagatgagggtggggggaagcaccaacaaggattagagaaaacattccctgccacgacactggcaccaggaataattcttttttccagtaacctaagtggaaaacctcatacttcacggagtattgggtaaaatgttcagaatagttttgctacgtaatgaaaaatagataaattgtcactctatcttgcctttaaaagcttaaaagcaaaattcgaaagtatcagacaataacaattgtataccactgtgaaaccatcaccacaatcaagattacggggaaaatcatcaatccaaaaggttcctcccaccttcctcctctccttcccatttttggactctccccctgcccttcccttttccccaggaaaacaatgatctggtttatcctcattatgtaaagtagtttgcatttttcagaactttgttgaaagggaattaaacagtatgtgctcttttgttatctgcttctttcactcagcctgggggttttcagatttatctatgctgttgcccatgcccattgttcacccccttttattgttctctagtactgcagagaatgagagagtatttccatggcttagcaggtttgtcctctgagtgtgcgggtctgtaaggagagcagtgactctccaaagggaaggagcattctacttcctcaaagctgaaagtcagagatataacatgtgcagaaagccaggagggcacaggaggagtacaaagccagtcgtggctatccagaaacaaatgccaaaggctgaagcagccttccaaggaccaggagggaagaatttggaacaaatgtttaccactgtgtgtaggggttgaccaagaagcaagaataaggaaatttgtttttgacctttggaaaatgaaatttagagtttgtttggaacactccaggtaaataatagttactcaatctctgacccagttgcaagaaaatttcacctgctgtctctgactgtattttatatatatatgtaatatattacatatgtatatattattatatattatatatttatgtataacataatataaatgtatatatcatatatgtagtatatacatatatagtatgtatacatttatcatatatgatacatatgtatatgtatatatacacacatatgtatatacatgtatatgtacatatacatatgtattatatataatactatacatattatatacataatatagtatacattatatgtgtattattatatattatctataatatatgtaatgctaaatgtaatatatcatagattatgttatatatatcatgtaaatattatatgttatatattatatattgatactatatatcaatatatggtgtataaatataatatataccatgtattatatatataatgtatagtactatacatataacataactggagaactggttaagaatgattctgagtttgcacagagattgaaagaatagtgttttagcagtggctgtcataggcaggagataagagaatgaacagcacagatgttccattgttgccgttcctgctcaaaggtttctccagttggagacatgaattcattatttcctttcagaaaaagacctctctttgatactcttctcctttttttttgtatttttagtagagacggggtttcaccatgttagccaggatggtcttgatctcctgcccttgtgatccgcctgcctcgggctcccaaagtggatactcttctccttaatccctcactcattc

SEQ ID NO: 1883340 - DNA, 4001 bp, Homo sapiens
ttctggtataaaaccaaagtgttggttatagtaaaacaagttggagtttcctgtgcagatctgaaaacaatttgaaaagggagttttaaaagtgctctgaataatggcaatgtcagtgtggaataagggttgctactaaggtaacagctttgaagaggtcatttgatatggatgttggactctgttttttttttggagatggagtctcactctgttgcccaggctggagtgcagtgctgcaatctcagctcactgcaacctccacctcccagattcaagcaattctcctgcctcagcctcccaagtagctgggattacagatgcctaccaccacacccggctaattttttgtatttttagtagagatagggtttcaccatgttggccaggctggtctcaaactcctgtcctcaagcaatccacctgtcttggcctcccaaagtgctgggattacaggtgtgagccaccgcacctggcctggatgttggattcttactactctatttcacaaccattaaaaaaaaaagctttttgttttttttgagacgggaacttgcttactcgcctaggctggagtgcagtgatgcatcactgcttacagcagcctcagcttcctgggatcaggcaagcctcctgagtagcagagactataggcaggcgccaccacacccagctaattgctttttagattctttgtagagatgaggtctatgttgctcaggctggtctctgggctcaagcaattcttccgccccggcctcccaaagtgctgggattacaggcaggagcccaccaagcctggccaggaaaaagttgataagacaacagagaagtctagtatgtacttcatttctgggtcataaagcagaaactcttaaaattccactcacagcttcagttaagtgggtctctatgtccacaaagtaagggttaagaggcagagatcctctatataaatgaatttaaactgatattctaaggttcaaagattctccattctattaataacttattagtacctaacaatagaatataatgcacttgggggcctgggtctcctacttgctaggagttcttaatctaaaacactgacctggacatgtcgataatatcaagaatagctaacacttatataacactacatgctatgtactttcttagcaagctatatatgtcaactctcttaatacagccctgctattactttttacatttttatcttatatgtgagagaatgaggcatgcagagttgcccatgaccacacagaaagctgcagagctgggaatggaacccagccagcttggctccagctgcactcttaatcactaggctacaccatcctatgcatctatgaagaagaaaccagatacttaaattaaatgacaggaagagtagtggagaatatttgcaatttatgggaagcccatttgagaagcaaaaaggagaggatgaagggaggcagatggacctgtaaaaactgggatgaaggccagacagactagccacaaaagttccatgggtaacctggggatgggcaaaaacagtctcctctagtttatttagagaacagagaatacagcaacttgaaagatccaggagttataaaggaccagtttgggtatataacgttttttattacataaaaagaaattcactccacatcattttgtgaacctgactggctagtaagaagttatgtgtaataaatcaaagtcaacttattggtgaacactagggaagataagtgcaatgctctatctgccactgccaaggaagctttcagaagccactatcccataaaagggatgtatggatgtaagtcactgaagagccctcgaagatatcttgttttaccacagacaataccaatgccaccttaagtctaatctcatctgaggtggaaacaatctcatggaacagaaatgggacttagagcagggaatgacttggatgaaagttttctgactccaagtccagtgttctctccttgtaaccattcagggcaacggaaacaatactgatttcaaaactcctcagagaacgtgagcacacatctacgctacagagataattccctcatcacaactccctcttgctgctgtctacacctgcttcctctccctggggcgatagaaaacatgatgggcgttaatgctcctaaaatctgcaacgtatcaaacgaacgaagcaacagctactctcgaggttctttgctacgccttgtaccgcaggctggggtgagccgcagggagttgaggttcccgtgaggctgggagccgctcccgcagcctaccctgggaagcccgcacccaaccgcgaggcgcaggggaggcttggccgctgggccggccacccacaccaccgcatccccgcagaggtgccagagattctaggaagcctgcacgacaggggagcagcccgttcctcgggccccatgcacgcgaagacattggagccggcccaggcgcctcccctctcccgaccccgcagcctgctcagccaacaccgccgagctccacagaccaccgctccctagcgccgcgcagccacaccttccactcgctgggggcgggggggggggggtcacgtgaggcgggcccggggaaccaatgggcggctcgcgccgaatggaagggattgtctgacccccgtgacgtcacaaagctggcggggagcgcgctcctcttccgcccccgccccacccccggccgcagccctctccgcctcccctcccactcgtcactgcgcagccaatcggcaggcgggaagcactccggcccgaacgtgcgggcggggcagggtggcggccccgcacggtaggggagcagagtgggcaggccgggggtgagggctcgcgctccgggagctgcacggggctgcgtggaaagagcgccgagcggtggcgtcgttgtcgccccctcctcgtcgggaagaatcgtttggtctcctgccgtgcccggttcgtattccctactccctgccacgagccgccccgtccgggatcctccacccgtccaaagttgtgagggggcgccgggcgtgctcgcggatcggcggccgcgggcgtgcggagggctggacgagccctggagcgccaggtgcgcgccgggcgtccgggctgtggggcgggcgtggcggcgctgggggccgtcggggggctgggggcgggggcgggggcgccgtgcagccctagcgtcttccggcccctgcgctccagctgtcagcacgaagggcgccgcggggccggcggcagagtgagctccagggaggctgtagggctgcggcactgcctgagggtctccctgacgcaccccgggtcagggctggccccgctggcagcctgacaccggccggcccctgttcgtctggactgaaacgggcacccctggggcggggccgggccgggcagggcggggcgggcagcgggcggggctgcagtccatgggcttcgcgccccggctggatggaggggctggccctcggggcgcacccctgctcgcgcctgggccccgctgccttgggctgtggctttgcctccccggcggggtgggttggtttggttggcttccttgttctctccacccctttatccctcctccatcctcttcccccccacctcccagcccattcaccgggctggagcgagacctcgcccctcctccgctcccgcctccccgccgccgcctcctctaatgagcatctctgccttgctttcaatgggccggtgctgctgtcgctgctgctgcccgcgcgggttgtggatgttgtcggctccgtgttgtgatgacaggagaatgtgtgtgtgtcccgggcccagacgaattggtaggtattcacttaactacctgcgttgggtacccaggaaggatggtgacagatttttgtgtatggatggttttagatgaatcagcgtggtattaagggatgagatagattggaaaaagggacaaacgcgtcttggattgagatagctttgatgtctttgtgagtgcagtttttc

SEQ ID NO: 1883341 - DNA, 4001 bp, Homo sapiens
aagactatcaaagatttattcaagcctttgtaaataatgagttgttgaagattttgaaacccaaatggttttatcatgctgtttactgtcctgtcaaaacacattaccaattaaatagatgggcattgtatttcacaaagaaaatatattttaatacttttgtatcttagaggtaatccatttatagaacatgattttccatttatatatatctatcctttgtgtcattattatcatagtctaatgctggagatgtttggacttcagagcgaatactttccagggaatctaagatggtggggaaaggatattgtgcccatcttctctcatttcatgacttttcctccgagaacaaaacagtgttatatgcaggataaccagttttattaaagaagagtgatgatagctgagattcttgataacacacagaagaagtgtatttgacataagaaagtttattaaactcatctttgacctttgtttttttcctttctaggaaacaaactttagcaatcaacttgtcccctcaggttaaagattccattgttttcattttttaagttagtacactgttggtccctaaacttctttgatcaaattattatttttttaaagaggcaatgctttaagacttctcctgccaagtcagctccagaaataaaatcacaaaatctcaagcgcaatattttttcagtgatacaaaataatttctgtaaatatttggagcatgtactatattgccttatgttcaagtccaagaaccatctgaaaggtagaaatagttcatcaaggtaaaatgtattctacagtcataatactttgtaaataatttataggacaaaaaatattcaaagatatctcagttgatatatggctacagaatattcttatgcttctaaatattaaggaaatagtaaactgtaactcaagaaaggaagctgtacttattatatgtgattgagtaaaagtctaatcaaaatcaaaaattaattcaacaaaagttgccatcgagtacacaccagcccaaagtaacaaacaccctaccaacaattgcctgaaaatattctagaattaattttcacctcagttgaacaatttattgacttttttccctgcacgccagatgcctatagtctcccctacaaacatcttgtcttttccatttttgttcatatttagtttttggcaaccacagcttgtataattacattatgttggagcaggaccatattaaggaaacattgcaaagtacaaaaaattttctttggctcacctcccatctgtagtgtttcatggagtaatagcctttctctgcatcaaagtctttcctggattcctgtggtattgttcccagaatctcctcgtctaaactctcctgaagcgttagctcctaaacacatatgttactatttctatggggcttttcctttactaggaatggaaaacactgttgagatgatcagatatatactgctgatgaggcagccacacttaccagccagaggccagctctgcttctgaggatacatagaaagtatattccaatagcggcctttgcatgtgtgcattatagcagcattcatatttgaagaaagtcaaattaaagcatgcatataaaacttgtactatttgcagtttgaagattttgcccatgaatttcaaatgtctgcatggaatcccaagttattttctctttatggtataaaaatgttaaagagtggggaagaggaggtaatgatcaaaatgctcatgtgaggaaacaactaggtattttatgagaaagacaagcttccaaacacaggttaaacatggcacttttcatctcacctgaagcatgctggccactccagtccaccaaatgcagttcccttgggacctacgctggatggatacccaaggtctcatgaggtaaaggctaggacacttgctctttctgaccaggcagtgctgtggctgattaatatccacccaaagccacaatcaccttctgatctgaggagcaggtgacggggagattctgaagtctcttgataaattatgcaaacataatcaaacaatacacattgcaggttaaaaaaaaattcagtcactgaagtggtttgctttgtcctttaaagaactgaatctaaatagattgtcatcaatcattggcagttcctagaatgacaacgctgagaaattagtattacatgggtaccatagaagagctattttctttcctagtgaaacgcttgggaaaggagagaggaagggagaaaaataaacaaggcttttctaactactgttggaattttcctttctctgttctttcttcagatgaaccagaagaccaatttagtcccaatatccaatgctttcacatgactacagcttatcctaagccttccttcctccttgccaatacaaaatacacacctttcaaggatctttcaaggcctatatcaaaggtcgaaatttgcctactcctaagtcattcattttgtaacgacatcagtttctatgtgattatattatatatatatatatatatatatatatatatatatccttttgtatatatattctaattttatatactctgtctaaagctacaatatctccttgcacagagtcacaaaatgtaaattgaaatacattattgttattagtttgatttttgtgttacctcatcttcactatttagtaatcatcttaaatgcagtaacttttgacttgtaaatgttgggcttttgacacagagttggtgttaacaacattatatgcaaaatgactcactttactatttcattcgcaattcacaaaacaaaaagttaatttgtattcattgaataagataatacatagacatatcaaaaatatataatttgtagtttatttagactcaacattgttccacaacatatctaaagcagaaagaaaagataaaaatatacacatttatttttacaataaatactgtcaataagttatcaactaaatattaaggcacttcttagattaataaaattaataaatttcacattgtgtaatattgttttcataataggaagccagtggttttcattatttttcaatagtcatcgtagatatgattattgcaaatataagatattttgaatacatacagtaatatagtttggtgttaaacagtagagagaagaaggatttactggtccttctgatttcttttttcacttttgttggattatttcaggaataccagcaggaattagtttgctattatcattttattttcatagagaggaaaggagagagtaggtcaattgggatcagtctcccagggcatataaacccggcagagagtggccctctttaatctctgctaccctagacatcaaaggctgcactgccactattcacagagatatgtcagcatgtccacaggggcctgaacaatcatgcagaggtccatgctatggcctctcttgggaaatcccgctcccgactttatctggtatgctctcccacctccctcaagatctaactttgatgcaacttcctaggcatctccattattttatttatttatttatttatttagagacggagtcttgctctgtcacccaactggagtacagtggcacaatcttggctcactgcaacctctgcctcctgggctcaagcgattctcatgccttagtctcctgagtagctgggaataagggatgccaacatgtccacctaactttcgtatttttagttgagacggaatttcaccatgttggccaggctggttttgaactcctgacctcaagtgatccgcctgctttggcctcacaaagtgctgggatttcaggcgtgagccactgtccccagccggcatctccattcttgatctgggtatcaagtctctgtacttcgtgctcactatatacctagcccattctgatttatgcttgctattcccatgtcaaaacattgccccattttaccctcaacagtgtccatacttgcaggatagattatagtcatggggttca

SEQ ID NO: 1883342 - DNA, 4001 bp, Homo sapiens
aaaagatgtttcaaatgtatagaaaatggtaagtctctctgctgtcaaagaataacagcaacaggcgatgggctcaaaggcatggttagttgtcccacagtcacagtttctagatagtaacatcccgtttttaattccttacccactcctaaaaatcctcttaaggacttgctccctttctggcactctctcctacaggcatctcagctgacacgtatttccagcctctatctgtacggaatgtagtggagaccactgctctagagaactcatgattgcaaagatgaggtggggctggtgcgggggaggggacagtcaaagaaaaagtagtgcagaaaggacaatgagaaaacaaatgtagaagtgtgcaaatttgggtttataaaaaagtgacttttggaagaacagaaaagccaccatacctgaaggttttcctccctctcgggcattgatccgaaatgctgaagaatttggcttcgaaatctgtctcttaaattctgaaaccagctgcaggcttgagagtaaaccaaatcatgaagctctctgagattcttaatctcatcttcattctcaacctagaaatacaatagtcagtaagacttctgtgtctaatcccccgtccatatgccatatgccaaccgacacaaatggaaaaagggatcagaagaacagggcaatacctgtttcagtgctgacgtcccagagagtattattcctatgctttaatacacatttctgtctcatatagggctgaccagactaaagaaagacaacaaggcctgacctatgcctaaccttgctgacttagcagtgcaatattgcagaaccctacaacagccctcaagtgggaagagtaagattgagagtgagttctggttcagaggtctaatttggaattccatttgtctttatggatcaatggtttttgaaagcagtggaacaaaaaagtggatgatagttgctacaaaaaaagaaaagataagtagttagggtgtagatgacatgacagaaagtagtaacaggaggagtccaggcacagttacatcttttactagggaactgggtcaaaacacaaaaacaaacaaaaagctacaacaaataagttagcatataaagccagtatgtcagagagtcaattacacaatgatgagcttctgctggcaaggcccaaggctatggctacctctggaacccctcagtgtattctttagactactgggtcaccaaactgcaaatgtaaaattaattgcatcaggcttccagcctgagatagaagagtagtctcagagaacacaggtgggaagatctaagtttaactcatccatcttatactgatttctttaatgcacacttacatcccacttgctacttgccaggtcgtgctctgtctcatatgcacaaactcatctgaaaaaataccaggcctgactcagcctttcatacttcaaggatgactcatttaaaaacaacaaagggactctgaaaacatttcgaaatataaaaataagactacagcacaccagagacaaaaaagcaaactttttacttttgaaagatttgaaatgaaaactaaagtttaaagagcatctgttttttgcataacaatgtgaatgtacttaatgccactgtgtgcactcaaagatggttaaaatggtaaattctatgtatattttaccacaataaaaataaacttttaaaaaaggtagaggagccacacaattgaagaattttggtcctgaaatgactatacatgattcaggcccctgctaacatacattgataggagcaagaaacaaacttatgccttgttaaatcttttttttttttttttttaaagcatctgctctgcaccctcacaaaattcaagaaaacaaatgacaggctctggtaaacaaggaatgataacaattataagcgtcagtgatgaaaaacggagctggccaaaaagcaggcagagacgcttttaaagtctctgcctgctttttggccagctccattttaaaagcaagcttttaaagtcaaggaactttactgtgataattttaacagaacttaaaatttcattagaagtcacagaaaacagaattattataagaagaggaaaatttgccatataaaacaaatttgagaaggttttccagaatggacaagaaaatcattatatagatgaagacatgatgagaaaagattactagacattccgaggaccaaagaggactcgtttataaatatcatatctgtaatacttttagaatgtgattctattgcctacatgtttgtaagtattaatacatatagtcatgtaatttagccatatactcaagtgattttgtcatcaaatccaataagtgaagacataaatttacacaaaactgaaatatggttattaactttacaaagaagaacctttagcaagtgattccattaaccaagtatgcctaaggcacagattctatcaatcaactcaaaatttcaactcacacaatactttcggccaactgcacaagacaaagtacccccatagcatttttataataagataggactgccaacgtcagactaatcaggtttatcaacagagagccaaatggcatagtgataaagctcaaagtctgagtcagacagtttgctttaatcatttttgttacattatctataggctctcaggcaaattaattaacacctctgaattgtactttcctcatctactatttcatagagttgtgaaaattctatgagttaatgtttgtgaaaatacctaatgccaatatccaataaatgctgacgaaatgaagggcctaaacagatcaatgaataagagaagggataagatctatgtttttataatgcctttccaaaagaaattgccttcaatttggtatttgtagcatcataagtcacttttccggttcctaaactaactgcagtaggtaaactgggtattgcaaacatcaaaagggccacattaaccctattctagaaagacatcacaaaaaccctaccctgttaagatatcaccaacatgtacactggcagtgctttctatgtctgccccagggtcttcacacagcattcaactctattttatcattaaggttatcttaggcacaagaacaatcttaatatataaaacaattcttataagatttgatgtgtttacatttacatcaaatttcaatctactaattccatcggcttcaactactaatacattcaataaaacagggcagaaatgtaaacctttcaaaacttagatgggttggaagttcaacttattcaaccactattgttaagtacctatcacgtgtatacacacatgcacatgtgtacatatacacatacattctaggcactgggctggttgttaagcctgcagaaataaagagaatctatgttctagtcttccaagttctcttagaatgtgcaacagtttcagagcaagatacgaaaaaggtaacttggagcacattctcatcacagtggtaaggctgtctgataagaactggttcatgcacctagaaaatagcctgcatgcctgtaccaatccctggaacaggatatacgaaagtatgctggcaaagcacattttaaaataccttaacatcttccagatattcaatgtcggcagtgcaatatccatctttcattcctctttttaaaaccctaaaccgctttcctccaactgtatcaaccacagaccttccgtccggtaagaaatgcacgtttctaatttgtaacatacaaccataatctgcaaaactaaaagaaaaccttgattagtaacaaagttgaaacataaacatgcaagttctcatccatattgagaggtctaacataaatacaaatatttaggttcacaaaaagcatacctattttgtgtatcactgacacacatgccaaactgtttggttccagtctgtatacttcttcgaatcatcaatctgtatcttggctcaaatacatggagagggcaaggcacagtggggtaggccatagtgcaa

SEQ ID NO: 1883343 - DNA, 4001 bp, Homo sapiens
ttcgaagaagtatacagactggaaccaaacagtttggcatgtgtgtcagtgatacacaaaataggtatgctttttgtgaacctaaatatttgtatttatgttagacctctcaatatggatgagaacttgcatgtttatgtttcaactttgttactaatcaaggttttcttttagttttgcagattatggttgtatgttacaaattagaaacgtgcatttcttaccggacggaaggtctgtggttgatacagttggaggaaagcggtttagggttttaaaaagaggaatgaaagatggatattgcactgccgacattgaatatctggaagatgttaaggtattttaaaatgtgctttgccagcatactttcgtatatcctgttccagggattggtacaggcatgcaggctattttctaggtgcatgaaccagttcttatcagacagccttaccactgtgatgagaatgtgctccaagttacctttttcgtatcttgctctgaaactgttgcacattctaagagaacttggaagactagaacatagattctctttatttctgcaggcttaacaaccagcccagtgcctagaatgtatgtgtatatgtacacatgtgcatgtgtgtatacacgtgataggtacttaacaatagtggttgaataagttgaacttccaacccatctaagttttgaaaggtttacatttctgccctgttttattgaatgtattagtagttgaagccgatggaattagtagattgaaatttgatgtaaatgtaaacacatcaaatcttataagaattgttttatatattaagattgttcttgtgcctaagataaccttaatgataaaatagagttgaatgctgtgtgaagaccctggggcagacatagaaagcactgccagtgtacatgttggtgatatcttaacagggtagggtttttgtgatgtctttctagaatagggttaatgtggcccttttgatgtttgcaatacccagtttacctactgcagttagtttaggaaccggaaaagtgacttatgatgctacaaataccaaattgaaggcaatttcttttggaaaggcattataaaaacatagatcttatcccttctcttattcattgatctgtttaggcccttcatttcgtcagcatttattggatattggcattaggtattttcacaaacattaactcatagaattttcacaactctatgaaatagtagatgaggaaagtacaattcagaggtgttaattaatttgcctgagagcctatagataatgtaacaaaaatgattaaagcaaactgtctgactcagactttgagctttatcactatgccatttggctctctgttgataaacctgattagtctgacgttggcagtcctatcttattataaaaatgctatgggggtactttgtcttgtgcagttggccgaaagtattgtgtgagttgaaattttgagttgattgatagaatctgtgccttaggcatacttggttaatggaatcacttgctaaaggttcttctttgtaaagttaataaccatatttcagttttgtgtaaatttatgtcttcacttattggatttgatgacaaaatcacttgagtatatggctaaattacatgactatatgtattaatacttacaaacatgtaggcaatagaatcacattctaaaagtattacagatatgatatttataaacgagtcctctttggtcctcggaatgtctagtaatcttttctcatcatgtcttcatctatataatgattttcttgtccattctggaaaaccttctcaaatttgttttatatggcaaattttcctcttcttataataattctgttttctgtgacttctaatgaaattttaagttctgttaaaattatcacagtaaagttccttgactttaaaagcttgcttttaaaatggagctggccaaaaagcaggcagagactttaaaagcgtctctgcctgctttttggccagctccgtttttcatcactgacgcttataattgttatcattccttgtttaccagagcctgtcatttgttttcttgaattttgtgagggtgcagagcagatgctttaaaaaaaaaaaaaaaaaagatttaacaaggcataagtttgtttcttgctcctatcaatgtatgttagcaggggcctgaatcatgtatagtcatttcaggaccaaaattcttcaattgtgtggctcctctaccttttttaaaagtttatttttattgtggtaaaatatacatagaatttaccattttaaccatctttgagtgcacacagtggcattaagtacattcacattgttatgcaaaaaacagatgctctttaaactttagttttcatttcaaatctttcaaaagtaaaaagtttgcttttttgtctctggtgtgctgtagtcttatttttatatttcgaaatgttttcagagtccctttgttgtttttaaatgagtcatccttgaagtatgaaaggctgagtcaggcctggtattttttcagatgagtttgtgcatatgagacagagcacgacctggcaagtagcaagtgggatgtaagtgtgcattaaagaaatcagtataagatggatgagttaaacttagatcttcccacctgtgttctctgagactactcttctatctcaggctggaagcctgatgcaattaattttacatttgcagtttggtgacccagtagtctaaagaatacactgaggggttccagaggtagccatagccttgggccttgccagcagaagctcatcattgtgtaattgactctctgacatactggctttatatgctaacttatttgttgtagctttttgtttgtttttgtgttttgacccagttccctagtaaaagatgtaactgtgcctggactcctcctgttactactttctgtcatgtcatctacaccctaactacttatcttttctttttttgtagcaactatcatccacttttttgttccactgctttcaaaaaccattgatccataaagacaaatggaattccaaattagacctctgaaccagaactcactctcaatcttactcttcccacttgagggctgttgtagggttctgcaatattgcactgctaagtcagcaaggttaggcataggtcaggccttgttgtctttctttagtctggtcagccctatatgagacagaaatgtgtattaaagcataggaataatactctctgggacgtcagcactgaaacaggtattgccctgttcttctgatccctttttccatttgtgtcggttggcatatggcatatggacgggggattagacacagaagtcttactgactattgtatttctaggttgagaatgaagatgagattaagaatctcagagagcttcatgatttggtttactctcaagcctgcagctggtttcagaatttaagagacagatttcgaagccaaattcttcagcatttcggatcaatgcccgagagggaggaaaaccttcaggtatggtggcttttctgttcttccaaaagtcacttttttataaacccaaatttgcacacttctacatttgttttctcattgtcctttctgcactactttttctttgactgtcccctcccccgcaccagccccacctcatctttgcaatcatgagttctctagagcagtggtctccactacattccgtacagatagaggctggaaatacgtgtcagctgagatgcctgtaggagagagtgccagaaagggagcaagtccttaagaggatttttaggagtgggtaaggaattaaaaacgggatgttactatctagaaactgtgactgtgggacaactaaccatgcctttgagcccatcgcctgttgctgttattctttgacagcagagagacttaccattttctatacatttgaaacatcttttctcacctttctttgtatctcccaacatttgacccaaccacttcaattcatttttgtctcttcatgttt

SEQ ID NO: 1883344 - DNA, 4001 bp, Homo sapiens
tacttcaccacttgcttcaagctacaagaatcacctctacaatagagtttttgactattcttggttgcatgcaagatttgaccattatttttccctttttattctctatcatcattatcatcatcagtatggtttttatcatcttcattgtcatcatcattgaccgcctgctaagacatgagcttggatgctggaaatataagaaggtatattggtatggtcacattatctaaaagtagtccatctggaagggagcacatagatcctttcgccgaagccctcgacttttctagataacagaacgaggttcagagaagaaaagagggcatcagtagtcagatatcaaggtcaggattggaactgaagcctctgatctgatattagtgctccttcatctgcatcatgttacctgcctgtgatggtcagttgtatgtgtcagtttggctaggctgtagtacctgggaatttaattaaacatgagtcaagatgttgctgtgaaggtattttacagatgtggtaaacatctataatgagttgactttaaattaaggaaattgctcacagtattgtgagtaaggctgaagtcttgaggcagaaatgtttccttttcaggaaacctcaatttttgccagcccttcaacagattggaggccttacaaaaattgaggtttcctgaaaaacaaatttctgcctcaaaggaggccttaaaaaattgaggtttcctgaaaaagaaacatttctgcctcaagattgttgcatcgactactccctgatcttccagcctggaagcctgccctacagattttggacttgccagctaacgtgatcatatgagccagttcaattccttaaaataaatctcctaattatctgttatctatctatctacctacctatcatttatcatctatctacctatccatcatctatcatccatctatatatctgttatctactcatcatctattatctatctacagcctatctatctacctatctatccatcaattatctattatctattaatcatctatctatcatctatctttcacctatgtatatcatctatctagcatctaatattcaattaactattatctatcaattatccatctatctatcaattatctatccctcaattaactactatctatcaatcatctatctttctacaatctatcaatctatccatcccactgggctttcttctctggagaaccctagttgatatactgccctaagtgacttatatggcataagtaactttttgtttacaagtaacattttgtttacaaatacaacatatttaaatttaaaggaaatacataaaataataaaaaaaatccaaaaaactatttctacctactaagaatgaccaaggaaaaggtgaaagcagtctaataggacagtggacagatcagctgggagatgtcagcttatggtatcaagagaacctgagtttctttagtgaagatacaaagaatgcttatgttctcaaatatttattctctacttttgtcttcctaatggaccctgatattttgtggaggaggggcaggtacagcaatagggtcagccaaaagctatcttcctcagcctctattttggctaggagtggtccaatgataaaatttctcccaatataagcagaacttcttaggtggaacatcaggagagatttttaggaagagtatttccagctgggacacacagttttgcctttttttctccttctcttcctacctaggacatgggcactatgactgaggcctcagcaaacatttaggatcataagggaaaagaccaatctaatgagagaagacttgcccctgacaccatgggacactgagccaataccagcagttactatgcctggacttctcatcagatgacaaaaacaaaccctttcatgtttaagccaccacacttaagtcatggtactcacagctctaacatctcctaacttatgactatggtaccaggagtggggtgccataagtaaaagaagctaatacttgacagggactgaatgaagaaggtaggtaaagaaaaattaatatatcaaacattacagactaaaagctagtgaccttgtgatgcatttgaaaacgttcttaaaaactgtgtctcctgctgtaccttggatcatgtaccacacactaaccaaggctgtagcattgcagaatatggcaggaagaatcgagattgctagcagtgaagttcagagacagagaaataaatctgaactagggtgggacagtctgcaagcagaaatagatgcaaatacagcctttctttctttctttctttctttctttctttctttctttctttctttctttctctctttctttctctttctctcttctttctttctacagggtcttgctctgttgtccaggctagagtgcagtagtgcaattatggcttactgcagcctgaacctcctgggctcaagcaatcctcctgcctcagccttccatgtacctggaaccacacaagaataacaccaaaccttgctgatattttttaattttctgttttttgtagagatgaggtctcactttgttgcttaggctggtctggagctcctgggctcaagtgatcctcccacctcagcctcccaaagtgttgaaattacaagcatgagctaccacgcctggccaaataccgcttttctagaagacacatcctctacctgtgatctgtaatctatattgaatgagatcactgcaatttttgttgttcatatgtttatttaagatgattttttaaaattgtgacaaaataaacatagcataaaatgtaccatttaaaccattttacatgtacagtattatagcattaaatacattcacattgttgtgcaaccatcatcatcacccatcttcagaactctttattttcccaaactgaaactctgtatgcattgaacactaactcccagttctctggcaatccccattttactttctgtccgtatgaatttgactacaccagggacctcatataagtgagcgcttgcagtactcacacatcatgcagcatttgtccttttgtgactggcttatttcacttagtataatgtcttcaaggttcatccatgctgtggtgtgtgtcagaattgtctactttttaaaggttgaatgatattccattgtatgtatttaccacattatccacctctccatcaatggacacttgggttgcttccaccttttagctattgtgcataagctgctatgaacctaagtgtacagacgagaacactacaatatggagtcctgcaggatcgatgcaacccaagtgcttctataccccaaattaaagaatttataagtagtgatttcaaaatggcagccacagtgggataaacggcctatctcatcagacaaagcaatggtctcctggcaaagacaggctttaaccttctagctggagcttataggtttagaaattacctcaagttggtagctatattttaagtgctagggaatgggggattgcacagtggctatgtccaataagtaaaagacaagtagcttcagccctaaaaattatgcctggataagatctttggttccatgtgttacttgcatgaaatcaactggaagcaattacaactaaagtgaactaagttttgagaaaaccatttcactatagaaaacccaacttgacctgcaacatcctttaactcttaaatctctgaaactatttgagaacctcgaaacccaaatgaataacaggtaagctttaaaagctgtgcatttatgaagaaggttatcatcccaaacactcttctgagacaaagctaggcagaccaagctagcttaataatagaccaagaggaacattccagagaaaaagcaatggaggactaatgcttaagggagattcacccggaagctggagcaaaatcggccaggttggttttaaccaaagaatgtaatccattgccaagacagagatccctcattatttttgttcaagagaatttgata

SEQ ID NO: 1883345 - DNA, 4001 bp, Homo sapiens
gctaaagactacagcgagagcaccagggatgcctcctctcgatattggatgtatttgctgcggatccttcatccctggccaggtgaccgttctccccacacagactgcaaatacaaactcattcaggctgtccccaaacaggctgaggctatgcaagacaacagagagatcctggagaagaaaaacatggagaagagctggaattcagaggctgggtctgacaccaagaaactccccgggagcagtaaggacaggctaacctgcagccagcagcaccaagagggacccggccgctgcgcggggccttggccctgggttggctgaggccaggctgtcagccctggtttctcacagacctgcctcacctctggctgcaccaggaggcctgcaacagaagccacagtgtggggtcagcaagtagggcaagaagtggcaggagggtgctgtgagtcacagagcaggccaggcagaagtcaggtgtggggtcaaaacaacaggaagagtgtgactgggtgtgactaggcagccaaggtagacggtcggagactccctgacttagcctctctgttctggccagcctgaactcactttgtgcacctactcgtttagccaagtaagtgactgagagtctatcagacagctgtggatacacccacaaacagagtccctgccctcatggagctgacattctagggagagtctagcaatacagctagtcaacaaaaacaaaaccataattatagccaagcggtgataagagcatagatgggaacagaagcacagggagtacagagtgaggcaggcactattgtgggcaagtgaacaaaggagtggagagtgagggcaggcgccatcttggacaagtggaggagggaggaaatgagagacagggcaggcaccatcttggccgggtggacaaggaaggaaatgagagagagggcagacaccatcttggccgagtggacaaggaaggaaatgagagagagggcaggcaccatcttggacaggtggacaagggagggaatgagagggcaggtactgtcttggacaagtgaacaaggaagagggtggggagtgagagcaggtgccattttggacgagtagagaaggaaggccttgagtggagacctgaatgagctgaggaaggacgtggactcccccacctcagaaaactcctttctgtactctggcctaagctttccttgtcttttagatctcagcttagatgcctcttctccttccctggtccccacacccaacagggccccttctaggtacatgcttatagctttgtgtcataattgctattgctatttactctcttaggacactgtgagccttctgaggatcacgtgacctggtacagggcccggtgcactgagatacccagcctgtgcaaagggaaggcatgcatgaatggagggactcattaatatggacccagatgggcaggtgctggctggagggcatggctccccagagtccagggctttggtggcaacctgaatggagaatccaacatcagggccccaaatctccagcatcctctttattacatcacaacacttctaatcacatacttgctgccttctctacttgagatgactctggattctggacccagagctcaggctgttacaatgaccgtacatctcaagtgagagaatggggacatggctgtcagatgatcatggtgggtgcaatgggaagtctggaaaatgtcatttggatgctgaaatactgaaattcccaagaggtttcaatgtatatagaagtgatagaagaatatttggaaacaagacaccttcaaaaaattgaaaacatatgataaccataatcacgggatgcaaagcatcaatttcaaggatgtctctggcccatggcccatgcttaccatgcattgagcaaagtcatggcctgcagggctcctatggtctccccagtagggaccacattgatctcaggaactgaaaagtgccctcaagggagaaaaagaactagagagcacctgggcgaggctgcacaaggcaccactccacccagaccccagtgtcggttcattaagcatggaggcctgttcctcaccacctgtccccagatcccctagactcagggcttccccccatggtggagggccgcctgcccacagggtcaacagatgctgcctgccccagcagggtcaacacaaatctgaaagccacaccttctcccctggactcacccaaatcagaggccacattttgttgtagctccacttcacagagcatggccctaagctgtggattttgcatccttttctccccacccaacaaaatctcagctctgttaccacctctctgggaaaccacaggctgaggtctgacttgcttatgatgtaggctgccctgattcaggaactcagagtctaaattcagaaacttgtgtctctggcctcctttacccctgaagaggtataggggaggcaggcaggcaggagcctttcccagagctgagcaatgaggccacctccagcaacacacttggggaatcaccaacgccctccaacagtgactaccctctagcctgagaaggacgtcatcatttaagaggtttgggtttctgtgggcagagggtttaaatgctgctttttcccggcagtttctgccccaggtcaaagctttcccaccaagccaccaaccaccactgggaaatgctcttgccccacaatgtgtcagccccgacttaatcagaagtggtgactgagaggcagcctcagcctggtccgtgacttccccaagactcttcctgtcagtccagggagttttttcctcagatgccccccaggagggtccctgcagggggaacggggctactggagtcagggagatgcctctctctgcacgtggcagtggaggaaaatgggagacagggattcttgattgtgtgaaattcagagactcctaggctccaaagcaagagcagatgctccaggtagagggcaaagggcaagagagctggtgatgagcaatgggaccccaggctttcgaggttgcagccacgtcccctagtaactgcccttcaatgactgcgaggcaccttcacctcctccttggcatcataccacattgagccctggaaaacccttcctgagcaaatgaggatcagcaacccggaagaaaaccctgccccataccactcccgtgtgggtatctgatttgcacccctcaggtgagggcgttaggtgcagagactatcacacttttcctcttgttctggatccctaacctgcagactggggtctacctgtccatgccttcatggtttgcaagttaagaggatggtactggctacaaggctggtccctaccagctctgtgcaggaatggcaccggcacatagcatcacttggctggaaaacccaagctgaagggaaacaccaagagctattccttactaaaaacaaggagaggctgttcttgacagcttattccaatccccatcccacaaggctttggcagagctttttcttgtaatgcccacccctgccccccatagcagagacacccagatatccacagggctcatctctgttcatcttttccctgcttccccagaactggggaccacaagcccgagatggagcagggacttaggggctgctaggcccccaaacatggaaataaaagaaaatcttgagtatcttcaagggaaattctaggctagccccaagaagtaaatgagcaacttggtaagaaagaaagaaatagtagcttaaagcaatagtcaaagaagttagagtcaacctctgatgactctctatagaaactaaagagaacatcttaacatatgtccctgaggtgtttttcagaaacccagctggatgtttttcagaaacccagaaccaaatggatttgctggcatatagacctcaaatgaggggaaactgaggcctgaactctgattgacggacttttttttttgagacaaggtctggctctgtcacccaggctggagtgcagtggc

SEQ ID NO: 1883346 - DNA, 4001 bp, Homo sapiens
cagcagctttggcaatggaggtaagacttgatctattctttgacgtatcttagtaaatgactcttgtgttgtcccatcagccaatctaatgaatgtgtttgataaacaacaggaaaataatatgctattttaaattatatcttataaatttaaaaatgtatatgttttgcttcagactctaatagattgaagaattcacatttggtgaatgttactcttatattttagacattatacttttataaagaaatttgaaacatcagaacatgggagatagcagccattcagaagtttaaaatttaagaataactcccaagcagtgaaaaagtttttgtcaatgcgaattatctgttcttgatctctcagaattttatgaaagtttgctgccttatttgaatttttcagtggtaattcttcagacatttcttaattattttagtttagaaactatttcaaatttagaaactatggacacattaattgatatagttaataataggtttaaataagggtatatctgtctataatggttttagaattgaggacagggatatatataccagataagaactagcaggcagtaagcagtggtggtaatgaccataggctttgaggtagacaaacctgggtttgaattctacctctaccactttctagctgtatactttggccacgttatatgaactttctcaccatagtttctttgcttgtaacttagagacttcagtaaggtacaaagtgaaaatccatgtatagtacttggcgcatagtaagtactctataagtgatagcttttaccgttaattcatattctcatattaacgtggttacataacataatttagagggaatgtttgatacattactcttcagcctatttccatagcgctttcagcaaatggaagcctacatgttttggaattcttcattttataataaaaccgaaaagttcatcattttaagggagactaacctaagtctaagaaaatttgtaagattattattcatagattttgaaataaggagggcatcttatatattccaaatatttgaaaatgctgtagaggttgaacaaaacattttttgcttttcctctgagtacacgaggtctaagtggttgaagagagagaattggtataggctatcagattaggatatataaaaatgggtattggtttaatacagtaagttggttccaggcatggtagtctttgctatgtattaaagctatcaatttctcacagaaaattgaactagaaacatttttatttctggtatcattttaaatcataactcctttgggaagcaaataggttaataagaagcaggtcataaagatgtttgtcctgacttgggttcaacttttggctctgccatgtagtaggtttaagactttggacaggttacttaacactcctgatctttgttttcttcatttgtgaaaaggcagtataatgatacaccttgaagggctgttaggattaaataagagatttatgaagtagctagcacaatgcatcatacgcaataggtgattcacaaatattaattctactccaaattccatttctaaatcatctaaagggaagtactagaaacaccatgtatttgctccagtgaatttgcatccctcattgtaggttcatggggcattcattcatagtgatagcatgataggctctctctgacttctcaaatatgcacaagtagtctagatatttcagtgacaatggggttgcctctgtttgaatttcagacactgacattctggggagagcacctaagtgagtaatagtttctaagagaaggctctaatgacttgaagtaatgttgggaatagttgcatattgcatgtttatcgtatcaggacagtgatgccactgacagaaagaataatcaaacacagtttgagagtgtaacgtttctttaatagcaaatgacgtggaaactcagcagacaacactgcctgctcagtgctgctgatgactctccacctccatccctctactgatccaggaaccagcttagcaggcacaagtaattggagcaaacccagcacactcttgagtgtttgctgtgagactgaatgaattcaaagacagtttcctaggtgtagcatctttcagcaggccccaggctttaagcctgcctagagtccattccttttttctttttttatttttttttgagacatggtctcactctgtggcccacactggagtgctgttgtgcaatcatggctcaccacagcctcaacctcccaggctcaggtgatcctctgcctcagcctcccaagtagctgggactacaggtgtgtgccgccacccctggctaatttttttgtatttttttagagacaaggttttgccatgttgcccaggctgatctcgaactcctgggctgaagcgatccacccacttgggcctcccaaagtgctggattataggcatgagccaccgcgcctggctggagtccattcctttactgttttgtgagttaaaaggagtgcctggaacacaatggtatgtgggcagtaagctagattagccacaaataggagaaagagcagaatctgggttattttaagttttattcacaatcaacaagttggatcttcttacattgtgtctacagggtacatactctgtacttttattgagattgggacatgtttaaatagataagtgtcaatccattaagttagaaaagaaggttcttgctaatatgtttatttctttatctctgccttccaaaacgtgcacatcaatatgcaaacacacatgctacgtttttctaagttgttaacttgacgttctcttttcccctgtgtatgagtagcttttgataggaaaaaaatgctcacttctgagccttccaaaccattttgagctgtccaaattgctaagtaaatttttgggaactgttcagcatggagcaataatcaacaaatgtcagtagcaatctttactgagccacctattatcaggtatttacgactctagtggtaataaaagagatctgggcaggcttttcctcatactgaataattgaaccaaattggctaggacgggaacagattagtggaagaagcactagaatagggataggagacttgtattctgtcactaactaggtttgagacctctttgtgttgatttccaataggaagtaaatttttttcctgccattttatagggttattgttaagatcaagtgagataagtggcatttatgttaaagaattttgaaaagttaaagtgctgtgtgaatacagagcattcttctttgttgcctgtcaccctgttttttcatttcagttagtgtgtggaacgagcaatctttaatctctttgggaggttgattgcttgcccctccccaccccatatatagaggaaagtaggcctctctataggataatcagaggaaaaactcctggaatggtttgtgtttgcctccgtttcctgttttcctttgtcattctcattaaagatttttttatgatttaaggttttcttataatgggagcatggaaagctggcagtgaaataatcctagtaggaacacagagcctaaaagcctgaacatcctgtatcttttatggttcattaagaacagagtatgtttcaaccagtctctcagttatccaaactcaaatttgagctttttactaaaaaactttattatggaaatttccattatatacaaatagaataatataatgaagtgccatgtatccagcatccagccttaaacattaccaactcatagctagtcttgtttcattatcactgcatgcccttctgggtcaccttgaaacaaatttcgtatatcaaaatttcatccataaatattttgttatatacctccgaaaagtaaggtatctttcaaaatatatgaacacaatacctttattcctttatcagtgtcaagtatcaaattaatgttcaaattactcttgcatatttcacaattttttttcatactggctttttctaatcagg

SEQ ID NO: 1883347 - DNA, 4001 bp, Homo sapiens
cttgaaaaccggggccactggaggaagggtgctcaggacggcacaaccacagtcgctccagtagggccagcatcttatctgcccatctaaagacaagctgcatgtgagtcaggagtaagtcaatgtgacatatactcactgacttcattcacttgcctacaagattatacgtcacttaaaagtgctagagattcgacagaaataacctgataaggaatgtaggaactctagtttgacaaatatccagaggcaccaacacaggaaccaaacacaggcgagacacacatgtgtaattttttttttcttttgagacagattctcgttctgtcgtcaggatggagtgcagtggcgcgatctcggctcactgcaacctcagcctcccgcgttcaagcgattctcctgcctcagcctcccgagtagctgggactacaggagcccgccaccacgcccggctaatttttgtatttttagtagagacggggtttcaccatgttggccaggatctcttgacatcgtgatccgctcgcctcggcctcccaaagtgctgggattacaggcgcgagacaccgcgcctggccacgtatgtgtaatttctaaaggtttctctgcccttggtgtagggaagaatgtttgaaaaaaagaccattgagaatacttcaggtaagtttttttttttttacacttacaaaatgctaaatgatcaggggtcaactatcaagtggtactctgtaaggcaaccttaaaaactcactgctgacccaggctcggtggctcacacttttgatcccagcacttttgggaggctaaggcgggcggatcacttgagcccaggaatttgagaccagcctgggcaacatagcgagaccccctctctacaaaaaataagaaaattagctgagcatcgtggcctgcacctgtggttccagctacttgggaggctgaggtaggaggatcacttgagcccaggaggcagaggttgcagtgaaccaagattgcgccactgcactccagaacgagaccctttctcaaaaaccaccatcaacaacaacaaaaaaccccactcaatgctgtcttggcagttttcagtgctcaatgagaaaacctactcttaatggaaaaaaagtgggggaaaggggttccaggaactacaaagcaaagtgtgtcttgggaagttagctttgttgcactccaaataaaaatttggcattgggtggtagttatgcatactctacgcatcgacaattctctaaggactccaaagtgcatgtcctggaaattccaacatatttgcactacgttccaggtacactagaatgtttatagccatgttctgagtggcctcagtctgaacaaaatgcccaaccagagtagaatggattcactgttctattcacactggaatactaggcaacaattaaaattacctatacatacacagtacaccaatttaatactgattgaaaaccacaaaacaacacactgtgatccacccgcaaaagttcaaaaacaggcaaaggaaaacgacatcgcatgcacacatagatggtaaagctgtaaggaaatgatcacactagtcaggctaggagacaatcaggctccgaaaggagcacagggcatgggtgagaaactcctggggtgccggtaatgcccttttcgtttttatctgggtgttttattaattcttctttaaacgtgtatgtcgtatgcacttttctgcgtatgctatatctgttaaaaatttatcggcagcccagcagacagattcgtgcctctaaagaggtggaagctccagaacgatccgcctcgccattaagcgaaggcaactccgaacgctgagaaacgcaggcccggggtcggccggtgtccttacggattggcgagcgggcgcacacccctcctgcattaaggagagttctcagggtcacgctccgagcgaccctagagggagcggcggtgtcctcgccgccgccaaacccacctagagccgctctccgcgtcggcccctccaccgtcgccggcgactccggacagccgcggggcgattctggggcttccagacgagggaggggcccggggggaaggaggcggcgactcccgccgccccgcagagcctcggcggccagagctaccccaagaaggccagaccccgccgtccgcggctccgcgggccccgatagggtgggcgtggccgccgcgcgccggacgtacctctccaccgcgaaggaactacctcgccagttcccggcgacagaggacagattatttccaggaccgctcccgccacccctcccgggcaacccactagacgtcccctttctaatttggagtgcgggtgcgggcgcacgcgcactgccgagcttccgcgagggcgcgaccggacggcggaggaggacccgtcgccgcagcctccagggcggagcgcgtgctcgcctcgacacgcagcgaactggtggcgggggcgcgcccggcggcagcggcggcggcggcggcggcggcggcggcgcggcggcgcgggtcggccggggcgcgagcgtgcgcagtggctcctcggcctcggctccagccagggcggcggcgctggggaggagcggtgtgggcggccgggggcggggacgcggggcggcgggcgtgtccgaagtcgcgcgcggctggcgcgcggtcccgagtgaaaggagaaggaggggcgctgggggtgacggtgcggagccgctgccagcgctgggcgagagtcggcggccggatccgaggagcaggcgggcctgaggccgagtcagctgcgcgggcccccggatcccccgacagagcggcggcggtgtctggccaggcggtaggcgctgcctggccgcggcggggaagatgttcagcgtagagtcgctggagcgggcggagctgtgcgagagcctcctcacttgggtacgtgggggccgcgggccggcgggaagaccccctccccccgccacctaccgggaccctccacgcgcggcccgtggggcgagcgctgcgggcgacggtgccgtcacatccggggcctggggcgggcggggcgaggaggctcggcccagggtccgagagagacttgccgggcctgaggcgtcgctgttccgggcggaccccggccggggctgggctgggaacgcggcgggcgactctgggatccgtgcggctgctcgcagctggggctgcgctgcgctctgggggtggccgagcctgactgccccgcgtccaggacccgccgccgctcctcgcctttgttgccgcgttcgcggaggacgggcccggctccggcccgggaactgaaaggacctgtgagggagcgtggggagaatgcgggaggcgcccggggaccccgtttcggatgcaaggcaccgctggcggtgggagtgcgcgaggggcggacgcctgtcagaggcgtcgggcagacgtttaaaggagtctggaggtgtctgggcgtcaacaatggaactcgaaggccttgggggacagagtcgtgggattctgattttgaattcttaaacggttttagattcctcatactttgaagtaaatacatgttcacctctcacgtcagctgccgcgccttcctgaagccgggtcttcaggacgcggcaggggaaccgacgcccgggttccagtcgttctcgccgcggcgcggccggggagggggagggatgcgcagagcccgggcggaccccgcgctgccttcgggagcctccgtttcactcattgctgagaatgttaattaaatgtttacggatgtgtttatgaaggctactacagcatttgtattacttttaaaggtaaaacacgaatgtgagagaaattctctttagcggtgtcttgggttacgagtcaggatccctggagtgtagacgtcacgatcctgtgcaaggcactttgctggaaaggctggagaagtattgccttacgttggttgttaaaaaaattaataaaaatagtctgaggtttttatagtttggctacgtcacgaatcaatttctgtc

SEQ ID NO: 1883348 - DNA, 4001 bp, Homo sapiens
actcgaattcagacttgcatgggccctgtaaccccgctgttttggccaatttctcccatttgaaatggctgtatttacccaatacctgtaccctcattgtatctaagaagtaactagcttacttttgattttacaggctcttaggtagaagggacttgccttgtctcagatgagactttggactgtggacttttgggttaatgctgaaatgagttaaggctttgggggactgttgggaaaacatgattggttctgaaatgtgagggcatgaaatttggagggactggggcagaatgatatagtttggctgtgatcccattcaaatctcaacatcaaattgtatctctcagaattcccatgtgttttgggaagaacccagagggaggtaattgaatcatgggggccggtctttcctgtgctattctcgtgatagtgaattaattctcatgaaacctaatgggtttattgggggtttctgcttttacttcttcctcattttctcttgccacctccatgtaagaagtgcctttcacctcctgccatgattctgaggcctccccagccatgtggaactgtaactccaattaaacccctttttctttccagtctgggatatgtctttatctgcagtgtgaaaacggactaatacagtgaccctactttgttttatctctctgagcttccagtatctaatttctttaaaaaattgatatgactacagggttttgtgagaatttaagggtaaaaatatctttggtgtggggggtggggggtggctagagcattgtgttttgaaatttagctctcatttttattttatatgaagcaccatcactcagatttatttcttaatccagttctccacctccttcattgagataatataatagagggttgtaagggggccctgaatgggagaaaggatatatggatgcagaaggagatgccacaagataaaagctgagagagctacttcaataaaaactctgtgaactctcccctcccaccgtctcttgataatagcctaacactatttgacaaaaggtaaagaaaggcattctctttattctgcaacatgacctttggggggtttctgtgcatcatcagggcagggtcaagcagcatccaaccatccacaggtgaaaaggcatggggccggggggaggcgggagtgcttctgaaggcgcgggtgggtgggtttgtggggctggaaaagaggaatgaaaccagatgccacaatgcaactgctctctctggtccctgagccctcctgagacactcccaggggttgctacgaaacatgatcaagagctgtgggttcagcaattgacagaaatgtatcaaatcactaagcatttcttgcttgcctgttacacattgggcatggtgttagcaatggtgacacaaagatgataaagacgtcgctgatctcaagtccttgtctggttcaaccacgtgccaagacattttaatactctgttgggaattctcaggcagcacaggcccaggcgttagcaaagcagccagggatttcagacagagggtgccatccagggtaagaaaatgaactttttgtgtcacatttgcattttcattccttaactaagagtatctgaaaatactgatggcacaaacgaactaaattcctgcttcagcaccaaatggatgaactactacggtttaagcattgaactagtcctaatatcaccattccagaaatgtcttagtattaatcaggacaagaaatagggatctctttcgcaagaagcgagactgcactccttcctttccttgtatacggaaaggggacaaaatccacagtgaaaggcctagaagcggcgcactccgcccacgggcggcccacgtgtccacctattccgcaccgcgccctgtcccatccctatggagcggggtctgccaacgctcgcgagagccctctcggcttccacgtttgccacgttccaaaggaccgagacaaactggaaagccgaaagaggctcgcgctcacaggcagctgcgtagcgcccgaacagccctaagtgagcaggggcggggagcgcggcagggtaccgccgcctcgtaagggcccttgcgattgggtcccaggcgccgtcactcagccttccgggggcggggcgaggccgggaaggggcgtggccgtcgggcggcgagccgcgcgctctcgccccgggagggagtcacaggttcgtacacgcgaggccgggcgcgcgcagccggcaggcgggtgaagtcttcccaggtgctgcaggcggtgctgaggcacagggtctgctgcaggagcagcggcccgaacccgctccagcggcccgccgccgccagcggttcccgcgtcgcgtgtgtacccccgcgcactgaaggaggtccgccagccctcaccagcccccgcggaccgtgcaatggcccagcgtaagaatgccaagagcagcggcaacagcagcagcagcggctccggcagcggtagcacgagtgcgggcagcagcagccccggggcccggagaggtcagaggccctgcggggcggggatctggggcctcgcctcggggtagggagccggctggcgcggcggacgctgcgggtgcatctccccaggtcccaccgcgcgccgcctccatcccccgcgacgctcctcctttaggcgcgcggggcggaggccgcattcggcgggcctggcgggcgggcgaggggccaggcggaccggggtccgagccctcgggatgctagtctcggggagccccttcccagcggttccttcacctgcagggcgcagccgagacagaggttgctgaacgactgtttcttggctttccgtggaattgaacatgggagtaagagaacaatttatcgtttgccttgcgtgttttggggagttgaaaatgagccaaagtcagggaaagtgagttcctgcctaaccagcagcgtttcagagcaactcaaaggaggtgaaaatgggggcgccggggggcagggggagggaagaagttgggagtgatttgaatgctctcagaaattattttaaatatttttgcttgtatgtagctttcttaatatgcgttgcagttgcctttaaaatagaatgtcatgaaatactgaacgagcgtctgtatttttaccacttttacttaaaataaaaatcgattggatattcacctttctcctcgtccgtgtgcatatccagcagagagaacagatttttaaatctgtttcgtctcatatttcagtgattcttggtttcttttatacttcctttgactcatatttgggatattgaaactgcaatacacatgtgtatggaatgtgagctgtaaacttcacttgaagtgatttagactctttgttttctgagatcttcagatcatgcattcataatataccaagaaaatgaatcagctatagtcaaagaagtattttctttatagcacttgtcactatctgaacttgtcttattactttcatgtgtgttgtctttggctcattctctctgtatccccagctcctagaatgttcctttcccataataggtgctcaataaatatttgagtagtgaatgaatgaatggatttaaatggggaaagtagtgcattaaatccattgcacaaatttacattctaaggactaatatttgtattctaaaagtaaagatgtagacacagtttgaagttcaatgcaagcatattaattcacctttgacataagtgaaagtttgtgttcctttttcacttgttcttaaatgtcacttacttaaacctgcagagggatagattaattgcctcagccgactgaggctactcttttttaacatccctaaatgagaatgggttcttctcattgtgcctctaagggcactaagcagagaaagctgatgaacaactttaatgttagttgttttcaaaaggtttctgtagctatttgccagagaagcatgtcttcgttccatttcatttttgtgtttatgaggagagggctgattgcatctgagggaa

SEQ ID NO: 1883349 - DNA, 4001 bp, Homo sapiens
ctgaatgtagcctgtgataaccaaacccactcttctgaagcacggttcactttggagcataccctgttgcacatgccgcttggaatcagaggtaaaccagacccatttaagctatggctaaatataatgtgctgccttgctgcagagcctggggaagcctggcggtgggtcatgtggggagggtgggccactgctctatttcagcaggaagttgctgtgctttccttgttttataaaatgtccccaaatatggaggctttataatgggtaaagcagtgatccagctggactcattctagatatgctatgatttatcaccgtataaaggggtaagaaagatcacttcatgtttcaaagcactgatctcttttaggaagttacactgggcattcaaaatttttgtgtaattttatttcttgcttttttttttttttttttttttttttagatatagggtctctctctgtcacccaggctgaagtgctgtggcacaatcatagctcactgtaacctcaaactcctgggcccaattgatcctcttacctcagcctcccaagtagctaggactaccagggcatgtcaccatgcacagctaagttttggtttttcaaaaaaatgttcacagtgacaggatctcattatgttgcccaggctggtctggaactcctggcctcaagtgatcctcccaccttggcctccaccagcattggaattacaggagtgagacactgtgcctgatcaattttcttttttatatgtgttactttctacaatttctttgctagctgactttgaagattcttctttggaatagatgtgatgttcaggaaccaggaggattttcctcgtccaagttcatgggtaatttggtgggttttcttggagagtttaagtagaatttaattgtgaatatttgagtgtttgagatagggagggaggagatggcctgaaggatagtcactacttacttgatggcaagacataattaatgggaatgttcagcattattttcctctaaaacatgaagttctacatgattcttatatgaacgtgggctgagaaagcatgctgtgttgtgtacattatctggcttcaagaattcattataatgagatcaacaaagcatgagtactgccagccatgcactcagtggcacccactgttgttgggctgatataccttctcattgccacttgcctacctccaattctaaaatgcttttttcagcctctcttgcagctaggaaaaacatatgacatagttacacatacaaagcttttacttttctgataaaagggggaaatattcccagtgtgacccccttcttctcctcttccttgaaagtggtgtgatgcctggagccacagcagccttcttgaggcagtcatcttgttatgataaggaaaggccaagagaactgtcaaattgttagctctggcatcacatcactgagctgatgaatcagcaccattgttgtacttttaaccttcatgttgtttgagaaacataaacccctatttgtggaatttacttttagtcagagttttgctaacagatatagttcatggaaagaattttgctttactagtatttactctaatacgtctacctaaatatccaccatgtcctctttgtctctctcccgtatatttcagcactgcctaaagtctgtatttattgttcccatggtttttcatttttatttttttttctgagatggagtctcactctgtctcccaggctggagtgcagtggcgtgatctcggctcactgcaacctccacctcccaggttcaagcaattctcctgcctcagcctcctgagtagctgggattacaggcatgcaccattagattttgaaaatgaaacttactcataaatatatttctttcaaaatgaattttataactcttttcccttcaaatttaaaacttaaacctctactaagttcccatgggttcttttcatggaaacttagtagaggtttaagttttaaatttggaaggaaaagatttacaaaattcattttgaaagaaatatatttatgagtaagtttcattttcaaaatctaatgtgtgatcacttcatttagattaaactgttgcctggtgcacttgcaacccacacatggcagaattagttggtgtgggagaaggaaagggaaactctgactgcatagggtcaaaagctgtttgatgacaggtccgtttgtgcataaggacaatacttttagaaacccataaccttagcaacctcaaatgccaaaagcagagtgtgaaataaccaaactagaaaaaaaaatggaggccttattgatcttcatcgcactaatacacccttaccattttaaagaaaagtatactttttagaagaaaaaagaaacctatgtttttaaatttttttaattactcccttgaacatgtgtgtgtggtttctttaggagagtctgggtagttgacattgttttgtctactaaggatatgagtctattgtatcatgtaatttcctgtttattaggacccttgggggaaaatttctgtctgctcatgggagcccaaatatttgtaactgagcaacaggtttattttaatctcatgaatattgtaggtgatttaattgtcaatgggctgcttatttttgttttcttggttgctttttaaaaaagttatttaaaaaggtacacaagtcacatgacattagttcctattaaaaaagattgagttaattcagtcagatttttatgtaacatccaagagtgactctgtcccataatacaccctctgcttcacttgatgttttctagcgttgactcaggatatgcagtagtaactaacatcacatgaattttcaaaattgcatttatttttagcaccaactttaaggatttttattatgacaatagaggttaatgagcattttcacaagataaacaaaaaatccccccaaatatgtaagtgttttaacataatgattgcagtttatttttcactcaggtcaaatccaagatgggtgttcctgatctgcctgtagctctcctccaacccagactcctttcaaactgtgcctccaccatcttcaatatggagcttccaagattgccctgctgccctgcatcaagcctgcaaaagaggatagggggtcaggccactcatatttcattggcccaaattcagtcacatggccacactcactgcaagggaagctgggaaatggagtctagctctgtgcccaagaagcaaagaaaaacagatttgatgaagacttagtcaatctctgcaacaatgaaacagataagaaggcaaaagaaaaagaattttacaacctgaggagggagagaaaattcagttaacaaaaagatagactacatgccaaggtagtctgcagaattctacctacccaaattatgtgttaaattgtgaaagaagttatgataaaaataggatgagggtgaaatttgaaaaatgctctggggacacatagcacactccttccctggtgacacagtaggcagaaccaagccaactataaaaggaagctcagtgtgtttaatctgttgctcggataaaaccatcctggaaaaactcccagttttacaatctaactgatcatcagtatctcagttatacaaataactccagcctgcatgaaataccttcttgctccccttgacttgtaaaaataactttgtttcaatggaaaaggtgtagaaaatggacgttgaagccaatcaaactcatagtatcaatactttgtgttaagctttaggagtaagttttgtaatcattgcaatcagcttgtttttgttatttaagcagcttaaaatgattaagataatctgacatattagccttacgattttattttggaatgataaactaatactcaatttgtaattttcacttgaaagttgcagaataattgaatatgttctttaaaagtgtttgaatattcagaagaatctaatttactacatgtataaactagtattattacaagagttca

SEQ ID NO: 1883350 - DNA, 4001 bp, Homo sapiens
gggatgaactggctggtgctggggggtactcagatgaagggatgcactggcccggccagctcagggccctcaggtgagcggccgcccaggccttcacactttgggagtggctgttccttggccaaggggaattctcctattgaatcagccgtgagtgctcctgtagaattgcggaccctgtgagagaatgtttttatccagaacaaattgagaggctccccaccacgtgcctttccagtcacttctcccatttcagcctcagtttccctccctgtaaaacggggctgttggaaggacgagggagacctgggcccggagcggtggtcgtggtggctgcccacgctgtcttctctgcgtgcacctcctctctggaggccaggcccagggtcctgccttcctcctcctccttcctcctccaacagggagactccgcagcgccaggccgtgcctcctcccaggagtttcgttcttgttcactgtggtacaaatgtcagggaagaatttaaatgagggaaaccgtctcagagagtgtgttctggcaggatttcaggacacttgtaattaagggtgcagcgaggagggaccgaccccacagcgaagggagggctggcgccggcaggcggggccctcagctgcctctgcttcctctcggtgccaccgtgaccccagcctccggtctgcggctgagctgcccctctgagctctggagcggaagtgggggtctgatggagggggctggccacgcagtcccctcagaccctgcccatcacttgcccctccctgacccctccagaccccccttggggtctctctaggcagccctgctagaggggcccacctgtgcgcagcctttggccatggcctctgcttggcggacctgaattctggagcccctcccaccctgctccggagcggtcgccagcgccccgggcccctgtccctccagtgacagcggctgtctcttcagggtcagagggtcgggccccctacctgcagcagcctgttctccccaggcccaggggcagccttggaggggcatggagacccagctccggaaaccctgggggccgggaatgggaaggggcaggccgggaaagggatgtggacatctatttagcgcttactgcatgctgccctgtgtttggcacgcatcgtctcattaatccctcagtcttgggcgtggctcctagtcaacccatcttacaggggagaaaatggaggcccagaggggcttcaggtactggtccaaggacactcagaggctgggcagggtggaaggtcactgactgaatgcctactgtgtgcaaggttcttctgctctggttcatcgttggagtctggctctgtcccggggctcaggtgtggagcttgcggtcttcctccagctcgttcaggggctgtggtgagttttgtggtttgggggtggctggatgctagcctcaatctcgaggggctcatggtctagagtggatgaccggctgccataacaccctgtggggatagaagtcagggaggagcccagggttctagggtgttcgtggagcagagaagagggcccggcaggctgcctggaggaggtgagctctgagcagagtcctggaagaccacagggactgtgggtagaatgtttatgggtgtgcagggagtggggaaaaggacgggggcagggagcccgtgttggggcctgaccagggctccaccgcagcaattatgagcagccgggattggaattctggacggtcgccttccaaaatcccccaggtgccgcagccccaccttccaaagaaggaaatgagaatccgagaagggccgggatttgtccagatcagggacagatctgacccgagttaagatctgagttgaggctcaaggctctcccttgtgaaaattaaatgagatttaaaccaactcagccttaaaaaaacaaaaacaacaccccccaccctgcccctgagctgtcttcagccccattagggagagtgagagagcaagggtctgccagtgaggagatggggctccgtgaatgtaattaatcacttttcaattagtattcaggagcttttgtctgaggacttgaagcaggttagttccagattgcagcgccagggttttcggatgcatttttataaatgttgtgagccgaaatagaacgctgggagctgagcaggcagccccaaccaaagggaacagaaatgaagccccacaatgagagaagtgattgggaacgggggcgtctcgcctgacactctgcaaattcctgagccgcagtgcaggaagggctgggcctgcagcctgggaagactctgggattcagtcggtgctccataaacgctcctggagtgctgaatgctccccacagggagatgggtagggtattcttggcggctctcagggaaggtttgggatttcggaaaggctgttctgagggtgcgggagctggtggtccctggctgtcaaccacgtgccaggaactgtgtggggtgatattgaccacatctcttaaatctccaaggatggagggtcccgtgagtaccagagacgcaggcactgctatcccatttcacagatggcaggctcagggtccggcgcccttcagggagggagagttgatcctcggtgagaaagagcatccggtgagtgccaggcagtgggtctggctggaggacaagtgcctgccgggaatcgggggccacacacgttccactctatccagctggctgtgagatcctggggacctcccctggcctctctgggcctgggcctgtaacatgggagtagctaggggcccctggaagcaccagagccagagcaggtgcagggatcacccatagcctcgccctgcagagcgagctccctgtgtccaggcatccctgcaggtgctgggtggcactctgctgcccgagaggacagaagcactgcttgggtggcactctgctgttggaggggacagaagcactgcccaggtggcactctgggccaggtcatgtcaagaatccctctctgtcctgagactcagcttctccaggcatgatgcaaaaggacaaacaaataagatgcaccctccaccctgacccctgcggatggtttctccacccgtagccaccccagctccccctagccaggtggtctgtctgataccacagggccccagcaccaggctggggctgtttctgttcttttccagtggtcgggtagctgggcctgtgagttcaggggacgatggccatgggggatgtcatggactgaattgtgttccccaagttcacatgttgaagtcatagctccccctaactcagaatgggatgttatttggaaatagggtcattacagatgtaatgagttcggatgaggtcactagggtgggctctaacctagtgtgactgtgttcttataaaaaagggcaatttggggacaggcatgtatgtagagagatgccatgggaagatggaggcagaggtaggggtgaggcttccacgagctaccgagtgacaaagatggcctgcaaggcccagaagccggagtggggggcctgggacagtgtccctcatggccccaaaggaagcggctaacccctgcttatgcctcgttcttggacttccagcccccaggttgggagacaatcagctttgttgcctgagcttcccattgtgggccactttattacaacggccccaggagacgaaggcagccaggtgtgcaagcccgggggtccgggtgggcagggaccgagggacagcttcccagcaggggagtgggaaagcaggcacttccagcaggaaggtttttggtctgggcacccctggcctagggccagccctgagaagcaggcagcagaggggccaagccaggctgcactgttggctgcagggtcgagggagggggcagcacccacagagtccaggcttccgggcactcgggctcctcccttagggcacacacgacccccaacaaaggatcctgatgagtcattgtgggagtcgcagccactgggctgcctgcag

SEQ ID NO: 1883351 - DNA, 4001 bp, Homo sapiens
cagatcacattttgtttacctattaattgcttcatggacatttgggttgcatccatactttggctattatgaataatgctgctatgaacattcataggaattgcatatgaaggctgcaggtgaacaagcttttgtatgaacatacgatttcaatcctcttgggtatatctgacatatttttaaaaggttctttagctgggggactactgcaattatccagaacaaatcccattcattaggttcctactagggttaaggatttgttcttctctccttcctattacctcccttttccttgattaaaatatttactgacaatttaacagaaaacagtagctctcaataagtgacatgaaaatagactataaaaaactagtctagattttctactggcctctctggagggaaagtagctgagtaaggaagaacagctattacatggtgggactgtcccacacaagaggttttaaaatgcagggtggtgtgggaaagacaaagattcccacaagcacgtatctgactttagtccccagggcaggggcagttaaattgattcacaaacttgcaacaaaaatctcaatcgcacaccaagctgggaagcatttatttgtcagttaaactagttaacacttccttctttgctactggagctcatccaactttatgaagtccaaagtttcaaaatatcactctgtggtgttcactaaaacaactaattactggcatccaagtaagttagtaaggaaataaagacagaaagctagtatttttaaaacataaaaggaaatgaattatcatgaatgttttaaaaaaatagctttgtgactaggcttctgctccagaacgcgtagataaagccacaccataactagaaggggaatggccaagaggaagacatgcagagcatgcctgcgtgcacccacctgccatgcaaagataagtggaagagcaggaggcagggaaacaaagagaacacggagccgggcgcggtggcacgtgtatgtctgtagtcctaactactcaggaggactgctttagcctggaagttggggagtgggggagagaaggaagagagggagggagaagaatgcagaaagaaaagagagagaggagagaaagcaagcaagcaagagagaacgagtgagggaaggaagaaagggagggagggaaagaaaagaaggaagggagagagagcgaaagaaagaaggaagaaagaagggggagagagaacatgagttcaaattgggcatactgaggctgaaggaacaaaacattctagaagtagttggaaatatggtctgtaaaatggcaagaatcaaccgaagctaagcatgtggaaaccatgggaatggataactgaagtaatggcagtggctgagaataataaagggcagaagatgaaaaggcaagaaatacagactccggaaacatccacattaaaaaaaaaaaggtaaaaataataacagggaatacgacaacccaggaaataaaaaaaggggggaaaccaatgtaatacaaaaacaaagggaagagatgtttaaaggaagaggaggtgatatttatcttcaacaagaaaaattatactccattgtttatttctacaataaagttaaaattatttcctggttataaaggtataaataatgtcaaaagttatgtgaaagttaacaaatatgacaactgacacaaatgatacgatgctttggaggtcagtggttaagtgagaagtgggattcatttctggagagtggatggagtcaaacacaagaaagcaaggggcccagacttctctttgcacagctatagacttagttatttcagaattggagtacatttgcaagctgggagaaacccctgcagagaagtaaggcagatgactgaggcaacgatggagacagggtagacggaatcaagagcttagaaactgttgacgttgccatgtctaagaagaaaatttttctccaaagttttcttcttagacatggcagcttcagcagtttcttccaaagaaatccaagtcaagagactccacattaagattttgaaatcaaaagggatattgggtgcactctttccagagaaatataactttctgaaagcaaaaaatccttgaatgtgaagagaacaaaaatccgtgaaaaccatgaggtagtcaaaaggagaaaaataaaagaactgctccacacagacttggctcggctgaaatgaaatggcctggcttggctgcagaaggcagtcagcattgatcttacgatgttctccactgctaaggaagggagaaaacaaacagggttgccaagggctgaggaaaggcagggcaggaacagaacagcccagcactgggatgggcagaccccggggctggggcagacaagagctgcagaaggccctgcaagctgcagaagggccaaggaaagagagattagaaatcagccaaaaacacaggtttagagcgagtgaggaggagggagaaccagagtcagctatatggtgtgggcgagccagtgccatttccagatgaacttcaaggtggtaaaagcagagcactggacccagcacaggacctcgaaccaagcacaggatcccagaccaagcacaggaccccgaaccaagcacaggaccccgtacaggagaacaagatccccccaagcctccacaaaggactgcagccctgccaacaccttgatttcagctgagtaagacccatttcagacttctcaaatgtaagagaagaaatctgtggtgttttaagccaccaagtttgtggccctgcctgagagcagccacagggagcaaacacaccttcttaagagcgagagtgccgttaccacacaaagctgagcactagctttcttgtttgctatgctttctcagaagttggcttcaaagtattcatttaatttctacttctttgattatgagaaagaataaacatttgttcaagtgtgtgggtcatttgtatctcttgaatttcttattcatgcccttttcccatttttctagtttatgtcttttctaattatgaagcacttttgtaatattaagtatattaatatcctatattataaaatattattagcttgccatttgccaactaaatttgttcatatgatgtttgagacataaaaataatttttattcagttaagtctacaaagaaaaaaattgctttgtagcttattccctttgttctcctgttttgaaagaactctcaaatctctacaatcgccagtgttattcaccctatgaataacatggaaattctaggtatctggtttgccattatagacacatcattaaatttctgttttcttttaagagagttcaaaaagcttaagtatgtcaccttcgctagcaactatggttttaaccatggcaattaaaaaaaaaaaaccaccataggggcttactttaatgggtccaggtggcagattaagatacatttaattccacatcccttataaccattagaaagccaaatacctaaaacaagtctaaggaaaattagttaaaacaaaacccttcgaacagctgagaaaagtttaaatattaccacagtgcctgcacttctgcaggaccccatctgaacagcttcttcctccatgtctaagtttcctataagaggtatgcaactgctatcaatttgttctttttgtgaataaaacttaggcaaaaaaactgaatgatggagttaccaagacaagaaatatgagtgtatgcatggaaggataaattctatcttcaatatgctgagtttgagacatccttttgggccagtcaagcgaagctctctaatggacaattgtacaaatgggtccagagttaggcagagagacatggaggggaggaagcttttgcgagtcatcagcagtcaaggaaacgatggctaaagccatggatttagaggaaggccaccatgagaaacaaaaagtgaaattaatcaaacaccaaaacctgacactggaaataacacatgtagcagggagaaatgaagcagaaaga

SEQ ID NO: 1883352 - DNA, 4001 bp, Homo sapiens
gtttctcatggtggccttcctctaaatccatggctttagccatcgtttccttgactgctgatgactcgcaaaagcttcctcccctccatgtctctctgcctaactctggacccatttgtacaattgtccattagagagcttcgcttgactggcccaaaaggatgtctcaaactcagcatattgaagatagaatttatccttccatgcatacactcatatttcttgtcttggtaactccatcattcagtttttttgcctaagttttattcacaaaaagaacaaattgatagcagttgcatacctcttataggaaacttagacatggaggaagaagctgttcagatggggtcctgcagaagtgcaggcactgtggtaatatttaaacttttctcagctgttcgaagggttttgttttaactaattttccttagacttgttttaggtatttggctttctaatggttataagggatgtggaattaaatgtatcttaatctgccacctggacccattaaagtaagcccctatggtggttttttttttttaattgccatggttaaaaccatagttgctagcgaaggtgacatacttaagctttttgaactctcttaaaagaaaacagaaatttaatgatgtgtctataatggcaaaccagatacctagaatttccatgttattcatagggtgaataacactggcgattgtagagatttgagagttctttcaaaacaggagaacaaagggaataagctacaaagcaatttttttctttgtagacttaactgaataaaaattatttttatgtctcaaacatcatatgaacaaatttagttggcaaatggcaagctaataatattttataatataggatattaatatacttaatattacaaaagtgcttcataattagaaaagacataaactagaaaaatgggaaaagggcatgaataagaaattcaagagatacaaatgacccacacacttgaacaaatgtttattctttctcataatcaaagaagtagaaattaaatgaatactttgaagccaacttctgagaaagcatagcaaacaagaaagctagtgctcagctttgtgtggtaacggcactctcgctcttaagaaggtgtgtttgctccctgtggctgctctcaggcagggccacaaacttggtggcttaaaacaccacagatttcttctcttacatttgagaagtctgaaatgggtcttactcagctgaaatcaaggtgttggcagggctgcagtcctttgtggaggcttggggggatcttgttctcctgtacggggtcctgtgcttggttcggggtcctgtgcttggtctgggatcctgtgcttggttcgaggtcctgtgctgggtccagtgctctgcttttaccaccttgaagttcatctggaaatggcactggctcgcccacaccatatagctgactctggttctccctcctcctcactcgctctaaacctgtgtttttggctgatttctaatctctctttccttggcccttctgcagcttgcagggccttctgcagctcttgtctgccccagccccggggtctgcccatcccagtgctgggctgttctgttcctgccctgcctttcctcagcccttggcaaccctgtttgttttctcccttccttagcagtggagaacatcgtaagatcaatgctgactgccttctgcagccaagccaggccatttcatttcagccgagccaagtctgtgtggagcagttcttttatttttctccttttgactacctcatggttttcacggatttttgttctcttcacattcaaggattttttgctttcagaaagttatatttctctggaaagagtgcacccaatatcccttttgatttcaaaatcttaatgtggagtctcttgacttggatttctttggaagaaactgctgaagctgccatgtctaagaagaaaactttggagaaaaattttcttcttagacatggcaacgtcaacagtttctaagctcttgattccgtctaccctgtctccatcgttgcctcagtcatctgccttacttctctgcaggggtttctcccagcttgcaaatgtactccaattctgaaataactaagtctatagctgtgcaaagagaagtctgggccccttgctttcttgtgtttgactccatccactctccagaaatgaatcccacttctcacttaaccactgacctccaaagcatcgtatcatttgtgtcagttgtcatatttgttaactttcacataacttttgacattatttatacctttataaccaggaaataattttaactttattgtagaaataaacaatggagtataatttttcttgttgaagataaatatcacctcctcttcctttaaacatctcttccctttgtttttgtattacattggtttcccccctttttttatttcctgggttgtcgtattccctgttattatttttacctttttttttttaatgtggatgtttccggagtctgtatttcttgccttttcatcttctgccctttattattctcagccactgccattacttcagttatccattcccatggtttccacatgcttagcttcggttgattcttgccattttacagaccatatttccaactacttctagaatgttttgttccttcagcctcagtatgcccaatttgaactcatgttctctctcccccttctttcttccttctttctttcgctctctctcccttccttcttttctttccctccctccctttcttccttccctcactcgttctctcttgcttgcttgctttctctcctctctctcttttctttctgcattcttctccctccctctcttccttctctcccccactccccaacttccaggctaaagcagtcctcctgagtagttaggactacagacatacacgtgccaccgcgcccggctccgtgttctctttgtttccctgcctcctgctcttccacttatctttgcatggcaggtgggtgcacgcaggcatgctctgcatgtcttcctcttggccattccccttctagttatggtgtggctttatctacgcgttctggagcagaagcctagtcacaaagctatttttttaaaacattcatgataattcatttccttttatgttttaaaaatactagctttctgtctttatttccttactaacttacttggatgccagtaattagttgttttagtgaacaccacagagtgatattttgaaactttggacttcataaagttggatgagctccagtagcaaagaaggaagtgttaactagtttaactgacaaataaatgcttcccagcttggtgtgcgattgagatttttgttgcaagtttgtgaatcaatttaactgcccctgccctggggactaaagtcagatacgtgcttgtgggaatctttgtctttcccacaccaccctgcattttaaaacctcttgtgtgggacagtcccaccatgtaatagctgttcttccttactcagctactttccctccagagaggccagtagaaaatctagactagttttttatagtctattttcatgtcacttattgagagctactgttttctgttaaattgtcagtaaatattttaatcaaggaaaagggaggtaataggaaggagagaagaacaaatccttaaccctagtaggaacctaatgaatgggatttgttctggataattgcagtagtcccccagctaaagaaccttttaaaaatatgtcagatatacccaagaggattgaaatcgtatgttcatacaaaagcttgttcacctgcagccttcatatgcaattcctatgaatgttcatagcagcattattcataatagccaaagtatggatgcaacccaaatgtccatgaagcaattaataggtaaacaaaatgtgatctgttcacacagtggaatactaactattcagccataaaaaggaatgaagcactgagtcctgcagccacacagatgaacct

SEQ ID NO: 1883353 - DNA, 4001 bp, Homo sapiens
aacatcgacttcctaggttcaagtgattctcctgcctcaacctcccaagtagctggaattacaggcatgtgccaccacgctcagctaattttgtatttttagtagagatggggtttcaccatgttggccagggtggtctcgaactcctgacctcaagtgatccaccagcccctgcctcccaaagtgctagaattataggtgtgaggcactgcgcccagccttgacctagaaaatctaatagtaaggcgaaaatagctatctttttttttttttttgaccacttagaatgtaccaggcactctgtaaagtgctttatatatattctacctcacttatccttaaaacatcactgtgaggggtatagtattagttctatcttacagaccagggagccgaaggttaaacaggttaatttaccaaggtaacagtgggtaatcctgtatgatggggaggacgtgttcaggtctagaactcatcctagccaaatgaatcaacagagggaggaactctgcaggctgcccttggcatgggctgatggtcatgcactcaaattgccttctctgggcattgctgtccactgtccctctctcctcacctgcggcctctgaatgactaggttatctctccgttgatgtcttctctttgatgcagaaatcccatccggcctttgggagggctagtattcttttttgcgggggttgtgggaggcacaggaggatgcctagtattctgatacttttcaaagggcatgcttctgagatgtctcctccctcaatgcagaaggatcagcaagtcaaaagttgtttaactcctttaagtatttcctaaaggaagtatttattgggactcactgttaggcacacaatttaagaaaaataatattttcatgcttttttttttaaagtcaaaattaatgccaaaaaatccacaaaattcaaataaagacaagatccaaaggtctagttgcaggactccccgcactcccttcaccccaacctcagcaaccctgtcagatgctatccatatttcaatacttgacatttttttttcaccattaatttttttgcattaatgttgctctttttttttttttttttttttttttttttggagacggagtctcactctgtcgcccaggctggagtacagtggcgtgctctcggctcactgcaagctctgcctcctcagttcaagcgattctcctgcctcagtctcctgagtagctgggattacaggctcccgccaccacgccgggcaaatttttgtatttttagtagagacggggtttcaccatgttggccaagcttgagaactcctgacctcaggtgatccgcccacctcgacctcccaaagtgctggaattacaggtgtaagccactgcgcccagctgccctttgtaaagatggcattcaaacattatttatgtggacggctgcatttacatctcgctcacctccacctatcttgatcctggactgggtgcataaagaacagaatgctggccgagcgcggtggctcacgcctgtaatcccagcactttgggaggctgaggggagaggattttttgagcccaggagttcaagaccagcctgggcaacatagcaagaccccatctccactaaaaataaaaataataataattagccaggggcacgtacctgtggtcccagctactcaggaagctgaggtgggaggatcacctgagctagggagattgaggctgcagtcaactatgattgcaccactgcactccagcctagacaacggagcaagatcctgtctcaaaacaaaggacagaattatgacaatgggctttgatttccactggaccttttccccatgtccttccctgcctccttcacacatcagctgttatctgctggccccaccagaagagtgaccacagtttatagctgggcaacgcctcactccaccaggccctgggggagatggaggaaaggaaaagtcttctccattttccaccagagctgcagaaggagtttggctgtctttcttcttcttaaggacgttttttaaactatcaattgagtaatgtgccaggagggaaattcctatcttgaaccctcacatcagtgctgacatgtaattcgaattattgaattctcatcactgcttccctaatgcagtgattttcagtcttaaaaaaaacaaatccctatgcccaagctgctctcagatcgatgaagcaaatcagtgcctccagagatgacagcccagcgtctgcgctggtcgcagcttccttgatgactccagtacgcagacaaggttgagcacagttgctttagagaaagactgggctttgtttttcttcactcaggtggttgtggcccttcccagaggacaatgcaagaaaggctgcagagtctgggggacctaggttcaagtcctggctttcccacttactggctttgtggccttggacaagagagttgactttcatttcctcagctgtgctatggacataataacagaatctccctcttggacttgtttgaagagatcaagccaaggcatctggaacacctggcatggtgcctggtgggcgtgtgtgcactcgtgcaccccaacacacagcgtgaacgattagtattagcagtgatgaatcccttcttcaaacaaaatgataggaagctcaattaataaataggtataggtggaactgctctgttggaaggggagaggggagggagagatgcaggcttcactctccttttctttctttttaagagacagggtctctctctgttgcccaggctggagtgcaattgtgctatcatagctcactgcagcctcaaactcctgggctcaagccatcctcccacctcagcctcctgagtagctgggactgcagatatgcacctgtgtacaggtgtgtaaaaattagcctggctaattttaaaaacttttttttttttagagatggggtcttgctatgttgcccaggctggtcaggtgacattttcagcttcagaacttctgcagcccatttcccatctcctagtggcaagcatctgccagccagctgactggctaggcccagggaccactctgtggccacagaagtgagcagagaagggctccttagcctaagtggctttctggccacaggctaattagtggagtaagccaccactagctgagctcaccaactcacccgaaaggcactgctataaactcccagtccccagccagatgaatgtctctgtttgatttttaggtgtgggatggtggctagaggctggaatgtgtttcctaagtaggtgaatatctaagtgccctgtgcaggaagatggtcagggcatgcaggcttggcaaggagtgctccttctgggaaagagcagcttgcctgttttccctgttgggaacagccgtgctttattcggttcttgggcagtattgattgtttctgccatatgctaaaacctaacaggtcaaaaaaatctcagcccagttcacagacctctgccagcctcaggctgattcggagggtgaggcagaaggtacaggctgcaatcagcgtgtgtgaaattggctctgcctggagctcatctgtgccacaaaactgattgtatttcctcttcccaaggggaggccgatgtgggccctgcttgtgagagtggaacttccactgctttcttccatttcttccaatccagacagcatcttgaatttctcttttcctaaggggatgttctttgtaccaagctaatagctgcataaaagactcaatagtaaaggtgtttttgctttttccttcctgagcaagagctcatttccagagttgtttggggagaaagttgatatttcatacctagcatgtttaaagtgtgtcccttcattgttctttagggatgctatttgagtaagagtcgtagtcactgggctctttaattgcaagtaacagaaaccaacttgtgctgtccttagccggagaggggaatttctcaaagaaataaaggagcatctcatggaagcaagga

SEQ ID NO: 1883354 - DNA, 4001 bp, Homo sapiens
ctcacagcatcctgtgcagcttcacatctgcttatcacaagaatgcaatcattctctctttcttgtctgaaagccttggtttacaaaacacacacataaaaaaaaatacttattaagcacctactatatgctacctttgttgaacacccactgtactaagcactgtttatgcattacctcatgatccctagccacagttctgtgtgatgggtattattattattgccatttgacaggatgaggaagcttagccttgaagagggaagtaacaggacacaggtggcaagtggtagggctggacatcaaacctaacttgtcagattccaatccttattatcccacttctcctgggaacatgtgagtttctcaaggatcagggttctgtattcccagccctggcaaataatctgacacacagttagaaaaaaataaataagtttcagtggataaataaatgaggacagaagaaggatctttaacataaatgtcttaagttcagctgaagtaaatggggaataactaggttggaaaagcataggaaacatagcccagactctctggttaaggatcaggaataacatgtatgagttccctgcccatatcctctacttggcagctttctgaaattggcaaaattacttggtttctccttgccttggatttcttactggtgtcatggggttattttggacattaattgaggtattccaggtgacatatttagcagagcaccagatgcacactcagtaccaaataaattctggctgttgttgcttgtattaggttgtagtttctgaaagagagacatgaaataagagtagcagcacatcagatggttttgagagggaatctgtcagagcacaattaaacatggcaacttgtctaaggtgttcagaacatcaccagtggaaagcaggatgttttgaaaactgtttccgagtaatctgacacgctgtactcattaaatgtctcttgaatataacaatccattccagatgataatgtgaacaattcacagatagctacatatgtgatcaagattacatatttactcccatcttgaggaccaacatacatttctatcctcattttcccaccgatgagctgtcttttctctttgtatttaaggtccagctggttttaactttcaaattcctgctcaaccactattttaatgttctctttggctatctgtttagttctagattctgggcttttaaaaattttaacattagccttccttggcagcacctttgccagatttttcttatgatacatagagatgtaatatgttgacaaactaattaaaggaggagctggtattcaaatccagatctgatttatcattctgtagaaataaaattttatcaggtattgtccgaagctctctctctataaaggtgaacaaaaccaaaatggttcttaaattccttgagcttagtattcagtggtagagacagacaccaacaccaagtaaatcgattactacaaattttgctaaatgccatgaagacttcaaagctttctgatataaacaccaactcaactttgacaaagacatttccatagcaagagcatcaaggtattgaaaaactgaacaacttaaatcactgtttcttattcatagagaacttttataggcaaccactacactaaagcccaatatacatgtaactgagatgagaatgatttctctgattagattcttccacttttatttttttgtcttaagcacacatggttatgtctagtaagacataatttgtacatgactggatcaagaggaaaacacttctagccttccttttagtctcccaattcacatgcaacattttacaatacttggcagtgtcaaaaactctggtaaaggacattgtgagaaaaattgtagtagctctacaccacaaccacagctgatttaggtcttttactctggactagctctgtggatcctgtctatcaggctgtctgtcaggatccacagagctagttcagagtaaatacctgatatcaggtgacgtgaatacctggcatcaggtgatgtgtaaatacctgacatcaggtgatgtgaactctgatgactgttcctggatttcattctacaggattataaatgaactacgtaaagcagctgttgtaaaatctgtactctgcttcttggaaagtaaacaggccagtaacgtgagcctccatgtcctaagcgtgggttagtatagctaaaataacctacatattttctggctcatatattgtgttatccactgtaactcttgataaaatctctctacttggtatgaaggatagctttatttatccattcattcattcattcatattttttataattcgaatctattcttctatttttgccctgaaaagtaataatacaatctttctaggtaggctacattcttggcttgtgtcaatatcaaatttgttttggacaagatgcatcctgaaaggcaaaaaacagtaacagataaggccaatggaaaaaaatattaaaaatcggcaactctaggtaaagggtatacaaatgttcattgtattattcattcaagttatgtgttgttttccaatttctcaaactaaaaagttggtggaaaaaaagttgtccttgttgaacctcatgatgaacaacacatatagtgaagttcatgaaagaaagtttcacaattacagttttgagaaagataatgtatctctgaacctaagtagtgatgatctcatccaggagttagaaatgtaagcttatgaaacaactaataatgctagtaagaatacattatcagcattcacatgcactcatcgattgtccctggggaggccatgggctgtgaaaggcgaaaggcctaatccaggctctggagatccttgggaacatagcatacttgtatgcaggagcctttgttctgcttacagtggagtaaagtgaaagactttcagcatagggtccaagaagcagactgacagagcaaactctacagtgtgcctgaaggcagccatagtaagaattctccccagcatagaggccatattaaggtgtttgtcatcttccagtgctccacagtggatttactccttcaccaacacctccttttcttttttcactattagctgtactacacctttgtcactaacaattcattaattcatatattcaaccaatgaatattcattcaactttttttatattcaactttttgttatgtgtgagaaaccacataggccttgcttagtaaggtgtgtaagacacaaccatttccctgtggtactgggacagccctaaacagggagagcagagattctcagccctgactgcacatgaaaatcaactagaaatcttttttttttttttttttttgagatggagtctttctctgttgcccaggctggagtgcagtggcacgatctcggctcactgcaagctgctcctcctgggttcacaccattttcctgcctcagcatcccaagtagctgggactataggtgcccgccaccacacccggctaattttttgtattttttttagtagagacggggtttcactgtgttagccaggatggtctcgatctcctgacctcgtgatctgcccgcctcagcctccgaaagtgctgggattacaggcgtgagccaccgtgcccggctagaaatcttcataaaaatgtggatgctcaggatcctactgctacagactctgatttagtagttctagggtaggataatctgtattttttaaaagattctttggtaaatttggtgagtggctagtgataagatacactgaggctgggcgcagtggcttacgcttgtaatcccagcactttgggaggccaaggcaggcagatcacctgagatcaggagttcgagacaagcctggccaacatggtaaaaccccatctctactaaaaatacacacacaaaaaaaagccaggtgtggtggtggccacctgtaatcccagctacttgagaggccgaggcaggagaattgcttgaacaca

SEQ ID NO: 1883355 - DNA, 4001 bp, Homo sapiens
acaccggcttcctaccttctgcttcgatccacagagaagacttaggccagagtggccctgcacgtccgcctttcccctctcagggagtccctctttctgggtttgagtcttgccagtccgaaacacgtgcgaatagaatcccaaaagcacagggcccaggcttttttctgggcgatgtgctgtttttttttttatatctcagactatggctgttactgtccatgggctcaactaatgcagagaattgtaggacatctagccctgctcctaaaggaggcaaaatgatccttatcatgcctgttatagccaaggaaggctggacccaattccacagaactcgagatggcgcttttcatttcaaagaaaagacactatgagcctttctcatatttcacagcatgctgtgtgttgcacttgacctctactcttgccctcagcttccccaggtggcctcgcctccctgctgcagccccaaagcagtaaagctacagctctgggccatgggctgtggcttcagtgatctaggacctgattctcctaaaaaccacaaatggatagttcttccaaagacccagggtcctcatagaactctctagaaacagtaatgatctccttggagctcaaacagtccctgagctatcagaccctgccaacaccagggcttaatgctcagggaacacattttatgagagcaactgtcactcctgagcttctgtgggtcacttgaaatcacccagttatttttcactcagctgaggggcagtatagttctgacgggtggctttgggttcactgccttcaactccagtcagaaaacgttagtgctgaaatggatccggggtacaaatagttgggttgttgacatgctttcttctgttgtatacataaaggttccacatacaaaaacctatttgcaaagagaggtcagatgcttaaatgtgaataataaaaatgcttatccatgggtactctagtttaatctcctcattacaagaggaatctgaggcccagagagagaaagtgacttgtccaaaatcatacaactaatattgcagccagcaatagaacaaagagagctcaggaattctgggtcccagtgactatggaaaacaattgtctgaaattttaccactagaaattgctactccctgccccatactacctgagtcttatttaggtaaacagatagtaaatataaacattatcattgtaaaaaaatgttttaaagaccaaatatatttataaagttttttaaagtgatcttttgtacccctttgtactctacccaatcccattcatttcccgaaggatgtccgatgttaacaaatgagtgtcaagtccttctaggcctttttctatgcacttaggaatgtgtttacaatatatgactgggttttaaaaatacatacttatatactatatgtatgtagatataagtataaatttataagccatatttatatattatgccatttataaatataaaatcaaattgttctgttttgagacttcctttgttcacctaaccttgtgtcttggcactttttctctctcttttttttttctttttgagattttgctcttgttgcccaggctggagtgcaatggcacaatctcagctcactgcaacctccacctcccagattcaagcgattctcctgcctcagactcctgagtagctgggattacaggtgcctgcctccatgcccacctaatttttgtatttttagtagagacagggtttcgccatgttggccaggctagtctcaaactcctgacctcaggtgatataaccatcttggcctcccaaagtgctgggattacaggtgtgagccaccgtgcccatccatggcactctttccatgttggtcaatagaatcttgatgttttgtcgatggcttcatggtattccattgtatggatgtaccacaatttctatttagccaattgtctatctttaggcattcagaatagctaaagatggacaattggctaaatagacactgtggtacacaatggctttttctgttgcagccatggttgcagtaaacttccttgtatataaatctctgggacatgagccaatgtttcttcagaagagatacctagaagtgaagatgtgagatcatttgtctacagaaggtttcactttaagttgtaatgactcgccttaatgttgtccaaaggttgtttttctaaaccttatttgagggcccacaacagccataaacttttacttatgtttcacctagaatcatcacagcaatcctgtgaaagcaaagtatgatccctatttttcaaaaaaactcactgaagtaggaacagacgaaaaatatctcaatttgtgaaaaagcatttacaaaaaaaaaaaaacatctaacatcatacttaatggtgccaactgaacgtcttcccactgagattgggaataagacaaagatgtctgctttcaacatcttcttcaacagggtagtagaagttctagccagtgcaatatagcaagaaaaagaaatacaagacatacagattgaaaagaaagaaataaaatcatctctatttgcagataacatgattgtctatttatacaatcctaaagaatctaaaaaacataaactaaaataaacctcctagaattaataagtgaattaagtaaggtcacagaatacatgatcaacactcaaaaatcaaatgcatttgtttatcctgtcaatgaacatggggaaactgaaattaaaaacaataccatttacaatcacttcaaagaaaataaaatacttaggtataaatacatatactatgtctctgatgaaaattacaaaatgctgatgaaaaaataaagacctacataaatgaggagaaataccatgttcatagactggaagactcatcatagtggagatgtcaattcttcccaaattatcaatagtttaacacaattcttatcaaaatcccaaaaagattttgtagacaaagccaagcttattctaaaatttgtatgggaggcaaaaattttgaaaataaaatagctgtgataactattttaaaaagtaggaggaagcactctaccttgtgttaagtctcactatatagctacagttgccaaggtagtatgatattggtggagagataaacccacaaatcaatgaaacagaatagaggactcagaaatagacccacaaaaatatactcaactgattttttaccaaaaataccaaaagtgcaaaagcgagtgaatgaaggaaggaaactcttttcaacaagtggtgttggagcaaaaaacaaaacaaaacaaaatctcttgttttaacttaagtctcatactttaaaactttatacaaaaattaacatagatcacagacttagatgtaaacataaaacttcaacacttttagagaaaaatatgggagaaaatctttagcacttagagctaagttaaggaggtcttagacttaaaatcaaaagcacaatttataaaagaaaaaattgaggcatcttgatacttcatcaaaattaaaaatgtttgctctgaaaaacaccctattaagagaatgaaaaggctgggcacagtggctcacacctgtaatcccagcattttgggaggatcacgagaggtcgggagttcgagaccagcctgaccaacatggagaaaccccgtctctacgaaaatacaaaaaattagacaggcttggtggcagatgcctgtaatcccagctactcgggaggctgaggcaggagaattgcctgaacccaggaggtggaggttgcggtgagccaagatgcgccattgcactctagcctgggcaacaagagcgaaactccatctcaaaaaaaaaaaaaaaaaaaaaacagaatgaaaaaataaaccagagactgggagaaaatattggcaaaccacatattcatctaacagacttgtatctagactatataaagaactctcaaaacataacagtagaagacaaaacaatctaattacaaaatgggccaaaaaccacaaataa

SEQ ID NO: 1883356 - DNA, 4001 bp, Homo sapiens
atagtctagatacaagtctgttagatgaatatgtggtttgccaatattttctcccagtctctggtttattttttcattctgttttttttttttttttttttttgagatggagtttcgctcttgttgcccaggctagagtgcaatggcgcatcttggctcaccgcaacctccacctcctgggttcaggcaattctcctgcctcagcctcccgagtagctgggattacaggcatctgccaccaagcctgtctaattttttgtattttcgtagagacggggtttctccatgttggtcaggctggtctcgaactcccgacctctcgtgatcctcccaaaatgctgggattacaggtgtgagccactgtgcccagccttttcattctcttaatagggtgtttttcagagcaaacatttttaattttgatgaagtatcaagatgcctcaattttttcttttataaattgtgcttttgattttaagtctaagacctccttaacttagctctaagtgctaaagattttctcccatatttttctctaaaagtgttgaagttttatgtttacatctaagtctgtgatctatgttaatttttgtataaagttttaaagtatgagacttaagttaaaacaagagattttgttttgttttgttttttgctccaacaccacttgttgaaaagagtttccttccttcattcactcgcttttgcacttttggtatttttggtaaaaaatcagttgagtatatttttgtgggtctatttctgagtcctctattctgtttcattgatttgtgggtttatctctccaccaatatcatactaccttggcaactgtagctatatagtgagacttaacacaaggtagagtgcttcctcctactttttaaaatagttatcacagctattttattttcaaaatttttgcctcccatacaaattttagaataagcttggctttgtctacaaaatctttttgggattttgataagaattgtgttaaactattgataatttgggaagaattgacatctccactatgatgagtcttccagtctatgaacatggtatttctcctcatttatgtaggtctttattttttcatcagcattttgtaattttcatcagagacatagtatatgtatttatacctaagtattttattttctttgaagtgattgtaaatggtattgtttttaatttcagtttccccatgttcattgacaggataaacaaatgcatttgatttttgagtgttgatcatgtattctgtgaccttacttaattcacttattaattctaggaggtttattttagtttatgttttttagattctttaggattgtataaatagacaatcatgttatctgcaaatagagatgattttatttctttcttttcaatctgtatgtcttgtatttctttttcttgctatattgcactggctagaacttctactaccctgttgaagaagatgttgaaagcagacatctttgtcttattcccaatctcagtgggaagacgttcagttggcaccattaagtatgatgttagatgtttttttttttttgtaaatgctttttcacaaattgagatatttttcgtctgttcctacttcagtgagtttttttgaaaaatagggatcatactttgctttcacaggattgctgtgatgattctaggtgaaacataagtaaaagtttatggctgttgtgggccctcaaataaggtttagaaaaacaacctttggacaacattaaggcgagtcattacaacttaaagtgaaaccttctgtagacaaatgatctcacatcttcacttctaggtatctcttctgaagaaacattggctcatgtcccagagatttatatacaaggaagtttactgcaaccatggctgcaacagaaaaagccattgtgtaccacagtgtctatttagccaattgtccatctttagctattctgaatgcctaaagatagacaattggctaaatagaaattgtggtacatccatacaatggaataccatgaagccatcgacaaaacatcaagattctattgaccaacatggaaagagtgccatggatgggcacggtggctcacacctgtaatcccagcactttgggaggccaagatggttatatcacctgaggtcaggagtttgagactagcctggccaacatggcgaaaccctgtctctactaaaaatacaaaaattaggtgggcatggaggcaggcacctgtaatcccagctactcaggagtctgaggcaggagaatcgcttgaatctgggaggtggaggttgcagtgagctgagattgtgccattgcactccagcctgggcaacaagagcaaaatctcaaaaagaaaaaaaaaagagagagaaaaagtgccaagacacaaggttaggtgaacaaaggaagtctcaaaacagaacaatttgattttatatttataaatggcataatatataaatatggcttataaatttatacttatatctacatacatatagtatataagtatgtatttttaaaacccagtcatatattgtaaacacattcctaagtgcatagaaaaaggcctagaaggacttgacactcatttgttaacatcggacatccttcgggaaatgaatgggattgggtagagtacaaaggggtacaaaagatcactttaaaaaactttataaatatatttggtctttaaaacatttttttacaatgataatgtttatatttactatctgtttacctaaataagactcaggtagtatggggcagggagtagcaatttctagtggtaaaatttcagacaattgttttccatagtcactgggacccagaattcctgagctctctttgttctattgctggctgcaatattagttgtatgattttggacaagtcactttctctctctgggcctcagattcctcttgtaatgaggagattaaactagagtacccatggataagcatttttattattcacatttaagcatctgacctctctttgcaaataggtttttgtatgtggaacctttatgtatacaacagaagaaagcatgtcaacaacccaactatttgtaccccggatccatttcagcactaacgttttctgactggagttgaaggcagtgaacccaaagccacccgtcagaactatactgcccctcagctgagtgaaaaataactgggtgatttcaagtgacccacagaagctcaggagtgacagttgctctcataaaatgtgttccctgagcattaagccctggtgttggcagggtctgatagctcagggactgtttgagctccaaggagatcattactgtttctagagagttctatgaggaccctgggtctttggaagaactatccatttgtggtttttaggagaatcaggtcctagatcactgaagccacagcccatggcccagagctgtagctttactgctttggggctgcagcagggaggcgaggccacctggggaagctgagggcaagagtagaggtcaagtgcaacacacagcatgctgtgaaatatgagaaaggctcatagtgtcttttctttgaaatgaaaagcgccatctcgagttctgtggaattgggtccagccttccttggctataacaggcatgataaggatcattttgcctcctttaggagcagggctagatgtcctacaattctctgcattagttgagcccatggacagtaacagccatagtctgagatataaaaaaaaaaacagcacatcgcccagaaaaaagcctgggccctgtgcttttgggattctattcgcacgtgtttcggactggcaagactcaaacccagaaagagggactccctgagaggggaaaggcggacgtgcagggccactctggcctaagtcttctctgtggatcgaagcagaaggtaggaagccggtgttttatacctccctgcctttccctgcccatttgtgggatggagagctgggggcctgggtgaatgacctgttgtag

SEQ ID NO: 1883357 - DNA, 4001 bp, Homo sapiens
gctgcctaaaagccagtgtggcctctgatctttgatattgcctacaacaatgctaaaccaaggtttaccattaagccgatgagtgaaagtatgtcatttataaagagccttctgagacacgaagtgttatcctcaagccaaggttagaaggattcaagtggcccatattaggattcttgagttgcaaggactgggttacttggtgtgttggtttcctattgctgctgtaagaaattaccacacgcacagtgacttagagcaacacattttcatctacaattctctcattccgactctcaagacgggtctcactgggctcgaatcaaggtgtctacagggctgtgcactttccgggacacactgtaggagagaatgtttccttgccttttctacccaaatttcttggctcatagctccttcctccatctttaagttagtgccgtagcatctttccaactctgattctctccacctcgaccttccatttttaaagatctcagcaatgacattgggcccacttggatgacgcaggataatctacctattttaatgtcagctgattagaaacctcaattcccctttgccatgtaacctaatgtattcataggttctggggattaggatgtgggcacgccgaccacactccagggttctcatggaggcctcaggccctagagaccaggaagagcctggaatcctaagtagtaaagcagacaggggtggtggctcacacctgtaatcccagcactttgggaggccaaggcgggcggatcacctgaggtcgggagttcgagaccactccgtctctactaaaaatacaaaattagccaggcatggtggtgaatgctactcaggaggctgaggcaggagaattgcttgatcccaggaggcaggggttgtggtgagccgagatcgcaccattgcactccagcctgggcaacaggagtgaaactctgtctcaaataaagaaaaaagaaaaaaaaaaaagtagcaaagcagagaactgtccctctgcccctttggggcatctccttcattttgcttctctgcagtcctgccctgtctattcctcagtcactttggcagaacacagccacccccctacttttgagcttgctagggtcagacccatgagaagaatcatttctgaacctctgggagagaatctgattagccaggtacagcttgggtcaggtacaccccccgactcccgcatcagttaaggtagttgagtacaaacatgattgctaggtactcacccctgtgaaagagagaggaggggggcaagggtggtggttagctcagaagctgggcagatacaacaccaaagcgctaggtgatgaagccaccccgtgcgaaggagggagaaaaggacaaggaggacaaatgcctttcctctccaaacttctttagcaaagtctcctgatggacacattttgactgggaaaacagaaatggagctgccactcttcggaatgttcttctgcaggttcggggggcattctcttcagcttctgaccctacagcacagggccaggcacagagaaagcgagcgcgtgtggatgaccgagtccgacttgactgcgtgtgcagccacactggcagagttctgggctcttctgcacatccctctctgtttgctcattgttttgttgttttgattaatcccctggaaagcagggtgtaaacagactacctagattcaagttcaaaagcactataaagctgccctttaaaacatcttttaataaatggtggccttagatttgttttgtagagattttttgcccaaggttttcctaaaaggaagcacatttttttgaaacatggttctgtgcagggtacagggccacctctggcaccagaagtggggtttggtggggacaggctgtgcgcttgtggcttgccatgcctcagactgcctctgcaagggcctgagctccaggaaggcagcaatgacagatgccactgcacgtccatggagctcagctccaccacagaaggcaaaccagagacaccgccctagagcttgtgatctggccaggaggaattatacaataaattaattacaattccaataagccattaaaaaaaaaaaagcacagggcatatgatgacatttgaaggggaacccgagccagtctggggatcgggagcatcttgtctgagagtgacctttgggtggagatccacaggaaggggacgtttaaggctgggctgggggagtgcaggggagaatgttcaaagtggaggtgactggatgggcaaaggcttgagcaagggcaagcttgaggagtcaaagaacaagagaggaaaccagggtgggtacagtaccaagggaagcaaagcgagttgggctggagtgggtcagggccaggccatgtggggcctcgcaggcctcatgaaggactatgagaatgatgtgttcttcgtttttttgagacagagtctcactctgttccccaggctggagtgcagtggcgcgatctcggctcactgcaatctccgcctcccaggttcaagcaattctctgcctcagcctcccgagtaactgggattacaggtgcctgccaccatgcccggctaatttttgtattttttttaaaaaattttgtatttttagtagagatggggtttcaccattttggccaggttgatcttgaactcctgacctcgtgatccacccacctcggcctcccaaagtgctgggattacagacatgagtgagccactgtgcccggccaggactgtgagaatatctttccaagatccctctgacccagtgtgaggatggtaggggtgtgagaatataaaggacaaaagatggccaggcgcagtggctcatacctgtaatctcagagccttgggaggctggggcaggcagatcacctgagttcaggagtttgagccagcctggccaacatggtaaaactcccatctctaccacaaatacaaaaattagctgggtgtggtggtgcgtgcctgtaatcccaacaactacttgggaggctgaggcacgagaatcgcttgaacctgggagggggaggttgtagggagccgagatcgtgccattggactatagcctgggcaacagagcaagactccacctcaaaaaaaaaaaaaaaaaaaagactcttacccgctcagacatccagcatagattccccttgaggagcaaatgttgaagacaggccttttgagagtggaagaggcaagaaatttcccttaggtcccaccccatgcacctggagtgcagtcacatctgtggtgcacatttgctcaccttctaagtgactcactcactgttaagggtagtgatgtctgaattggcaggcctgaaggtttttctttagtgtaatcattgctcaattaccttcaccatctgtgctggaaatgattgtgatgactttgtgtgatgaaacccagaggtgcccagtattcctgggtgtcctttcccaccctttattacagcagaggcatcagagttcaagaggccaggttctcacttgcgtcaacacactgctgccaggaaggcgaggcggggcggaagtgaggtgtgagtaggatctgtgaagaccacttgggcattcaggatgatgcagacagcaagttggagaggaaagccagaagatgaaacgctcaaagcaagggccaagttggcaagtgggctaggatacagaccagaagccgagaggggttagaggaaaaaaatggggcatttctagggagatcacatggacagaaggaagaggtttagctacagacagaaacaggcagagtgctaggactgcctcagcacagtatcacatctgcagggtattaaccttttgcaaaattaagatgctggccaattcattcagtaattcttccaacaaatatttagtgagatgccaggttattctgccttggggacacaaatatatacaaaacagtcacagtccctgactttaaaaaatttagtggcaaaccatcaggcaaacatggaatacaaaacacaggaa

SEQ ID NO: 1883358 - DNA, 4001 bp, Homo sapiens
aagacaaacaatccaggctgcattcatcattataatattcacttttttcttattttaagacattcacggacccctggcactgtgcctactggacaagctggtgccgcccatgctgcccatgtgtccgtctctgactgcctgggagactgtgggtaggtcactgcacctctctggcctacctctactgcacaacacagctgagggtccacatgacaccacgcctagcccaaggtgagcgcagcaaacagggctgtgactaccctcctcctggaatggcaaccttaagccccacacatagtcccgggccacacctcctccccatcctcagggtttcacaattgggctcccacagcccattctatgaccgcccagtcctggaacactgatccctagactccgtccctgtctcccagcaccccctccttcccttggcctacctttgacctctttcttgtcactgtccctctcagataaaacctccctgggccacagccccttggtgcccacagggccctgcagggcctgcactccacatcgcccaaatctggctctccacttgctcagagtcctgtccccaccagcccccatccagggcagcagggacctttccaggtcctgggctcgccaccaccatccatgcttggctgccccacagcccactctgttctccaaagggtccctgcgggggcctggcctctccagaaaggtgtcagatggggagcgcccagggcccacgcacacagggtcactgagctacctgggtacctctccctggaaggagagccctagggactgctcagtccatcccactgctcctcgggttggggagggaggcaggacacctgtccccgcctagcacacaggttcctgaatgttggccctggctaggaaggtgcccagaggagcgtgcccctgggcgctgacaggatggatgccggccagctggactacatgggtgctagccggagccacttggctgagaatgttggggtcaggaggcagccgtcctgcctggtgcccctgggggtgacatggagttgagacatgggaaatacctggtgccactcaacagccctagatgccaaccggcttgggagaagctgtcccaacatttctttgttggggcaccgtcctcatggttgacatatggggctggttagggcacaccgctctggttgtgccaggggcagatcgaggccaaccacatgggggtgaggtgtaggcctgtctggctgggccgaggagcccactcaccattgccagcctgtctgtaggggcggtgtctgaccatacagggcagggggaacaaccctgctgatgttgtttgagggtacttcccgacactggggggacactctagaaaggacccccactgtccctttggatttcagtgtccaggctccaggctgtgtgtaatgggggcagggaccatccagacagtggaagcccccgtggccaggagccctcccagcagacatgcctcgtcctcacagggtgatgcccagacctccaactgcttcattcctcacgtcgtctcctttcatgggtacgtgtctcctgggctatggacggggctgcagccactcccgagcccaagatggagcaccccagtggcctgcatgcccacacatttgcctaccaaacgtctgcccaagggagggagggcgcggaacccacccatgggcaatgactcagcacgaatccactcttctgcttgctgacccctgacctctgactcgaagtcagggccctcagctggccttcaaggaccccatcctctccaccctggcaggaagtggggttcctgagtatctggaaggaggaccccatggaaggatctggagttcctacacaaagtggggtgaacctgtgccaagttccgatgggcgcaggagggcgcggaggctctaggcggcggaaaggtggggtgcggaggacggggctcacagaccggaagtcgctcagtgataacttgcggagtgggcaccccagcccccaacggggtcagtgcaccctacgagctcgcggctgcggccgctgggtgccctatccgcccaccccagcccaggaacgtgggcgcgaggggcagcactcccatcactcgccctgctcgccacgcggggatccaggccgcaccctggccaccccagtccacggcggcccgggcggatgtccccagggaagggtccaggccgtgcccagcacccagactccagctaggccgcgagggcgggagcgagtcgggacggccgggcaggctcgacccggatcccgggccccttccccctcggctcttttcgggccggcgtcgtgcgggggcgctcgcgtccatatccgcacagcggcgccccctgtccgagcagccccgccaccccggccccgcgcacgcggccgcgctccactcccaccgcccctctctgggtcgcgcggccccggcccaggtgtgggcgcaagggtagcccaagtgggaccgcgccaaggggcgcccgccccccgcctcgccccgccccgctcgggccgggggaggggggccctacctggccaggtgcgcggggtctcggcacaggggcagcaggagccgaccgccgcccagcggcctcgcggtccggtcggtccggcagccactccctgccgcggcccgcccggcctgattcacgcgcccgcccccgccccgcccgtcgctcctgcctcctgcctgcccgggcagcacctgggggcggggcagccccacccgcggcgcgcccgcattcctgcgccccgcgcccgccgccagccccagcccgcgcccccggcccgcgccccgacccgcccgtgccctgcggccgcgcgcccggagaccccggcccagcgccgccggagaccgtgaggcccgcacttcaaagaccccgacccccgggagcccaactgttgacccaaggctcaaagttcccagcctgacccctgaccctcgccccggaagtcggggtgactcggaagttccggctcagtcgctaggaaacgagcgagcccgacgccaggggcggagctctggcctcctcgccgagttgggggaggcaggtgcgacaggtgaggacggtggggcggcgtcgagccccgggcggggccgggtctgggagccccgagagcacaggggatcccctcaccacacaccggtctcccaccgcaccagcgccccacacgtagacgaggaccccgcccacacagaggacccccagaccccaacccccaccacacacactgatgcccacaagtacctggggtcccccatctttctccctcaccccctcacaccgatgcccacacttgtaggggactctgccgcagtgacccccccatgcacatgcggaccccgaatgacctgtgcctcatgtacaccaacccccaagcacaggagactcctcaggaagacagaagccacaagcacaccgagtcctgcccatgccagtcacccacgaacacgctgacatccgcacacctagggaaccccacctgcatatgagatttctcagacaccaaccccacacacaaacaggggatgccatattcacactgactctgagagcacaggggacctccctcacatacggaaccctgtgtacacacagggactctgcaaaaaccaagccccaacggacaagggacccagtgtgcacaccaagcctcataccagacgcccccccatgtacacagcaacccccacacaccaccccgagctgcccctgggtgctccagtcccccaggtccccctcaggccctcacttagggcccctccccctcttaggccctgccctacactggatcatctgtccaaaccaccacccctcgcccctgccactcccaccccaaggactggccctgcctcaaccctttctgatggtcatcagtcgcctttctctttgttcctcttgccatgtgatcctattttctgttttcagggtcagtcccagtttcatttgttctttccccaaacactcagtgccaccccactggtaccagcatgc

SEQ ID NO: 1883359 - DNA, 4001 bp, Homo sapiens
ggaggaggccttgattctagactcacaagctccagctttcactctctgaaacaaatacagccatttgccatagctctgttctataaattagtcgctgtttgaggctgtgcacagtggctcatgcctgtaatcccagcactttgggaggctgaggagggcgggttgcttgaggtgaggagctcgagacgagcctgaccaacatggtgaaaccccgtctctactaaaaatacaaaaattagccaagggtggtggcacatgcctgtaatcccagctactcaggaggctgaggcaggaagatcacttgaacccgggagatggaggttgcagtgagccgagatagtgccactgcactccagcctgggcgacagagcgagactccctctcaaaatataaataaataaataaataaataaataaataaataaatagtcgctgtgaacacggaattagcaaatactgaaccactgctcctaagggaaatacaaggttaggctcccatgagcctctggccacaatattttggtcaactgatgaatacataactttgtgttaaatgcgtttctgtttcaagacgccttatgtaatatatagggttgactcattaacactgacttcaccaccacaagcactctaactcatccctgagcagagcttatctgatgtccattccctccttaaggaacatcccagccttcttgcacttcgcaccagacagcacttcagcactgccctcaggggccattctaaacaatgaaaccaaaaatgtgaaaaatgtggcactacacaagctgcaaggaggacacttatttatagtatgaggcacagaggcagagtgtggcattgttcatcctcagctgggattgcacgggttgggcgactcaaactttctgcccttgtgtgtgtgtccatgaatgagccaaagcacggtgagtgccagctttggggctacagataaatgttagcgagtggacgaattcgcaaatgcagaatccgtgaatgatgaggatcgactgtacatgcttgtcggggatgcggatagtaaattaggaagcctttgggccctcaaccgtcttctctgtagcctttgccctggttgggagggtagggcatttaatgctgtcccctaaccctctgggactttggcaggagcttttctccgcctctccctcaccactgctctcgccccaccgccccacccccctgccaccctcacacttgtccctgtgcctgtcactgacagagggccaagtgctgtcccagagccaggctgctccgtgtttctgacacccatgctagtgtggtccggtccttaatcacctgaggttggggggcttcagccacattgcagatcacttacggcaaattaaaatgaaattcaaggctccctccttccccctagcctggctttcgggctgcctctctcccactcaggagcatccatagagcctgagccaaagagaaatttaaagccacagccgccactgctaccataagaaaaataagtcagaaaagtgtacttttcctttccctttgctgcttttaaacattatttgcatctttgggttctttccaggacccaacagcagctactcagagtcttctaaaccagcagcctagtgggacccctggcagtgcaggggttaacacggtgacctccttaagctgctgaggtgtcaggtctaattttatcctataactggatctgccagtcctcttttttgcccaagtgctgagatatattgggaagcccagagtcagcacttttggtggctcaggaggcagcgggccctgatttttgccgaatgcagaaagctagagcctccttgctgctcggtcccagagtcaggccctggggtgtgaatggtaacggcctggttagtgctgcactggggccaccatgccccctcacctcctgctgactcccaccccgaggtatcctgtactgagctgccccgagctgggcagcatgaagggcctcggggcagctcagtacaggatgccccagggaggatggagatcagagccggccgctgaagcccccagcaccacacacacctgctggagatggtcgcacagcgtcttcatgtcccttcctcatggcacggcacggcacggcatgcccctgctctgtggccacactgccccatgctcacacacatgcaccacagcccaggccccggccccaaccctgacggtctcctgacttgcagaaagcacgtcgtccaccccttaggcctgtcggctcagccctttcctagaaagcaagggagcaacgtgtttcacaaaacaccaaagagaagctaagccttggcctggtgagaactgtagctgggctccaggttcaagagacagtccagtcctcagtcttggagctcttatgttgaagcatcacagcccagaccaactctcctgtcctcttcaatgccctgtccactgctttctagatccccattgcttggtttccaagataatattaccacttagatttacagagtgcttttacttttcaaagagcatttttttctttctggcttttttttttcttttttttgtgatggggtcttgctctgttgcccaggctggtcttgaactcctggcctaaagcaatccttttgcctcgacctcacaaaatgctgggattacagacatgagccactgtgcccggcccaaaaggcattcttacaaaaccgtgcggtccctgataagtggatattattaactctgtttccttgatgaggaagctggggttcagagccaactgttagcagggttgggaagtgagaatctctgcctcgagacacaacaacaagttgtttgtcccacatcatgctggggtggctgggaggggatagggtgagacagggagcagccactccactgaagaccaggccatgcagaggggatgagaagggcagcgttacctcccgagaggctactccaaggagagcggctcggggtcactgtttcccccttttcaggctggcccgcttcactatctgcgcccccttcctgccctctatcaggtccggctgtaggccactccctctcagctccacctgcagacagcagcagagacagaaagcaggacagatcgcaaagacgggcagaacacaggcagaagatcgaaaggaggccacacggaggtggcagacacactgcccaccagggagaagagagactggagagagagctcataaagaggtgagtggagggaggtgtcatgcagacggcccggcagagcaaggcagcagtgatggcgctgggtcccccagggccgcgggcgcctcagtaccttggagtgtttcataaagtaatcaatatcgacctccagctcactgggatcctccaggggcccctctacagtcacctcctcgtgctcctgggcggcatcggcgctggacaagtctatctgtcgaaccaccttgcgaatgatctaggaaaggaagggaaggaggaaagggctggtcaggccgggctcgggggctcatgtctgtaatctcagcactttgggaggctgacgtgcagatcatctgaggtcaggagtttgagaccagcctggccaacatggtgaaaccctgtctctactaaaaatacaaaaattagcccggtgtggtggcaggtgcctgtaatcccagctactcaggaggctgtggcaggagaatcacttgaacctggtggatggaggttgcagtgagctgagattgcatcactgcactccagcctggttgacagagcaacactctgtgtcaaaaaaaaaaaggcgggggggctggtcaagccctcaagacagagcttcagaacagcagttcccaggaatgagctccgagggggaggtagcttttgtcctaggagcccctccttgagaggccaagaagagggacagcctttgccccattgcttaatggaaaaccctctgctagacagccctgaaggggccttggcagtgtcatttcatgaccaaggtgtgactgggtgtgacctccccctcgagcccacagcct

SEQ ID NO: 1883360 - DNA, 4001 bp, Homo sapiens
gccccttcagggctgtctagcagagggttttccattaagcaatggggcaaaggctgtccctcttcttggcctctcaaggaggggctcctaggacaaaagctacctccccctcggagctcattcctgggaactgctgttctgaagctctgtcttgagggcttgaccagcccccccgcctttttttttttgacacagagtgttgctctgtcaaccaggctggagtgcagtgatgcaatctcagctcactgcaacctccatccaccaggttcaagtgattctcctgccacagcctcctgagtagctgggattacaggcacctgccaccacaccgggctaatttttgtatttttagtagagacagggtttcaccatgttggccaggctggtctcaaactcctgacctcagatgatctgcacgtcagcctcccaaagtgctgagattacagacatgagcccccgagcccggcctgaccagccctttcctccttcccttcctttcctagatcattcgcaaggtggttcgacagatagacttgtccagcgccgatgccgcccaggagcacgaggaggtgactgtagaggggcccctggaggatcccagtgagctggaggtcgatattgattactttatgaaacactccaaggtactgaggcgcccgcggccctgggggacccagcgccatcactgctgccttgctctgccgggccgtctgcatgacacctccctccactcacctctttatgagctctctctccagtctctcttctccctggtgggcagtgtgtctgccacctccgtgtggcctcctttcgatcttctgcctgtgttctgcccgtctttgcgatctgtcctgctttctgtctctgctgctgtctgcaggtggagctgagagggagtggcctacagccggacctgatagagggcaggaagggggcgcagatagtgaagcgggccagcctgaaaagggggaaacagtgaccccgagccgctctccttggagtagcctctcgggaggtaacgctgcccttctcatcccctctgcatggcctggtcttcagtggagtggctgctccctgtctcaccctatcccctcccagccaccccagcatgatgtgggacaaacaacttgttgttgtgtctcgaggcagagattctcacttcccaaccctgctaacagttggctctgaaccccagcttcctcatcaaggaaacagagttaataatatccacttatcagggaccgcacggttttgtaagaatgccttttgggccgggcacagtggctcatgtctgtaatcccagcattttgtgaggtcgaggcaaaaggattgctttaggccaggagttcaagaccagcctgggcaacagagcaagaccccatcacaaaaaaaagaaaaaaaaaagccagaaagaaaaaaatgctctttgaaaagtaaaagcactctgtaaatctaagtggtaatattatcttggaaaccaagcaatggggatctagaaagcagtggacagggcattgaagaggacaggagagttggtctgggctgtgatgcttcaacataagagctccaagactgaggactggactgtctcttgaacctggagcccagctacagttctcaccaggccaaggcttagcttctctttggtgttttgtgaaacacgttgctcccttgctttctaggaaagggctgagccgacaggcctaaggggtggacgacgtgctttctgcaagtcaggagaccgtcagggttggggccggggcctgggctgtggtgcatgtgtgtgagcatggggcagtgtggccacagagcaggggcatgccgtgccgtgccgtgccatgaggaagggacatgaagacgctgtgcgaccatctccagcaggtgtgtgtggtgctgggggcttcagcggccggctctgatctccatcctccctggggcatcctgtactgagctgccccgaggcccttcatgctgcccagctcggggcagctcagtacaggatacctcggggtgggagtcagcaggaggtgagggggcatggtggccccagtgcagcactaaccaggccgttaccattcacaccccagggcctgactctgggaccgagcagcaaggaggctctagctttctgcattcggcaaaaatcagggcccgctgcctcctgagccaccaaaagtgctgactctgggcttcccaatatatctcagcacttgggcaaaaaagaggactggcagatccagttataggataaaattagacctgacacctcagcagcttaaggaggtcaccgtgttaacccctgcactgccaggggtcccactaggctgctggtttagaagactctgagtagctgctgttgggtcctggaaagaacccaaagatgcaaataatgtttaaaagcagcaaagggaaaggaaaagtacacttttctgacttatttttcttatggtagcagtggcggctgtggctttaaatttctctttggctcaggctctatggatgctcctgagtgggagagaggcagcccgaaagccaggctagggggaaggagggagccttgaatttcattttaatttgccgtaagtgatctgcaatgtggctgaagccccccaacctcaggtgattaaggaccggaccacactagcatgggtgtcagaaacacggagcagcctggctctgggacagcacttggccctctgtcagtgacaggcacagggacaagtgtgagggtggcaggggggtggggcggtggggcgagagcagtggtgagggagaggcggagaaaagctcctgccaaagtcccagagggttaggggacagcattaaatgccctaccctcccaaccagggcaaaggctacagagaagacggttgagggcccaaaggcttcctaatttactatccgcatccccgacaagcatgtacagtcgatcctcatcattcacggattctgcatttgcgaattcgtccactcgctaacatttatctgtagccccaaagctggcactcaccgtgctttggctcattcatggacacacacacaagggcagaaagtttgagtcgcccaacccgtgcaatcccagctgaggatgaacaatgccacactctgcctctgtgcctcatactataaataagtgtcctccttgcagcttgtgtagtgccacatttttcacatttttggtttcattgtttagaatggcccctgagggcagtgctgaagtgctgtctggtgcgaagtgcaagaaggctgggatgttccttaaggagggaatggacatcagataagctctgctcagggatgagttagagtgcttgtggtggtgaagtcagtgttaatgagtcaaccctatatattacataaggcgtcttgaaacagaaacgcatttaacacaaagttatgtattcatcagttgaccaaaatattgtggccagaggctcatgggagcctaaccttgtatttcccttaggagcagtggttcagtatttgctaattccgtgttcacagcgactatttatttatttatttatttatttatttatttatttatattttgagagggagtctcgctctgtcgcccaggctggagtgcagtggcactatctcggctcactgcaacctccatctcccgggttcaagtgatcttcctgcctcagcctcctgagtagctgggattacaggcatgtgccaccacccttggctaatttttgtatttttagtagagacggggtttcaccatgttggtcaggctcgtctcgagctcctcacctcaagcaacccgccctcctcagcctcccaaagtgctgggattacaggcatgagccactgtgcacagcctcaaacagcgactaatttatagaacagagctatggcaaatggctgtatttgtttcagagagtgaaagctggagcttgtgagtctagaatcaaggcctcctcctgcttccaggttgtatggccttaagtcatttaaccgccctaagcttcagtctcctcaagggagga

SEQ ID NO: 1883361 - DNA, 4001 bp, Homo sapiens
aaataaaataaaataaaataaaataaaatatatatatatttatttatttgggaggccgaggcaggtggatcacctgaggtcaggagttcgagatcagcctggccaacatggtaaaaccccgtctctactaaaaacacaaattatatatatatacatatatatgtgtatatatatacatatatatgtgtatatatatacatatatatatgtatatatatatgtatatatatacacacatatatctggaacctcccacccaggaagtgtaagcacacccaaggtatgagcagattaaagaaatcctgcagaagggggaacacatgcatagagtatgctggcaaggtcacatatagaaaatgggtggggggacttgaaagcagaggtataaatcctatgtgcaccttatttgctcaagtctacatggaccagcatccaaacattgaaattttcctttcaaattcaatcccccagagtgtatggtctcaggacccttctttcccccaaatcttttctagtggggatgcatgtatgcagacaatgcaaagtgctacaaatcgcaacaccaaatgcatcaagaggtagattattagtatgagtcagtttcacactaactttaccaaaaacctcactgctcacattagctcaagtaatctacttacaaccacaattataaattctgagcttccttggctgacgagtttgcagtaggtggttcttggccctgagggctgctgagatgcccgccgttatgagatgcccactgagaaaaccaccgccctctcccagcagggtccagcaggagcagtgtctgctctcggctacacaactccattcatagacttttccagttacgtttgaggttcacccaaaggaggtagtaaaaacaggaggtgggcactgaagctggcctggtatgtttgaattccagctctgctttttatcagcctccaggttttctcagtttcctcatctgtaaaacgggaataatattacctgcctcacagagttaccatgaaagtaagaaataaaatattcaaagtatatgacatggctgggcgcagtggctcacgcctgtaatcccagcactttgggaggccgaggcaggtggatcgcctgaggtcaggagttcgagaccagcctgcccaacatggtgaaaccctgtcgctactaaaaatacaacattagctgggcgtggtggcacaggcctataatcccagctactttggaggctaaggcaggagaattgcttgaacctgggagacggaggttgcgctgagccgagattgcaccattgcactccagcctgggcaacaagagcgaaactccatctccaaaaacagcaacaacaacaaagtacaggacacttgctccatgctccataaaagaaagttaatattgccataaaggagaccaaaaaaatcacagaaacccacgacgtgatcctgatgggagccctgttaagaggggcttccaggccaggcatggtggctcacgcctgtaatcccagcactttaggaggccgaggcggccagatcatctgaggtcaggtgttcaagactggcctgtccaacatggtgaaactccatctctactaaaagtacaaaaattagccaggtatggttgcgggcgcctgtagtcccagctactcgggaggctgaggcaggagaattgcttgaacccgggaggtggaggttgcagtgagccgagatcgtgccactgcactccagcctgggtgacagagcgagactctgtctctaaataaataaataaatagaggggctttctgccaggtccatagctgcctgcacacatagtccagaaatgtgacctcactccctagctcctgctccactcgccaccatcaacctgctggcctgtcattcatggtgtctggtgactctccctgccatcccattccaaacccctcagaaaagcttatccaattcctgagtgaaaagaatgggcctagaagggctgagtttaagttaacccaaagaaataaacccaaactccttcattctccaagctgttcaggcctcagggacatgtgtggggtgactgtggggcacacactatcattccccatgtggatccatcacggggcctagcacacaggaggtgcacactcagtgactgttctgttgttgaatggcaggatgaatctcactcctccctcaagacctgaaaacttgagagttatgaaggcatgtttaggaatgactgtaaaataccacttttcagaaaacacagaaatctccatttgattctttcatttgcaagcctgtttgatctgtctacacactggttggtctctcgtgtcccagaagcagagggcaagacacaaaaccagagttcaggggagcaaagcagacattttaggaagttattgcccaagtttcacttccacgtcgtcttctgcattctacttcaactctggttttgagcaaagctggggctggtgaagaaacttcccttagtctacatgttcctctccctgagtcccagcactgaggctctgtagaccagggactcaaattactgagcactcactgatgctagaccctatgtcaggcatattcagacatcttctgacctaagagccacaacaagctggaaaacagacactgagatgccaagagaggttatgcaatgtgcaaaagacttcacagtcagggagtcgggtctgaatcaaagatctccttggctccaaggtccttgcttctcaacctgccactgtcctttttcaaaggcgccaaccactaacatggcaaagtgtttcatttttcataaagccatctgaggagttcaaaagcatctttttttttttttttgagacagagtttccctcttgtcacccaggctggagtgcaatggcacaattttggctcattgcaacctctgcctcccaggttcaagcaattctcctgcctcagcctcccgagtagctgggattacaggtgccagccaacacgcccagctaatttttgtatttttagtagaaacagggtttcaccatgttggccaggctggtcttgaactcctgacctcaggtgatccacccgcctcggccttccaaagtgctgggattacaggtgtgagccactgcgcccggcccaaaagcatcatgaaaaactgtccccctgcattaaattcagatcccatctctgccagaaggatagccctggacaaatcatacagctctcacccacctgtgactatgccccatgggagaaggacgtgtatatggaggctttctgctagactatgctagatgctttgatacacattatcccactcaatcctccaaacattccagggaagcaggtgatagtagcccagcttcatcaatgacaattctggttctgcagtgggatgtgatttgcccaaggtcatgcagcgctgagaagcaggcccagggctccatcagccctgccatgcaataggctttgttgagtgagcactggatgtaaattccaaagagcttaaagcggccagacagagccagtgacaggagactctattaggcagatgaggaaagaatggagcttttcttcctcctaccgcccaagcctttcccatccttaactcctctgcacaacggggccctcactgtccttcccccaccttcttatcaaaggatgctggtgctgggagggggaaaagacagaaagaggattagtctctggcatggtttatgttgatttcaaagctgtcacttttcccacattgggccttctttttcactgtggatttaagtgcctagtcccctgatgaacgaaggtcaagggcagaggtacattttgaactagagaaagtcctcagcatcctcctgctctcacagccttactgctaaacacagcagtggatgcagagggtggcactgtggagcggtgagcaaaaaccaggctcaggagccagaggcctaggttccagtcctgactgtgcctcttggtcaagatgcttccccccaggaggtcccagttcccttgtgtgttaaaatt

SEQ ID NO: 1883362 - DNA, 4001 bp, Homo sapiens
tgatgttctaacactagttttcaaattgtattaatccttaaaaccctctgttcaaatgaaatcttgcaggaaagtccaacatataaatagaactgctgttaggagaacacaaggatgagcagtttactgagagaacccatcaactggagctacattgacagagcacctacattgattgaactcattgattgagctccattgatatgtgcctcctcatcactgttctgctgcattcacatcatctcatttaatcctctactccaccgttactattcctgacttaagagccagtagactggttaagaaggttactccatgggtaactgagaagcctaccagttgcttaaatacatacaggtttatttttttcatggaactagaagtccagagatagccaggccaaggttgatgcaactgctcagtgaaatcaggctttttctcttccttttccatcacccttaaaatgaggcttttcttttcatggatactgggtatgcaaattagtagtgtttgctacaacaagataacaacgtgatctgaaaaacatccggatctaggagttctgtaaagacctcgctttagttccctgtcactaaggtaacttccttgggccccctgaactctgcaggatcctttcatctgtgtctgcttggtcttggaattctattaacttatcacaagtgggctgttatcctttcttctcccctgctctcttattgacctttgttctgggttgcaattcactttcatgatcccaggaataagcacacataagaaatggaaaatgatctgtttctatttctcttcagaaaccactattattttagaacttttcatgtacgatagcttatttaaatgtaagattcagagatttttttgagacggagtcttgctctgtcacccaggctggagtgcagtggtgtgatctcggatcctgcaacctccacctcccgggttcaagcaatcctcccgcctcagcctcccaagtagctgggattacaggcatgcaccaccacacccggctaatttttgtatttttaatagagacagggtttcaccatgttggccaggctggtcttgaactcctgacctcaggtgatctgcccacctggcctgtcaaagtgctgggattacaggcatgagccaccgtacctggtcagatgttttaacatttaaacaatgacaataatagcaaacagttacacagcacctactataagccaagagctgctatgtgtatattacaatgctgttcccagagcattatgtatattaatttgtttgatcctccagtagccctattatccccattttacagatgaagaatggaagtacaggtgattgacttcctgaaaggcacatgccagtaaggagttggacagaaattagaatccaagcaatctgactccagacttttacgcactatactgttgcctctaagcaattttaaaataaacattttataggttacaacatgttgaaatattaatacaagttattttaaatgtagagaaataactgctaatctttaaattttaccaactgcctaaatatgtttatttaaaattgcatcaatgctgtgatttctgactgaatatgctaaggcaaattgttttatccttgtatttgtaataaacagatatgagatacacatacatgcctgacatgacagtggagcagagttaattttatatccttttagcaaatacatttctaaggctgtaaaactttttctacttaaaatattaataatggcaacttaatgtttcttgctatgtattaggtactgtgctggggtaaagatggaatgacttacctgctattccttttatttagaggtgagtctatttcttttcctactgaatctgggttggccagtgatttgacacgtagaatgtggcagaagtattacgttggtgcaaaagtaattgccagttttgccattgaaagtaatggtaaaactcgcaattacttttgcaccgacctaataacattctaggatgtctgagactctgtcataagagccttgcagcttctgtatactgtaacattcattcttgggtccagcttccatgctctaaggaaacataagcaaccttgaggagactcatatgaagaggatcccaggctcctggctgagcacccagctgacaggcagcacaaacctgccagtcactcaggtgagttctttggggagtatattctccaactccagcagaggccaagaggagcagaatgagccaataccactgagctctgcccacattattgatttgtgagaaaactgaatgattgtggttgctttaagcacaaagtttgggggtagttttttatgcagcaatagatggacagaacaagtgctaaggcctttacacgttatctttattcctcacaatgatcttatgaagaagctattatccttacctcaagatgacaaagctgaggctcagtgagttggcataataatccaggtctgtcaactccagcttgatagatatttctcctgataaatcttacttcactttatgatccatcttattcacagctgttgagtcaggcacgactaaggttaaatcttagttctgcccttattggctatatgaccttggataaatagaaggtaagtttgttacttcacaggactgtgaagattccaaggatacatataaagaaattggcaggtgataggcactcaacaatgggcaaatattattgctttgaaaattcctataatgcagaagcagctggtggtaaaaggctcgcagaatagcatttgatggtgtgaataccatcacggtgtgggatgcactcatttaggagcaggcacgtgcaaaaatgtcagaatggcctgacttctaataggaaaaaacctcatgacatcacatgatggtaaaccatgtatgcatacatggcctatgtttacctgtatgtataacataatatgggtatataattgatttaagtctagaaaattcccgactaaacagctatgtctgttacttcattttaagattccttccagctctaaaattctgtgaattttacttagcatcctttgtctaccttgaatgttgattaccttaggaaacaaatgcaatcacagccagctatcagctcatgccaataactatatacaatttgcaatttgtatgctattcctgaagaagagttcaggtattcagagaaaaggcctttctctctactgcctgcttctactaatttttaaacagggaccttcctgagtaaagcaggtcctatcaagttgctgtcatcttctcccctggaaatttgggggaaaaggtgtgagggaatggtggagcaggtgaaaggagggccgctgtaaactgctgtgaacattgctgggtctgttgtaggtgctcaataaacacttagagaattcaatgaacttgttcttcctttatcccatttagcctgtcttacccacttatttccagatgaacagtggatgacggtggtaagcagtagtgagaattaaaacctcaacagcttattgaaagaccccttcatcctgtgcttttatattcttagtgctagtgtatgacatgagccagtaacagggcttctggcccatagatcccttctgataacagctccttttgtttccattctcttccctactaatattggtgctctgactgacaagacaaaggactgtatcctgttgagaagatctaaaatctgagtaactcccactaaaatctgtatcctgtaaagaaataacacactttctaaaagtgctcttgggacatttaaaaattgaaagacaataaccgcccccccaacacatatactcttaacattctgtttttgatgccataaaatgaaaagaatcagaaaacaaaactaagactcacaccaaaaaattatcattatctagaaaaaaaagcaaagaaaaaaacttcttttatacaacttttggattaaagaaggtatcaaaactgaaacttaagaacatttagaaaataacagtaatgacatta

SEQ ID NO: 1883363 - DNA, 4001 bp, Homo sapiens
ttttcttttttatttttttgagacaaggtcttgctctgtcacccaggctggaatgcagtggtgcaatcttggctcactacgtacaacctcagcttcccaagtagtaggactacaggcacaggtcatgtcaccatgctggctaatttttttttttttttttaatagagatggggtttccctatgttgcccaggctggtctcaaactcctggcctcgagtactcttcccacctcagcccccaagttctggggttacaggcgtgagccaccatgccttgccttttttttctttttgatgttatatattgtttgagaactcttaagttcctttgtgaaattatgctttataaaatgtcttctaggattcatttgtggggggtctaacaaccgtctgttttccattgatttcaatttctgtgggccatttgggatgttattttatagatttttttaatccattggaaatagtgaggtgccctgagaaaatttattcacatgtaatgcgttaaatcttacaaaagaagaaatattactgaatgatatagactgtgttcatagtattaatctcttctctcttatttttaaaatttagttctattgtttccaccctgctagctcttatggatggattggacagcagaggggaaattgtggtcattggtgctacgaacaggctagattctatagatcctgctttacgaaggcctggtcgctttgatagagaattcctctttagcctgcctgataaagaggtaagaatttaatgtcactcaaattttgacaaaatatattgctgtttattaataataagtcttggtatagtaaaaatttggagattcttgagttttgtatcatggtcttgtcaaatgatagtaaacaactcaaatggggacaaatttttattcttttctttaaatataataatgccttcccaaaattactcttaaaattatttcaatttgagtgtagcctttggatgttctaagtgttgcttcagaacatatggcttaatgagtaatcaatccttagccagtttgttagccttgtctttttcatgaatatcatcatataatcctaccgagtttttttaagtctacttaatcttctgggaaccaaagaggaaaatatgtcaagagctgtctgtactcttaaaaacagctcttaatatgcaccagaatgaatagctactttagtagttacttttctcttatttgtgtttatgacgaatataactttagtgctataaatgcaaatatgtttaataatgagacttaagttcattaaactcttaaaagtacatcctttttcttattttcactttcatattttgcttatattgagtttttttggttggttgtttatgataaagtcttgctctgtcacccaggctggggtgcagtggcacaatctcagctcactgcaacttccgtccccgggattcaagcaattctcgtgcctcagactcccaagtagctgggattacaggcacatgctaccacgcccagctaatctttgtatttttagtagagagtggttttcaccatgttggccaggctggtcttgaacttccaacctcaagtgatccacctgcctcggcctcccaaagtgctgggattacaggtgtgagccaccgcacccggccagtattaagtactgatcactttaaaattttagataatcaaaagtattttaatcaaaattaatgtaatctgaatagcatttattattatagttgtaaaaaattaaattgtttttattcataggctcgaaaagagattctaaagattcacaccagggattggaatcccaaaccactggacacatttttagaagagctagcagaaaactgtgttggtaaacattgttttaagcagttaaaataaatactacatttatttcaaatatgaaacaagttatattaggttggtgcaaaagtaattgtggtttttgcctgtaaaagtaatggcaaaaaccacagtttcttttgcaccagactaataaagaaatacaaggttatatttgtttcttatctcttatttgtggcattttcttctcatgaagtcttggtattaaatagagatatttgacaaattggccatcaggggcagagtagataataatataattgtacaaaatacaatatattattatatcataataagataatagctattctttactgaccattttgtagtcatccttttaagcattttacatatattatttcatgtaattttcacatcattcctgtgatgtaggtagcagtatctctacagatgaagaaatggctggagagcattatgtgaatcttctaaggtcatacagctagtaaattacaaactggaatgtgaatctagtctgtgtgattttaaaactcttgcttttgacctctgtgctatacttagtgcttgtgtattgcactcttaaaagttgattgattgttgatggccattactaccctataagtttactgggtaaaagagattttggtcttattactcttaaatatttgctaactatattccgaggctgatttttaattttttttttaaccatggtcatgctaatagagttttgtgtttctttgtttggtcggctggttcttttcttcccctggttgctttggataggatactgtggagcagatattaaatcaatatgtgctgaagctgctttatgtgctttacgacgacgctacccacagatctataccactagtgagaaactgcagttggatctctcttcaattaatatctcagctaaggatttcgaggtagctatgcaaaagatgataccagcctcccaaagagctgtgacatcacctgggcaggcactgtccaccgttgtgaaaccactcctgcaaaacactgttgacaagattttagaagccctgcagagagtatttccacatgcagaattcagaacaaataaaacattagactcaggtataaaacttgattgaccatttaaagttagtttttataatcagtaaagtgaaatgtttcatacataccagaaatatttatttgtaaaagaatctcttgaaaagaatttggtaatgctttacctgggatatttgaaggaaatttactccatggattgcccttaatttaacttattgtaagtttggggtgcatttttacatttacttattaattcatatctacacaaatatttttgattctttgaaaaaatttaattgaagtatgctgacttggtaactgaagcaataaagatttgctttgcaatccaaaagttactaatgtacaattttttggttttatagatatttcttgtcctctgctagaaagtgacttggcttacagtgatgatgatgttccatcagtttatgaaaatggactttctcagaaatcttctcataaggcaaaagacaattttaattttcttcatttgaataggtatatttttcttgcaaatcaatgttttttgcatgtgtaaattttctaaaaataaatgagatgtggttgaaaaaataaaaagtgctaaccaatctgctttttatttaaattaaactaccagaaattttttgttgttacagttgtcacaacagtagaaattacagtctataaaaatattcctaaaaacctttgggggtcagtttccagaaactatgtgaaccatgttatgattggttggccttattggcaagactttttacttatgaaagtttatagttgacaatttagggggaaaatttaaactgttttttctaaaacatagcttattaatcatttctctttcagaaatgcttgttaccaacctatgtcttttcgaccaagaatattgatagtaggagaaccaggatttgggcaaggttctcacttggcaccagctgtcattcatgctttggaaaagtttactgtatatacattagacattcctgttctttttggagttagtactacatcccctgaagaaacatgtgcccaggtaatttgttggtgcccaagtataagacaaaacaggctttcagaggcaaaag

SEQ ID NO: 1883364 - DNA, 4001 bp, Homo sapiens
tgggcaccctgctgtgcctggagcatagggctaaaactaaactaccaccttggaccctggatctcagctccctgtaacagctagaccctaatctaaaaccaaacaaaaaaattttaaaaattatgtgttttttttcttaagcaacaattttaacatcctccaagggtaggacatgactcccacctaggcatagctgccagcaagaattcagagacccagaaactttgaaaactcaaaatttgaggctgcaacaagggcctgcctgggtctttctcgggaaatcttaaaataatccattatatttgagtaggccattaagctttcattctacttgcagtcacccaaaccatttttgctcacaaattatacttccttggtagcctccctcaagaagcctggccttatttgggaagctgaaatgagaatgaggaagtcatcacacaccatcccaaaccctcacattcttcaaagccgtctcttcctcctgactccctgcttctatgagtggtgcctccaaccctcccaagcccgagacatcctacccatgactttgaacgtaaggcaaccattggcccagagccagtcatttcataaccagtcctgtggaatggctgtaggaatccaggaagggtctgtggggaaaggtggcatggggttgcattaggaatcaatcttataactcctctgatggcagatgatagtagcaatgaagggtaaagtacagagggaaagagggacatactagagagcgccttcgtcaggtgaaaggaagaagagttactgtaaatgccacgggaggccccgctgggaaaccaggcagcccagtgtcaatgaagaccacagggtccatttaaatggaggaaacacccctcaaccctaagtgccgaagagcttaagaatgagtctgaaactagagcacttcactgggtgattagggggccacgccaacccataggaggccaggatctggagtggtgagggcaaattccagagagcaaaaatccaatgggaagggaaaagaagagagaagccatatcaccaagcttctggactgagtgcgaaggagcacttgcaggcacgctagccacatggattagactgagcccgtgcaatcattcccactcttcttgaagtcagtttaaaattagagtcaaaaaaacaagttataaacacatgcaagaaagtggtaaaggaaaaaagaacatatcaacattttgtatgacagaaagcaaatggatggtagaatctggcttaaaagggagaagaaaagctaaaatgcagatagggatgccagtaaagtgcagagaaaagaagaaaaagagggacagacagggatgccagtaaaaaacaagcccatttgcactccaggtcccacaaatgctcctgattggggcccccggacactcctgaactccatcacagaggctgtcaatgttgggattggcagcaagtttacatatggacactcaaacctactcccctgggccatgagtccaggtggctgccctcaccaactccagcagtagccatgggcttcattccatacagaaggcctgtagttccagctacttgggaggctggaggtaggagaatcgcttgaacccgggaggtggagattgcagtgagccgagagcgcacactgcactccagcctgggtgacagagcaagactccatctcaaaaaaaaaaaaagaaaaagaaaagaaaagggggaaaaaaagaaggcctgaacctgcacacagcctgccgctggggtatactagacacagaggaggaccggacaggtgctgctgcgtgaacaccaaagggttacatgaaagtctgcaaagtgaagaatgagacactcgggtcttagaacactacatttatatgcctgtgtcagaggattgagtggtttttctctaaagaaactattaggctgttgcaaaagtagtcacggtctttgccattactttcaactgcaaaaaccgtagttacttctgcatcaacctaagaatagttcaaaagaaaagacatatgggccctctgcaaaattctcaagtgaggcctaacaaatcacaggccctgcatgtacacaaagagcttccaacgtcatgtctcgctgttaaattcaaatggacagtcaagggctggcaagtatttaaggaaagcctccaaatgtgaatggcagagactgtaacatacaaaacagaaaaggaagaaaaggaattcagagataacagagacaatgcagggagtattaaaaaaaaaaacttttcactttttgccttgttgcactcctaaaagcaagatgggtcaccagcagctctcctggagccatccaaaaaaattcggccagggttctcattcttgtcattatggcctcaatatgtgctgccagtgtttccatcagtatgcagaggaggtaggcttcattaggttagactaagtgagcttccctgaatggattatccaaggcatccaccaagtgaaagaaaccatgctagctctctgtacataaaataaaattttaaaaaaaaaactttaaaaaatgataatatggccaggagtggtggcccgcacctgtaatctcagcactttgggaggctgaggcaagcagatcacttgaacccaagagttagagaccagcctgggcaatatagtgagaccccatctctaccaaaaaaaaaaaattagccaggcatggtggtgcatgcctgtagtcccagctactcaggaagctgagatgagaagatcagctgagtctggggagattgaggctgcagtgagctatgactgcacccctgcgctccagcctgggtgacagagtgagaccctgcctcaaaaaaaattgttttaaatgataataaattagataagacttttgtattcctaaaacaagaacagaaagctattaaaaggaatgttcagagactgggaaagattacttggaaatttaaaatataagagaagaaatataaaatgcaagacaagtaaaaagatgtgaaagaaaggaaataaatatgcagtacactacatggctcagctgcaaataatatttacataattctaataaattaaacattcaatattaaccaaaagtgtgatgtaattatattggaaagatagtgtaaaagagataaatctttaacttcaataacagaaaatcaataaataatggttttaagataaggttaaagaggccaggcacggtggctcacgcctgtaatcccagcactttgggaggccaaggcaggtggatcacttggggccaagagtccaagacccgaccagcctggccaacgtggcgaaaccccgtctctactgaaaatacaaaaattagcctgtgtggtggcatgtgcctataattcctgctaattgggagggtgaggtaggagaattgcttgaactcaggaggcagaggttgcagtgagctgagattacaccactgcactccagcctaggtgacagagccagactgtctcaaaaaattttttcaagaatattttttaaattttttttaaaagataaggttgaagaaatttcatgaaaagatgaacaaaatgacaaacagatgggaaacagaggaaagaaaaagagaatcaatccaagagtttcaacatctgagaaaagggtattatagcaagagagaacaagaaaacaaacggcagaaaataccaaagaaataatacaagaaaactttccagaaatgaagaacatgagtcctcaggttaaacaacacccagctcaaagaatcatgacatttacaaatatgaaagacaaaaagaacttttaaaatcttcaagagaaaagggtagacatctaatacaaaggatcagtatcccagttgcactggatttatcaatacagacactggaaactggaggataatgaatcaatgcctttaaaattgccaaatttgatactgaggcaagctatcaatcagcatgcaagagtagaatgaaaacatcttcaggcattaacaggttttaaaacatcatctcccatgtatcttttcttagg

SEQ ID NO: 1883365 - DNA, 4001 bp, Homo sapiens
agataatatgtaatgtagaaaaaaatacagttagacagataaccaactagctgtattggatcaaacctctctctgagaacaaccaaaatagctgaataaaggggaaagaaaagaaaacaacaaatcgtttgaagatatctgagatcttactgaggctgccaagatttgtgaattcaagattccagggagaaagaaagggcagagagcatgacattaggcatcgcttttctttcagggcatttgtaaatttgaaagcagcagagaggctgaagagctgaacagagattttggcttaatcatgggactagaagaataggaattagaatttgaatctttcaaagctacaccagagttgtgtgggtaaactggaaacagacaaactcaaaaaagacagaagctcagcttcaaattaattcaatcctcaaagggaagcaaaacagaacaaagatcaaagccaaggatatcctatctctttcatatcagttaccagaaaggaagtgacctctcttacccaaggccaatccctcctagggctctgccttatttatcctctctcaatcttgtgttgttagttatctttgctctctctcctgtacctataaccacaccataaggcatttttataatcccaaattccttattcttttggcatgcatcgtgtcatgaattcagagggatttgtttcttgctacactaatcttcacagaaaaccttccttgagtagaattaactagcacatcagctaggcatatggactttttctgggcttccttttatttttcccccagatgattttcattaacacatttcaggctactgtagattgcttaatatgttaattaaacacattaactttcttgtcaagaatcttgctttttgattacttactgttgtgcaagcatgctacattgcagacccttctaaaaaagcccatgaaacactgttgggtagggtccacgaaattacacattttagctgaatgtctagccaagggttaaagtcaatattcagcctaagttgaagttgaagatgaatatcacttcatggcatgaacttctgggaaaaaagaataaatattaaaatttccacattttattttaattttgtcattaaaaatgctcaaagtcaaagtgtataatttgacattactgtacaacacaatgatttcccagccttctcagtggaggtcaatacactaaacctgtgtaatcccaatacagtagactctcactttcaatttagatcaaaggaggagcaagctattctgttttgagctctgccattgtaaatattgatggtgaaatggaccctaagataagattttctgggaagaattgcaacatataaagcatatatggatattaatttttactccaagtcaattttgaatatatttgaaagtgaatgtttaggtagtaatactacactttgaatgatatgcaatccttctaactaatatttttatggtgataataattttggttgtctcatccttgatcatcagcaagtttagagttccggagatgataagtaagtctttcactattcttccaaagagcaagcttgaatcccaaaacaaattttgtaaaatttccacgtcaaatcaaattctggtacatttgtgttgtgggtaatttcttattgcatagtatccatactctcaacaccttcaatatcatttactttgttgatcagcatatgcagtaccaaaggaacttaaagttgccaaagcacacaggccgagtctgtcttccatattcttattattggttagttgttttatatgaatgattataagatggcagttttgatagaccagtcccatgctacaccactgaaagtgctcttgccagagtcaccaataatttctttaactgatcctcaactgacttgatctctgtgcagcaaatttattaggttggtgcaaaagtgattgcagtttttgccattaaaagtaacagcaaaaaccacaatcacttttgcaccaacctaatacaatcttgaatattccctactttgtgaaatatttttccctattattattacattttttaaactttctctaattactctgctttttcccagtttgttttgaatttccctgctttctgctaatctcttgtatatgaattttcttccagattctagcctagatagaatttttatttttttgcttcacgtagcctctctttgaggattatatttttcatactcacaaattcaattatataatttcaatcatgattctcaaatctatatcttcagccaagatatttctccagagcttcagatctaatttgttagtcacctagtagatatcaccacataaaatcctataaatatccccctttagtgtcctttttatcagtgaaattaccaccatctacctaattataaaagccaaatacccaataattttccatgacttgcccttttctcatttactttttatatgtaatcagttatcaagccttgtgtttctatttgataaaatggctctccttttattttttgcttaccttcatcttttgttattatcatagttcaggcaatcatcttttgtctttagtctcaaaacaccttcctttctggtcttccgtattttgaattcattacttccaaaaatgtttctattggagccagagggatggttccaaaaatccagtcagatcatagcattatcctgattaaatatcatcccccattacatttagaataatactttgggggttatttataaactgccttcatttagccactcaatcccatcttttttccttctctcttgttttctctgctccaaacattctgaaattttctttctttctctgaataaatcatgattattcttacctctaggcctttgcacaaataaaagttttgatgaagaagtttcaagttaatggtttgtgaatgtaagacaattctattttttttttcaataactgttgccaggtttgctttgttgaattccttccctgctgggcaacaagaaacagtgatatctcagtttgacaaataactttttatttacttctgattaaaaatagtcttaatttggggtagtaaaactttccttttttaaaagcttgtgcagggcttctgtatagtatacgtattgaacagggtttatgtgtcgatatggatagggttggatgtgttgttggctttctccctctctttatctttttcccagtgcctgttgtattgatgatgatgtaaaggggtgtgtgcatgttgtgggtgggggggtgtgaatgtgtgtacgtgtgtgcatgtgtggatgtctatgtagtatgaagggggagatggtagaggagtgggatgtctttgcttatgctgtattagtgatagtgaggtgttatggttgaatcacctaatacacactgtttccttatgtctggtgttgttacttggtctacactgagagaagtcagatgccaggtttagagttataataagattgatctgatttttggaaatatccttctggctaagttgaaacccattaggagtaatcaattagaaatataggcagtcttctaaggctgacaaaaacaataaattggggaaggactccgtattcaataaatggtgctaggataactgtctaatcatatgcagaagaatgaaactggaccctttcatcatatacacaaatcagctacaaatgggttaaagattttaatgtaagacctcaaactataaaaatcccagaagaaaacctagggaataccctcttgacatcagccttggcaaagaatttatggccaagtccccaaaagcaattgcagcaaaaacaaaaattgttaagtgggacctaattaaactgaagagctctccacagaaaaagaaaccatcaactgagtaaacagacaacatatagaatgggagataatattcccaagccatgcatctgacaaaggtctaatatccagtctataaggaatttaaacaaatcaacaagcaaaaaccaaataaccctatttaaaaatagacaa

SEQ ID NO: 1883366 - DNA, 4001 bp, Homo sapiens
aacaggaatgtctaatgtatatacagtaaacttttccaaagcatgaatgacagctggtgccaagtgagaaccttgcccaaatcctggttctcctactatcaatattcttggtcgaaaagacataggttggtaacaagcatttctgaaagagaaatgattaataagctatgttttagaaaaaacagtttaaattttccccctaaattgtcaactataaactttcataagtaaaaagtcttgccaataaggccaaccaatcataacatggttcacatagtttctggaaactgacccccaaaggtttttaggaatatttttatagactgtaatttctactgttgtgacaactgtaacaacaaaaaatttctggtagtttaatttaaataaaaagcagattggttagcactttttattttttcaaccacatctcatttatttttagaaaatttacacatgcaaaaaacattgatttgcaagaaaaatatacctattcaaatgaagaaaattaaaattgtcttttgccttatgagaagatttctgagaaagtccattttcataaactgatggaacatcatcatcactgtaagccaagtcactttctagcagaggacaagaaatatctataaaaccaaaaaattgtacattagtaacttttggattgcaaagcaaatctttattgcttcagttaccaagtcagcatacttcaattaaattttttcaaagaatcaaaaatatttgtgtagatatgaattaataagtaaatgtaaaaatgcaccccaaacttacaataagttaaattaagggcaatccatggagtaaatttccttcaaatatcccaggtaaagcattaccaaattcttttcaagagattcttttacaaataaatatttctggtatgtatgaaacatttcactttactgattataaaaactaactttaaatggtcaatcaagttttatacctgagtctaatgttttatttgttctgaattctgcatgtggaaatactctctgcagggcttctaaaatcttgtcaacagtgttttgcaggagtggtttcacaacggtggacagtgcctgcccaggtgatgtcacagctctttgggaggctggtatcatcttttgcatagctacctcgaaatccttagctgagatattaattgaagagagatccaactgcagtttctcactagtggtatagatctgtgggtagcgtcgtcgtaaagcacataaagcagcttcagcacatattgatttaatatctgctccacagtatcctatccaaagcaaccaggggaagaaaagaaccagccgaccaaacaaagaaacacaaaactctattagcatgaccatggttaaaaaaaaaattaaaaatcagcctcggaatatagttagcaaatatttaagagtaataagaccaaaatctcttttacccagtaaacttatagggtagtaatggccatcaacaatcaatcaacttttaagagtgcaatacacaagcactaagtatagcacagaggtcaaaagcaagagttttaaaatcacacagactagattcacattccagtttgtaatttactagctgtatgaccttagaagattcacataatgctctccagccatttcttcatctgtagagatactgctacctacatcacaggaatgatgtgaaaattacatgaaataatatatgtaaaatgcttaaaaggatgactacaaaatggtcagtaaagaatagctattatcttattatgatataataatatattgtattttgtacaattatattattatctactctgcccctgatggccaatttgtcaaatatctctatttaataccaagacttcatgagaagaaaatgccacaaataagagataagaaacaaatataaccttgtatttctttattagtctggtgcaaaagaaactgtggtttttgccattacttttacaggcaaaaaccacaattacttttgcaccaacctaatataacttgtttcatatttgaaataaatgtagtatttattttaactgcttaaaacaatgtttaccaacacagttttctgctagctcttctaaaaatgtgtccagtggtttgggattccaatccctggtgtgaatctttagaatctcttttcgagcctatgaataaaaacaatttaattttttacaactataataataaatgctattcagattacattaattttgattaaaatacttttgattatctaaaattttaaagtgatcagtacttaatactggccgggtgcggtggctcacacctgtaatcccagcactttgggaggccgaggcaggtggatcacttgaggttggaagttcaagaccagcctggccaacatggtgaaaaccactctctactaaaaatacaaagattagctgggcgtggtagcatgtgcctgtaatcccagctacttgggagtctgaggcacgagaattgcttgaatcccggggacggaagttgcagtgagctgagattgtgccactgcaccccagcctgggtgacagagcaagactttatcataaacaaccaaccaaaaaaactcaatataagcaaaatatgaaagtgaaaataagaaaaaggatgtacttttaagagtttaatgaacttaagtctcattattaaacatatttgcatttatagcactaaagttatattcgtcataaacacaaataagagaaaagtaactactaaagtagctattcattctggtgcatattaagagctgtttttaagagtacagacagctcttgacatattttcctctttggttcccagaagattaagtagacttaaaaaaactcggtaggattatatgatgatattcatgaaaaagacaaggctaacaaactggctaaggattgattactcattaagccatatgttctgaagcaacacttagaacatccaaaggctacactcaaattgaaataattttaagagtaattttgggaaggcattattatatttaaagaaaagaataaaaatttgtccccatttgagttgtttactatcatttgacaagaccatgatacaaaactcaagaatctccaaatttttactataccaagacttattattaataaacagcaatatattttgtcaaaatttgagtgacattaaattcttacctctttatcaggcaggctaaagaggaattctctatcaaagcgaccaggccttcgtaaagcaggatctatagaatctagcctgttcgtagcaccaatgaccacaatttcccctctgctgtccaatccatccataagagctagcagggtggaaacaatagaactaaattttaaaaataagagagaagagattaatactatgaacacagtctatatcattcagtaatatttcttcttttgtaagatttaacgcattacatgtgaataaattttctcagggcacctcactatttccaatggattaaaaaaatctataaaataacatcccaaatggcccacagaaattgaaatcaatggaaaacagacggttgttagaccccccacaaatgaatcctagaagacattttataaagcataatttcacaaaggaacttaagagttctcaaacaatatataacatcaaaaagaaaaaaaaggcaaggcatggtggctcacgcctgtaaccccagaacttgggggctgaggtgggaagagtactcgaggccaggagtttgagaccagcctgggcaacatagggaaaccccatctctattaaaaaaaaaaaaaaaaattagccagcatggtgacatgacctgtgcctgtagtcctactacttgggaagctgaggttgtacgtagtgagccaagattgcaccactgcattccagcctgggtgacagagcaagaccttgtctcaaaaaaataaaaaagaaaagaaaaagaaaaaaagtgctggtagcaccaggtaggacacacagtatctaaaaataataaaatttccactgtatatacattatcaaaggacaccaaaa

SEQ ID NO: 1883367 - DNA, 4001 bp, Homo sapiens
gaatcgcgtgagcccgggaagtggacgctgcagtgacccgagattgcgccactgcactccagcctagatgacagagtaagaccctgtatcaaaaaaaaagaagaaaaaaaaaaggagttctgtttttgatatgttaagtttgagatgtctattgtgtccaagtggagatgttcagggtgaaattgtatggattgtgtttttcatagcatagggattctagaggacttaatagtaaaagaagcagtaggaagatctcagaggagaggatgagactagaaggattcagttggtcagtgcaacttatgtctcacgttgtgtctgaggatgacaagaggtgatgcattgtgggtaaagctgactatatggttattaaaagaaaaaaaaaagtccaagaagtcctagtaaatggaaaaatttaggtctccctggatgaagtcagccatagcctgggttgattgttctgctgaagagagcttagtcaggtggagagtgtggtaaagggatagccattacccccaaggcttcaatacaagtggaaaatgcaacagctttaatcctaagattcttcctagattcacaatatgtgtgtgccctggtcccaacccctccctactcccctcatttgcccccaggcttcgtgaaagtgatagcagaatcagccatgctgattcctcagcccagtgcactggatggaagttaatgcccaaaactgatttatcttccttgaggctgggaaaagggatgagttgggaaagcgaacaactagaggtgtttatgaaggaggaacatctgggatgcccgtggtggtaacgtggagtgctgcaaagaggactatagagaaggaaggcaaaatgctgtttagaatccacaaacgtggaatcagtgcatctcatttgctggctcttaccataaaatgagcatcagtatccctgccctgagcttgggtagcttatcagagaagatcgctgacacttttggagcccatctgaatagctccctctgaagccatccaacttgaccatgatctggacttcctactagaccagtattttgcctttgcctgatctttcaacttcagcttctgcattttcttctaattagccctttcttaccccaccagcactgccaaaatggagacttcctgtcccagtctcagaccttgtggaattcacacctcccctttccatcaccacctcccaaccctgccacaatatggactacctgttgttacgttgagaagattaagactacacaggcagttagtttagggaacaccttctacagttggtgaaatctatttttaagatcatgaaatgtcatactactgccatatatactaatttcctcctcctcctttctctaaaactgtcactcaagataaaagtcagctgggccgggcagggtggcttacgcctataaccccaggatctggggaggccaaggctggcggatcacctgaggtcaggagtttgagaccagcctggccaacatggcaaaaccccatctctactaaaaatacaaaaattagtcaggcatggtggtgcacacctgtagtcccagctactcgagaggctgaggctggagaatcgcttgaacctgggaggtggaggttgcagtgagccaagatcacgccattgcactgtagcctgggcgacaagagtgaaactccatctcaaaaaaaaaaaagggcaactggtgaatgctgggaatatgaatatcagggcttgtgcttgttattttggggaatgacagaagacagacccaggcagtgttttttccctgcattcatccttttttcctttttctttatttcccatttattttatttaagtgtgatttagtttgtacaacatttataagaggaatggaaaatagacaagaagtgatgatagcaagtattaggttggtgcaaaagtaattgcggtttttgtcattaatgaaacgtaaagtaattaaagtaatgacaaaaaccgcgattacttttgcaccaacctaatagctttggaaatggaacaacgaaggatcacaagtttggcttcaagttttctgtggtacacttgccacaaaaagcagggggcagaggaaacttttggaggcgatggatatgtttatcattttgattgtgatgatatcatgggtgtatatgtatacccaagctcatcaaattgtacacatgaaatacatgtggggtttttctgtctatcaatttatactttgataaagctattaaaaagaaaaaggcagaaatgagctcaaattttaaactgtctttattctttcattgaacaagcatttatgaagggcccgccatgtgccagctctgtgcgagatattgatgtgactctgggaaggcaagcattgtccccaaccctgcacatctatcagggaaagcagaagcaattgccatcacgtgctaggacagggaagtttggcaccatggaaacgtgtagcaggggcaatcctggtgtgggggtgggtcaggattgtaattcccaaattggagactgactcacacagctatcagtgacaggcagaacaacctccacagacttcagccagaggggggaattagccattttcttttatatcaccgttttattcacacatcagcatcccctcattcccatccacttattcctgaaagcaggccctttttgaggctccaaacatagtaattaaacaaaggggattctagaaggtggacaaagcattagagacagcttcattgtatataaatgccaaattttctgcatcagtaaggttgcagctgtgacaagaattaggctgctttctaggtcatatattttctaaagcactaggcaaaaaaaatattaacacatgaggggaaaagaaataaatagactcaattgttttaaaaccttatgagtagaccattttttaataatacaatgaatactgcttattgaataaacaaagaaattatttgttaatataaaatagagccacattctctggttaaatcgtgaatgtgtaaaaaattaagttctcaatttaatctgttctgcacaagattctgaatgaaagattaattggatataatgacactgatattattttctgtataataataattctatacatgtttggcaatttatagttgtaattctatgaatctgaatttttaaaagttaactacaaataaacagtctctgtaaatgagatatatggggtaggagactgcttacatgggtatggctaaagcataaatttgaaataatatctgattcatatcagaatttatcagcctgggctggataatgtttagtcacagatgagacacagataagaaaattaacaccagattggtaattaaaagtgcttcctgggtatgaatgacacctctgaatgcagcatgaaataattccttttgtattctgctccacgttttctttcatcttgtgtttggacattagccacagagggattgatgtttaccgcaaagagcctggagtcagaagatctatattctggtctcaatgctgctagaagttaactgttagatttttagaaaaaataagttctaatcctctgttcagcttgcacatctgcaaaatgaagatactttttaaagcaaaattgagaaagaaatagaacaaaattatgcatgcaaaaatgcggtgaaaatttttagttaatgcaaatataaaatatccaaatagtctatgcacaaatatatttatatatcataacaatggaaactaaattataattgaagggatatcaaaaatagaattatagtattgaaacaaataaaagccaacaagattgaatatgtgtgtttgtgcacgtatgttttaagtggtgagatacttctagatattatgttgttaacatattaccaaattgtttaactcatatatgcgtatagtttttggtaatatgaaactgtgcatagaaggagatgatcagtaatttatttggctgtctagtacatgttgagtcacttctccatataaaaaattaataaagaaggctaataa

SEQ ID NO: 1883368 - DNA, 4001 bp, Homo sapiens
actttttttttttaaagagctcagaaatactgtattctttaagttcttgaacttgtgatagtgtctattgcctattttgattgggcaataatttagctggctataaaattcttggattatactctatttcccttagaaattataggcacccatccactgacatttcactgggctttttttttttttttttttttttttttttttgacatggagtcttgctctgtcacccaggcttgagtgcagtggtgcgatcttggctcactgcaagctctgcctgccgggttcacaccattctcctgcctcagcctcccgagtagctgggactacaggggcctacctccatgcctggctaacttttttgtatttttagtagagacgggatttcactatgttagccaggatggtctcgatctcctgatctcgtgatccactggccttggcctcccaaagtgctaggattacaggtgtgagcaactgtatgagcccagcctcattgtgctttgtactgaccccctctccctggcctcttccagcttgtctttttctctcccagtagtttcttcatgatgaggccatgtgctatattccatgagatatttcacactcaaagaagacttcttttatactcttgtgataatttgtctgggaatcactgtcttcatttataagggagtttgtaataaatacagtaaaagagaaacacacaacatattttgagatatcagagaagggggaaaccaattctattaatatttggggttagcagggaaggcatagttaagaggtaacatttgaactaagccttgaaataagggaaggatttggccatccagtaatggggagagagtagaaacaagacatgatggttaacggtatgtatcaatttgactgggttgtggggtgcccagatatttggttacacattattctgggtgtgtctctgaggtattctggatgaggataacatttaattggtagactgaataaagcagattgtcctccccaatatgggtgagcctcatccaatccactgaaggcctgaacaaaacaaaaaggtagagtcagagagaatttgctctttttacctgattatatttgagctgggacatcaatcttctcctgactttagatgtggactcgagttggaacaatatcattggctgtcttgggtccccagcttgctggctgcagactccaggactccttagcctccataaccatgtgagccatcctttacaacaaatcaatctgtctctatgtgtatagatctaactctatctctctgctctttctctggagaacttagagtaatacacaaggttacattagagaagaggatgacccaaggaaaagcgtggaggcagaaaactgcaaagagggtttgggaagacgggggtcctgatggggagtttggatttcactgtgtgtagcatgcagaatctttgaaaatattcaagaggtgaaaattgtatttgtggaagaacaccaggagtatgtgaaaagaaaaacactcactccattttaactccactgaagggggcatcagagggatgcactgaggacatgggttggagggtagttgaggccatatctggaggatctttacttctaggctgagtctgaagttatctttctggggagtgggagattacaaatctttgagctccactcaagagatggttttgctaacaatggcagggcgaaggtggtggtggtggtggtggtgggaaactgttatcatgaattctaattgggcttctgttattctagctgagaaagttggggaatggactttcagtagaataatacagatctgggaatcaactgcatggaggaggtagttataggtgatgagatggctcagggacaaagtttggtagaaggagaaaagatactaggctggtacaaaaataattgctatttttgccattacttttaatggcaaaatccgcaattacttttgcacaaacctaataggatgtaaacttcggagccatctgcatcagagggattgatgaagatcaacaaagtttgggaacacaggaaaggagcggggagggtaatgacttgagggcatagcagggataatcaaggtttttcttattagcatgtggagacttaagcatgactatatgttaaatgcctggcacatacatggtgcaaaatatttatgagtgaaatgacaagtgaaggtggtgagtcatgggagttccaagggaacgggtgataaagggaggtctcaaatgaggcacaagtggggaaggtagcttgggaaaggagaaggatgtttctccttataagatgggaaaggcagaggaagagggtcaagatacagtgatctaggggtgagatggaagtgagttgagagaactcagctctgggctcttttcacccctagggatgggtttgggggtttttgagatatggaagaggcttaaagtcaattgttatggcaaatatggtttggaatttatttgcgatgcttaaaaatattgctgaacagaagtgaagtctttcctagagttggacggtgagattatttagtggaactacgagatccctgttgtgattctttccagtatcattcagcagcccttggtcagttgcgaggcaagtcatcaatggggtatggagattttccaggtgggtgtggttgaaggcagggaagaacgagtttaggagcacattacaagaggaaggtaactgttaagtccaggctgagcaggaatgtatagcaagaaggaaacatgaggttgtgaagagaagtttagagggatgaggagtcaggagaggtgaacagttgcaggacgtagctagagtggcgatgttagatcttggggccagagagctttacaatgagtatgaagatcaaagggcattagaatcaagctataaagagccactgtttgatgttggtttgtaagtatgctgcaggtggatgtctgcacattgatggtgagaacgtggtcaccctggccctgctgggtctttgctaaagagactctgctctgttcttggggccgttttcgtcacctgataagagcagtggttcccaaattgtgttctttggaccatctgtataaaatattcataggtcaaggataagatggaaaaacagagaaaatgtcacagacatgtgcccattggtgaaagaccaccagctgtcctttttggaggatttttctttattctaaaaatgtatatattctattctattaaaacatttttgtatttgcatttttttctcttttatgaaatgccatggggtagaaatttgtaatgtatccaattctcctgtctccatgcattgcagtgtggtgggggaagggatgtggctagtactggccaagaggctgggggcagaggtgcagtgttagacttctagcccgaagcatttaattcttagtacaaggctctctagcattcttctccctctgttccctgcttggtgatactcgaggtattgcaacccccattagccttactcttagggaaagtttgatgggaaacagagcaccccacacctccctgcagatgtagcatgagtaagaaacacaacttctgatgtttgaagttaccaagatttaggagttgtttgttattgcagcaaaacctcacctattctgaccaatcatggtggaaattccgtgtgtgtgtgtgtgtgtgtgtgtgtgtgtgtttgtgtgtgtaactggtagtttaaaaaatttccttcttaccaaaaagaaaaagaaaatagcaaccttatgttggttctcaaattaaaaaaacaaattttacccgtttataaaatagaaaaatctgagaatctgtagcttagagaactactgtgtgggatgtctttaaagaccaggttattttatcagctcctaacaccccttaatagaagcttagccaagacttggactatttcagtctttcccattccacattccatggactcttgaagagacattgataaaacggtgcagccatgaaccaccctaactcaatcctagtgg

SEQ ID NO: 1883369 - DNA, 4001 bp, Homo sapiens
tgcctggctaatttttgtattttttggtagagacagggtttcgccatgttggccagactggtctcaaactctggacctcaagcgatccacccgcctcagcctcccaaagtgctgggattacaggtgtgagccaccatgcctagcctccaactgttttataatagtgctcagtatacattacacaatcagtaaatatttgctgattataaaataaagagagcaaagaacatttacataagactttatgctcatcctacatctggaattccatcctctccgttcatatgttcactcacatatatactgtgttgactattaaagctgctggggtggtttcataagaaagaactagatgcagatcctgccttcagtaaatttcctgtcttaaaaagcaaaaacaagcattaaaccggtatctctaatataacacagacaatgaaagagaagcatatatgctcctggaatccagacgggaacagaacgtagatctagaaggccaggaaatcattcctgagtgggttctggactgggagtggtggatcatgcctgtaatcccagcactttggaaggccgaggcaggtggatcacttgaggtgaggactttaagaccagcctggccaacatggtgaaacctcatctctactaaaaatacaaaaattatctgggtatggtggtgggcatccgtaatcccagctactcaggaggctgagtcaggagaactggttgaacccaggtggcggaggttgcagtgagctgagattgcgccactgcactccagactgggtgacagagcaaggccactgtcgcaaaaaaaaaaaaaaaaaaaaaaaaaaaaaaaagcgggttctggagctgtattcagtgcagtcacaattccttggctgtcaggacctaaatttaagtataaggtgaaattcacacacagtacaattgtctgggaaattcactaggagcttgccatgtttgtggacaatgcatctctctgtagatccaacccagtgaatttttttcctctagcgttggatcaactctctctataactgagcacctgataaaggcctcggcttgtgtttagaggccaggttgcatgagggaaaagtatctttaaacactaagatagcagagagtatagaatgctcacgccacaagaggtgttcggggactgagcagacacatgaaggaagggtggactcctgaccttcatctcaaattgactcccgggccttcgttcactggggggaatacaaggtggacttgtgttcttcatttaatttgctttttttcttttttttttaagttggaatctcgctctgttgcccaggatggagtgtagtggtgcgatcttggctcactgccacctccacctctcaaagtaaagtgattcttctaccttagcctcccgagtagctgggactacaggcacatgccaccacacatggctaatttttgtagttttaggggagatggggttttaccatattggtcaggctggtctcgaacttctgacctcaggtgatccacccgccttggcctccccaagtgctgggattacaggtgtgagccacagcgcccggcctgcatttttcttccttcagttgtttgtgtactgaatctatgtaaattaaatgcaagtggtgatgtgatgctgctgtaaaaccgacctgaacatgtaggtattgtgggcaaggacagcaacccagtaatgatacgtgaacaatggatgacgtacaggaagtttacaggacatttttagttgatagcttcctagacctaggtttacgtcctggttctcctcttgctagctgtctgatagcaggcaaattacctaactctatgcctcaattttcatatttgtaaattccaactcgtgtctttggtgaggatttaaataaggtaagtaagaatatctggcacttagtaaatattaggctggtgcaaaagtaactgtagcttttggcatgatggcaaaaccgcaattacttttgctcaaacctagtattcaataaatccctcttgcttctcctccatctctttatgtacggctacagcatctgggcatgataataacattaaaaggggcagttgttgccaaatgataaagagccttatagtaccagttgaaaaccagactccccaaaacaaaataacatgagttacgtaattataaatttcctagtagccacgctgagaaaagttgaaaaagatgaagctaattttaataacgtattttatttaacccaaatatatatataaaataatatttcaatatattcaatataaaagttgttaatgagatattttacatcctttgttttcattctaagtttttggaatccaagtgtattgtacacttaccacacatctcaattcaacggatttacatttcgaatgctcagtctcatatggctagtggctaccacactggacacatcagctgtagataagggagaaccactggaagatttaatcagcagcgtgggatgctttggtaagaggacgctgtcagcagtgcttgggatggattataggtgagaaacagtacaagcctaatgattggttaaaaaggtgctatcacaggttgggcgcagtggctcacgcctgtaattgcagcactttgggaggccgaggtgagcggatcacctgaggtcaggagttcaagaccagcctggcccacatggtgaaaccctgtctctactagaaaattacaaaaactagtcgggcatggtggcgggtgcctgtaatcccagctattcgggaggctgaggaaggagaatcacttgaacccgggaggtggaggttgcagtgagcccagatcacgccattgcataccagtctgagtgacagagcaagactccatcccaaaaaaaaaaaaaaaaaaaaaagttgctatcatgatctagtggaagctatccagggtctgagcaaggatggcatgaatggggacagcaaagacataggaaggggaaaagcactgtgaaatgagagttcacaggacttgactgacgtcatgaggaggatgaaaggagagaaaacagttgaggatgggggctattaggctagatataataaaataaaataattggtttatttctaaacataaaaactaattgttccccacatttgatagtatacagtttctagttagcttacttggttatataaacacactcttgattcctttcttacaaatgaaagagaaacaaaaataccatatactattaccgttactaaaaccctaagtagtctccaacttcccctcaaaaaaaacaaaaacaaaaacaaaaacaaaaaaatctggagaaagctgtaaaatactcatcaagaaatcattaaggctgggcgcagtggcgcatgcctgtaatcccaggactttgggaggccgaggcagacagatcacagggtcaggagatcgagaccatcctgcctaacacagtgaaaccccgtctctactaaaaatacaaaaaactagccgggcgtggtggcgggtgcctgcagtcccagctactcgggaggctgaggcaggagaatggcatgaacccgggagatagagcttgtagtgagctgagatggcgccactgcactccagcctgggcgacagagtgagagtctgtctcaaaaaaaaagagaattcattgaaactgtctactagtctggtagtttctccaaggcacagaccaagtctcatccacttctctctctccccactccctaaaaaggcagccatattacaggggcctctgtatgaaaccaggacaggtttgttgatctgaacaaaactacagaacaaccaaactgaacagttttctttttgcttttaatttttattttttccctatgttgctcaggctggtcttgaactcctgaccacaagcgatcctccctcctcgtcttcccaaaatgctgggattccaggcatgagccacagtactgagccagtctttttttttcccctttgcattatcatgtatagccatctttaaaactgtgatttaaaaaatgtc

SEQ ID NO: 1883370 - DNA, 4001 bp, Homo sapiens
acacctggataataaaatgataaataaccaaatttaaaatgggcaaaggatctgaatagacatttctctgaagaagttatggccaatacacacatgaagatgaccaacaccatgagccattaggaaaatggaaatcaaatgttataagataccactctatgagaacacatggaacacacggacacagggagggaacaacacacaccagggcctgtcggttgtgggggttggggagcaaggggatggagagcattaggacaaatacctaatgcatgtggggcttaaaacctagatgatgggttgatgggtgcagcaaaccaccatggcacatgtatacctatgtaacaaacctgcacattctgcacatgtatcccagaacttaaagaaaaatttaaaaaaagagataccattgtacctccactaggatggtatgattttttcagtggcaaataacaagtgttggcgaggatatggaagaaatctggaaccttcatatagtgctggtgggaatgtagaatggtgcagctggtttgggaaaaggtatggcaatttctcaaaatgttcaacgtggagttaccatgtgatctggcaatttatatatatacccaagaaaaatgaaaatgtacatccacacaaaaactcgaacagaaatgttcatagtagcattatccacaatagtaaaaaagtgaaacaacctaaatgtctgtcaactgataaatggataatcaaaatgtgatagagctatacaatgacatcgtttgttcataaagaggaacaaagtactgatgcatgctacaacatgagacagccttgataacattaagctgagtgaaagaagccagtcacaaagtcctcaaattgtatgattccatttatataaaatgtccagaattggcaaatctacatagagagaaaatagataagtggtcactggaagttgggggttggggaaagaagggaatgagtgctaataggtgtgggatttctttatggggtgatgaaaatcagttctaaaattggctatggtaatagtttgtacaactaactgcatatgcaaaaaatattaaattgcatattttgagtgaatagtatgatgtgtgaattatacctcagcaaaactgttttttttttaacagtagagatcattaaagaaaaatcacatcaataaagaaaagtagataaagtggactttaaaatcacctctctctctgaggaatcccaccccaagcaccttcctaactgcttcctatgcacagaatctgtccagactacaggtgacgaaccgatgaccaggggaccacttgtggcctacaaattcttattttcttggcttatagagaaatatttaaaaaatatttaaaattttttaaaatatttaaaaaataagttactaatatttttaaattagaagagttcacattaaacgtgaacttctggcttctcttgggggcagggggaaccaaaccaaaataaaataaaataccccgacttgatggccacactggaccctcttttcccacgtagaaaaatgaggctgcctttttcagggccattgtgcccttctcagtttgtccctgtataaccacttaagttacttctttgtcacctgcttttatccttcagggacatttgagtttgcaacacctgtgcagaccttttgctgtatcaacgggacgttcccttaggccctgcttgatgattggctaatcctatggtggtttccaaccctggccacacatcagagtctcctggggcccatgtgaaaaaaatacccatacaaagctggacacccctgaaccccggattttttttttttttaacaattagattagattctctcggggtcgggcctagtattaagaaaaaagaaaaaaccaaaaaccaaaaaatccaactttccaatgcaaatttttgcttgcattggattagcagattagtccagcatttctcctcctgtgtgtccaggaagggaaatgctgggctaacctgctaacccaatgcaagcaaaggttttagtatttgatgatggtttaacagcctcctagataatttttgttttacaattgaaggcaaccggtagagctaggaaagggtgcttttgattagatgaaacttttacttggtgtttaaatcagagttggcagctgtctggacctcaatgtaactgtcctttctataaccagtcatgttaaaagattttgcaaacattacaacgaggaaggccaggtcacggtgcctttgcagccttgttatttttaagcagcaactttttaaattgatgaatttgagttgctcttgagaccttctgcgggttctggaaatgtcaccagggttgacaagcacaaggagttagttacagtggctttttgagaggccatgagtggacgacacagcaagacaggaaacaggtgctggcagccagcaggtactcgataaatattgggtgaatgaattgacaagacattttgcttctcattatctccacacgagatgaaaaatttgaggggaggaaggaggggcaggagaggggccccttagatgtcttcctccggattttttgttaagcttttcctagacagtttacagaaggctttgggtagagaaagcactagttagacaaaagcagcccccctcccaccttgtgggcatgaagagtccagaggacaccacctgagaagcttttcaactgccttccaaggctcccttgaacttcactgcggtagagcagggaccccagaccccccctcaaatcgaagcttggaaggaggtgctctaggctgaatctgacctcccaggacccgaggaggcaagcagatggcaccccttggaaagtagcagtgcaggctggctagaggcctgggcggtgagctaggactatggggcaccgtggggacacgcccggaggctgcaccagggcaagcgggggagggggggggcgtccactgcacctgcaaatcccgcgcctcatcttggcccccctgcaaccccgcggtgaagcccacgccggagaggctgcctgcggggctgcagtggagagggggtctgcggccgcgaggagggaggcggcgagccaggctggggaggggggcgcggctggcgacggtgctgtccagggggaggcgggcggagggaaggcgctgccgctgctgccgccgcctcgcccgaagcgacacagacgctgggagcggccgaggcggtgagtcgcagcgccttccctccgcttctcgggagccagagcggagtcggagttgcagccggggcgggtgtgccgggggcggctgctgggggggacccgtgcgctcggtgcgccgcgggcgcaggggtgggttcgaggagcgcgcggttctgggaacctggttccagcagctccctcctgggtgcagttcaccctgtcaattcctctgtcattcccccagtgcctctgagggaaaacaaaacaaaattacagaccttgagggtgggcggcagaaaaggagagagcaactttgcagagggccgcgcagaggcgcgtggggccggcgggatggggcgcgctgggcagaagggggcgttggtgagcctggcggcccggggacctctggagcatcccgccccgggggccggggccggggccgggggccggggcacccgctggatcccgggcctgcggagtctgcccggaaaggccacaggaggcgagtgcggggcgtgggcgtctggggagggggccaagggagaggccgaaaggcgctggttgaacacggacgaggaagtggtctgcattttggactcaggacctgaaagattcgtgtcccttgcgctcgaggacttgggaagggtgtgctggggagatgtgtttgagtgtttttcagtgcataccgatttatttttagctcccagagaagcaggatgtgcaaagtgggttgtatcagcccgggaggggcaggaggtctccctgtccgcaggaaatacacaagttttttttttttttttctaatgctgcagatgcttgctttaacttt

SEQ ID NO: 1883371 - DNA, 4001 bp, Homo sapiens
atttaatattagtacttcataaactgctaaactgacaactaagttgcacaaaaaaatcaaagaggtggcagccaggattgtaaaagttgcctaaaggtcagccagaggcagccattgctgacttggagtggctgtagcattctgaaagaatcctgtacttcaaacaccctttcttacctgcttgctgagtggtttccatgcaacgtatttgaaaagattcaagaaatttatgcacaaaaaaggaaaaagaatccactgcatcttttcctcagttttagttccaggtcttcctctaacaagatgtgtgatgttgggcaaatcatgtaacttccctgaccctcagttctcataaaaattgtagttttgactaaatgattgtaactctcctagttctagtgtctagttgtctctctcttatttaaattggaagttggtatagagaattagaagaaaacttcaaagtactataataaataaaagatataggaatccccagaactcacaataaattctaataccattatcataaagatgataccaaaagtattgtttcttataatgtgtatattctctccttttatcataattactaaaaatattgtattatagatccttagcccattacttccagcaatacactgtatataatttcccagataatgtgcaaagtgttttttcaccctttttccagaagcatggcgataaatgtaattaatacaaaatgttttaaaacaaataacttttaaaaaaaattactttaggccaggtgcaatggctcacgcctgtaatcccagcactttgggaggccaaggtgggcagatcacgaggtcaggagatggagaccatcctggctaacatggtgaaccccatctctattaaaaatacaaaatattagccaggcgtggtggtgcacacctgtagtcccagctacttgggagtctgaggcaggagaattgcttaaacccgggaggcagcggttgcagtgagccaagattgcaccactgcactccagcctgggtgacagagcaagagtccacgtcaaaaaaaaaaaaaattacttttactacaagcaaaccctgaagcatcctggacagtcttgacctgtgagataccctcttacttccacagtcatggaaactatgcattttccagatggcatataagacccgatacctatgtttttctagaatccctttgcagtggacttttcttcttcctaaggcccatggtgcgtgcatggtctctaatgaacagatggcacttggtccctggatgagctcttgtacctgcaaatcttgagagcttggagacaagcaagaaaatcatttcagaccctctcctccactgtcagcaccacttccccacccctttcaccttgatctgcttggttttgtgtttttgggaaaacccactagttattggtcactacctgctcacaagtcaatgtaatgctccccgtcttgtttccatcttggttttcctttgtttaagaggatgaagccacttaggacccctatatgaatgagacttgtttggttgaaagttgacccaaagtaataagtggtttattgtaaagaggaaagaggtctataaatagaaaaccctgggggactgaggctggcctcaggaccagggaatagcagaacacaagtgtgcaagtcagagaactagccaagagtttataatcaagcttctaaacaggaagtctcaattcaacttcaaaaattactttataaagaattcaagtgccatgaaggcatgttttaacttggcttctttggctcagaatagtgtatattggtatctctagtggctatccccttcccattgttaaaaacaacatgtgaaaaatcctacaaaataggtaaaacacattttaaagtgccattgactgctgaggcaactcacttaatatcaacaagtctcagtttttggaagaggtattgccaccctttctagtctaatagggactagaaagggtggcaatactcttcaaaaacttcacaaggaagttgtaaggaatatatgagatcatctatataaagccctttgtgaacaataaatcacgataaacatagacttgttgcatctatcatatcacttagggttttttttttttctctcacagattaaggtagttcaaaaaggaagccagaattttcactttctctttatttctgctcccaaagaaccgtcaattgcttaagggattgctcccaaagagcctggaggtagaggacaggaggaggcagttgtttatttagttttttgaaatgtttccaaggagaatgaaaactaaaatttgtgtgtgtcctttttcatttgccttctgtctaaattggagtgtggacaaagggcagccgctttgctagatgtggacatttgctgagcagtatactgtgctccagttgcaggtggatagtgcctagcactcctcattagctcatggttctgcatcacattcttcaaagagctgctaaagcacccacacaccacctgcctgagggtgcagccagggctgagtgacatagtgtgtgcctctcctgcaggtgcattaataaggagccacaggggttataagaggcagagggctgagaagatgtttcctacaaatggatccgaaacacagcctgtttgtatatgtgcaattcattggcttcttggaaacaatcctttgcccaaagtaacagtttataatcgtgaaaatgtgactaaactttaaaagtacatgaggaaaaggactatttctattttgccgagtccaagttggatttgactttggcctttccatatcccaaatggtatccactgttttcagcattttggccctgagaacagctggtgaagaaattgattgagctcagaacaatccttcagatgtctagaataatcaaccaccttccataatttcagtcttactaactacgtgatatggagtgcacagaaatctgattgacaactcaattagtccaaattccagtttgctgccatccacacatccacaatgtgcacacaaaggtcagctagtttatagaagagaagaagaaatgggagatttataatcgaaggattaaagtcgatcactaatgatcactatttaaacaaggacctgctgttacttgttaaacaaggaaagatttggaggcttccatttgttaatgtcattcaaacatctgctgtacacattctaccaatgggctatgagccacagaacccaattgtgactgctgggaacagtcaatggggctcagtaaactgccttgaggaaatggtctgccacaaacatctgtagttattcttcagctgaaaggccaatatttccagggcagctgggtccctctaagtcagtgattcatagcttcagctgcaccctgcaatcacctaggagctttaaaaagtactgatgttcatctcatccccaagaccccaggaacttccatttaattgttctggggtgtgaccaggcacacaggtgattctgattttcagtctggtttgagaattcttggtccaaacagacaggacttggtagctggaagatgtaaccaccaagcctcccatataatttaattagcacggcaaatttgggctcatttgttctgctggattcaggcacttcactgggcagtggaaaatttctcaccaattcactgcccttttgcctccagctcaccgttactttttaaacatcttatttccttttgttattttcagtaaccttctgtaattgcaaaggctttttaaaaaatgtctttttgggggcacttcagcatattcaatttggtttccttcatattttagtttggcttcattgatatttattttttgtattctagctgtttcttggatggttcttatttttctactagattcatgttatttgcaaacactatgcacagaatcacttctggtgagaaaagggacaagaagaataaagtactcttattttccccatgaccccacaccccacagagtcactgaggctcccttttgtagatact

SEQ ID NO: 1883372 - DNA, 4001 bp, Homo sapiens
tattcttcttgtcccttttctcaccagaagtgattctgtgcatagtgtttgcaaataacatgaatctagtagaaaaataagaaccatccaagaaacagctagaatacaaaaaataaatatcaatgaagccaaactaaaatatgaaggaaaccaaattgaatatgctgaagtgcccccaaaaagacattttttaaaaagcctttgcaattacagaaggttactgaaaataacaaaaggaaataagatgtttaaaaagtaacggtgagctggaggcaaaagggcagtgaattggtgagaaattttccactgcccagtgaagtgcctgaatccagcagaacaaatgagcccaaatttgccgtgctaattaaattatatgggaggcttggtggttacatcttccagctaccaagtcctgtctgtttggaccaagaattctcaaaccagactgaaaatcagaatcacctgtgtgcctggtcacaccccagaacaattaaatggaagttcctggggtcttggggatgagatgaacatcagtactttttaaagctcctaggtgattgcagggtgcagctgaagctatgaatcactgacttagagggacccagctgccctggaaatattggcctttcagctgaagaataactacagatgtttgtggcagaccatttcctcaaggcagtttactgagccccattgactgttcccagcagtcacaattgggttctgtggctcatagcccattggtagaatgtgtacagcagatgtttgaatgacattaacaaatggaagcctccaaatctttccttgtttaacaagtaacagcaggtccttgtttaaatagtgatcattagtgatcgactttaatccttcgattataaatctcccatttcttcttctcttctataaactagctgacctttgtgtgcacattgtggatgtgtggatggcagcaaactggaatttggactaattgagttgtcaatcagatttctgtgcactccatatcacgtagttagtaagactgaaattatggaaggtggttgattattctagacatctgaaggattgttctgagctcaatcaatttcttcaccagctgttctcagggccaaaatgctgaaaacagtggataccatttgggatatggaaaggccaaagtcaaatccaacttggactcggcaaaatagaaatagtccttttcctcatgtacttttaaagtttagtcacattttcacgattataaactgttactttgggcaaaggattgtttccaagaagccaatgaattgcacatatacaaacaggctgtgtttcggatccatttgtaggaaacatcttctcagccctctgcctcttataacccctgtggctccttattaatgcacctgcaggagaggcacacactatgtcactcagccctggctgcaccctcaggcaggtggtgtgtgggtgctttagcagctctttgaagaatgtgatgcagaaccatgagctaatgaggagtgctaggcactatccacctgcaactggagcacagtatactgctcagcaaatgtccacatctagcaaagcggctgccctttgtccacactccaatttagacagaaggcaaatgaaaaaggacacacacaaattttagttttcattctccttggaaacatttcaaaaaactaaataaacaactgcctcctcctgtcctctacctccaggctctttgggagcaatcccttaagcaattgacggttctttgggagcagaaataaagagaaagtgaaaattctggcttcctttttgaactaccttaatctgtgagagaaaaaaaaaaaaccctaagtgatatgatagatgcaacaagtctatgtttatcgtgatttattgttcacaaagggctttatatagatgatctcatatattccttacaacttccttgtgaagtttttgaagagtattgccaccctttctagtccctattagactagaaagggtggcaatacctcttccaaaaactgagacttgttgatattaagtgagttgcctcagcagtcaatggcactttaaaatgtgttttacctattttgtaggatttttcacatgttgtttttaacaatgggaaggggatagccactagagataccaatatacactattctgagccaaagaagccaagttaaaacatgccttcatggcacttgaattctttataaagtaatttttgaagttgaattgagacttcctgtttagaagcttgattataaactcttggctagttctctgacttgcacacttgtgttctgctattccctggtcctgaggccagcctcagtcccccagggttttctatttatagacctctttcctctttacaataaaccacttattactttgggtcaactttcaaccaaacaagtctcattcatataggggtcctaagtggcttcatcctcttaaacaaaggaaaaccaagatggaaacaagacggggagcattacattgacttgtgagcaggtagtgaccaataactagtgggttttcccaaaaacacaaaaccaagcagatcaaggtgaaaggggtggggaagtggtgctgacagtggaggagagggtctgaaatgattttcttgcttgtctccaagctctcaagatttgcaggtacaagagctcatccagggaccaagtgccatctgttcattagagaccatgcacgcaccatgggccttaggaagaagaaaagtccactgcaaagggattctagaaaaacataggtatcgggtcttatatgccatctggaaaatgcatagtttccatgactgtggaagtaagagggtatctcacaggtcaagactgtccaggatgcttcagggtttgcttgtagtaaaagtaattttttttttttttgacgtggactcttgctctgtcacccaggctggagtgcagtggtgcaatcttggctcactgcaaccgctgcctcccgggtttaagcaattctcctgcctcagactcccaagtagctgggactacaggtgtgcaccaccacgcctggctaatattttgtatttttaatagagatggggttcaccatgttagccaggatggtctccatctcctgacctcgtgatctgcccaccttggcctcccaaagtgctgggattacaggcgtgagccattgcacctggcctaaagtaattttttttaaaagttatttgttttaaaacattttgtattaattacatttatcgccatgcttctggaaaaagggtgaaaaaacactttgcacattatctgggaaattatatacagtgtattgctggaagtaatgggctaaggatctataatacaatatttttagtaattatgataaaaggagagaatatacacattataagaaacaatacttttggtatcatctttatgataatggtattagaatttattgtgagttctggggattcctatatcttttatttattatagtactttgaagttttcttctaattctctataccaacttccaatttaaataagagagagacaactagacactagaactaggagagttacaatcatttagtcaaaactacaatttttatgagaactgagggtcagggaagttacatgatttgcccaacatcacacatcttgttagaggaagacctggaactaaaactgaggaaaagatgcagtggattctttttccttttttgtgcataaatttcttgaatcttttcaaatacgttgcatggaaaccactcagcaagcaggtaagaaagggtgtttgaagtacaggattctttcagaatgctacagccactccaagtcagcaatggctgcctctggctgacctttaggcaacttttacaatcctggctgccacctctttgatttttttgtgcaacttagttgtcagtttagcagtttatgaagtactaatattaaatcactcttttttttccagtaaaagtaaaacaaaatataaggatttaagaattctatttacctatgtgt

SEQ ID NO: 1883373 - DNA, 4001 bp, Homo sapiens
actgcaggcacccacatctggacaaggggaacactgtggcacccagaagcttggagatgccaggaaccacagagctccaaagagggtgtcacagccctggcttaggcaccctttaggtctggactccccaaatagctgtagctcttcttgtcacccacaatgtggtgagttggggtgcaaggggggtatgtgtttcagccctgtttgtgttatagttctttcagtttcaccatttagcaagtcctgagttctttccctgcatccaggaagaatgaggtggacagacaactggaaggtgagcaaggcagagaggagcttcactgagtgatagaacagctctcaggagacccaaagtgggtagctcctttctgcaggcaggtcttcctgatttgagtgtccagctttcagtggagagaagaccctcagtgggtagctcttttccacaggcaggtcatcccatagagtgtccagttctcagcagagaagagacctgaagtgggtagctgttttccacaagcaggtcatccagaagagtcaaggagactcacaatgggtagctccttcctgcagctggtagtcctgagggtctgtttgagtcttactgactctagggtttttatgggctcaggaggggaagtgtgtgctgatcggtccatgggcggccatgggtgggctggggaaaaagctccatatgtactcactccaggcagtggactccagctggaactggcagctcaggccccaggcttcaggccatccctggcttgaaggtgaggtttcaccaggacccacccttttccatcctgccaccatcaacatgccatccacagcaaccaggctgttcctaccaagaggcaccggcaggcttgtgccaaaccgccctcagggcccccttggcctcccgcccctgcttgttggtgcccaaaattcaaagggggtcaaggtggtgggactggtgtgtcagcaccacccctagcacgcacacatccagccaggttgagatagcacccgggttcagcctcaactttgctccagaattggagcaggtgtcaggagaggggagaagcaggagcaggcacttctgagcctgtggggccagggggggcttccaggagtgcaggcatgcccaggtctggagccatagctgggtggctgcaactgcatccatgagtgtggggctcctgccctgccaactcagtagggggtggggctcccacctgttccctcccctattggatccactgtgtagtagtgtgtaaacctacggtgatattaaaagttatatctccctagggtattgcgaataacatcacagtgggtgtacaaccactctgatattcgaagtaatacctccctaagatatgacaaaaaatatcaaagcgtggacccagtcgtggcatcaaaagtaacgtctctgtggatattccgaataatatcacagggtgtacacagcctgtgacattaggagtagcatccccataagatattccgagtaatatcacagggtgtacaccccatgtgacattaagggtaacatcttaggatgttacaaacaacatcacagggtgtataccccctgtgactttttaagtaacatccccctagaatattacgaagaatatcatgggtgtacaccccgtgtgacattaggagtaacatctccctaggatattacgaagaataccactgggtgtacgccctctgtcatattaggagtgacatccttctaggacattatggataatatcacaaggtgtacacacactgtgatattcggagagatatctccctaggatagaaggtatcatatcacagaatgtacgtgcatggtgtacacctactgtgatattagaagcaatatctccctatgaaagtatgagaaataccaaagggagtacacactctgtgctattagatgtcatgtttaccatggatattacaaataatatcacagggtgtacacacatgaggtacacccactgtggtattatttgtactgtcttagagagatataactctctaatataacagagagagttataactctgtaatatctctgagatattacaaataatatcacagtgagtgtaaacacagtgtacatagtgtacacccactgtgagatttacagtaatatctccctataagactacaaatattatcgaagggtgtacaccccctgtgaccgcaggagtaacatccttctggatattgggaatgatatcataagccatacccaccctgtgacattttgtacaccctttgtgacatgaaaagtcacaccccctggtatattacgaataatatcaaaggcagttgacgcacacggtgtacacatcctgttgcattaggcataatctttttctgtgatttccgaataatatcacagaaggtgtacacacattgtgtacactccaggtgacattaggaggaacatctcctcaagctgttagaaataatattaccagcgttgcatacacatggtgtaccctccctgtgacattagcagcaacattcccctagaatattacgaataacatcagagggggagtacacacatcatgtacgcaccttgtgaaattaggagtagcatctccctacgatgttatgagtaatatcacagaatgtgtactcatatggcatataccccatatgatgttaggagttacatccttctagtatgttaggaagaatatcacaaaggtgttcacacatggttaatagcatatggaatattaggattaacatcccttgagatcattacaaataacatcataagggctgtgcacacatggtgcacatgccctgtgacgttaggagtgcatttccctgacacattatgagaaatatcacagagtgtacaccttctgtgacatttggagtaatgtcccctagggtagtacgaataatatcccagggtgtgcatcccctgtgacctgaggagtaacgtctttctaggatattgtgaataatatcactaaacgcacagcccctgtggcacaaggagtaacatccacctaggatattaggaataatatcacagggagtacacctcatgtgacagtaggagtaacctcgcccgaggatataacgaacaaatacagaggatgtacacgtgtggtgacatcagcagtaacatccatttaggatattacgaatattatcacagtgtgaacaccacctgtgacattaggagtaacatctccctgggatattaagaataatgtcactgggggcacaccctctgtgatattagcagcaacatctttctaggagattacgaatgatatcacagggtgtcaactcactttgatattagaaggactgtctccctaggatataagctatctcatgtcacagagtgtacacacatggtgtacacccactgtgttattagcagcaatatctccctatgatattatgaaaactatcacagggtgtaccctctgtggattactagaagtaatgtttaccatggatattacaaataatatcacagggtgtacacacatggggtacacccactgtgatattaggagtgatatctctcgaagatattacaaataatatgccagtgggtgtaccccatgtgtgtacacccactgtgatatttaaagtaatatctctctataagactacaaataacatcgaagggtgtacaccccctgtgacactaggagtaacatccccctacaatacttggaacaatatcacacggtgtacacccctgtaacgttaggagtaacatcccccctgaatattactaataatatcacaaggtgtacaggcattgtgacattagtcataatatcctgctagcatattttcaataatatcacagaaggagcacacctgtgacattaagagtaacatccccctagaatagtaagaataatatcacagggggtacaccccctgtgacattaggggaatcatctcgctagaacatgatgaagaatgtcacagggtgttatcctctgtgccaataggagtatagaccc

SEQ ID NO: 1883374 - DNA, 4001 bp, Homo sapiens
cttccactgcaggcacccacatctggacaaggggaacactgtggcacccagaagcttggagatgccaggaaccacagagctccaaagagggtgtcacagccctggcttaggcaccctttaggtctggactccccaaatagctgtagctcttcttgtcacccacaatgtggtgagttggggtgcaaggggggtatgtgtttcagccctgtttgtgttatagttctttcagtttcaccatttagcaagtcctgagttctttccctgcatccaggaagaatgaggtggacagacaactggaaggtgagcaaggcagagaggagcttcactgagtgatagaacagctctcaggagacccaaagtgggtagctcctttctgcaggcaggtcttcctgatttgagtgtccagctttcagtggagagaagaccctcagtgggtagctcttttccacaggcaggtcatcccatagagtgtccagttctcagcagagaagagacctgaagtgggtagctgttttccacaagcaggtcatccagaagagtcaaggagactcacaatgggtagctccttcctgcagctggtagtcctgagggtctgtttgagtcttactgactctagggtttttatgggctcaggaggggaagtgtgtgctgatcggtccatgggcggccatgggtgggctggggaaaaagctccatatgtactcactccaggcagtggactccagctggaactggcagctcaggccccaggcttcaggccatccctggcttgaaggtgaggtttcaccaggacccacccttttccatcctgccaccatcaacatgccatccacagcaaccaggctgttcctaccaagaggcaccggcaggcttgtgccaaaccgccctcagggcccccttggcctcccgcccctgcttgttggtgcccaaaattcaaagggggtcaaggtggtgggactggtgtgtcagcaccacccctagcacgcacacatccagccaggttgagatagcacccgggttcagcctcaactttgctccagaattggagcaggtgtcaggagaggggagaagcaggagcaggcacttctgagcctgtggggccagggggggcttccaggagtgcaggcatgcccaggtctggagccatagctgggtggctgcaactgcatccatgagtgtggggctcctgccctgccaactcagtagggggtggggctcccacctgttccctcccctattggatccactgtgtagtagtgtgtaaacctacggtgatattaaaagttatatctccctagggtattgcgaataacatcacagtgggtgtacaaccactctgatattcgaagtaatacctccctaagatatgacaaaaaatatcaaagcgtggacccagtcgtggcatcaaaagtaacgtctctgtggatattccgaataatatcacagggtgtacacagcctgtgacattaggagtagcatccccataagatattccgagtaatatcacagggtgtacaccccatgtgacattaagggtaacatcttaggatgttacaaacaacatcacagggtgtataccccctgtgactttttaagtaacatccccctagaatattacgaagaatatcatgggtgtacaccccgtgtgacattaggagtaacatctccctaggatattacgaagaataccactgggtgtacgccctctgtcatattaggagtgacatccttctaggacattatggataatatcacaaggtgtacacacactgtgatattcggagagatatctccctaggatagaaggtatcatatcacagaatgtacgtgcatggtgtacacctactgtgatattagaagcaatatctccctatgaaagtatgagaaataccaaagggagtacacactctgtgctattagatgtcatgtttaccatggatattacaaataatatcacagggtgtacacacatgaggtacacccactgtggtattatttgtactgtcttagagagatataactctctaatataacagagagagttataactctgtaatatctctgagatattacaaataatatcacagtgagtgtaaacacagtgtacatagtgtacacccactgtgagatttacagtaatatctccctataagactacaaatattatcgaagggtgtacaccccctgtgaccgcaggagtaacatccttctggatattgggaatgatatcataagccatacccaccctgtgacattttgtacaccctttgtgacatgaaaagtcacaccccctggtatattacgaataatatcaaaggcagttgacgcacacggtgtacacatcctgttgcattaggcataatctttttctgtgatttccgaataatatcacagaaggtgtacacacattgtgtacactccaggtgacattaggaggaacatctcctcaagctgttagaaataatattaccagcgttgcatacacatggtgtaccctccctgtgacattagcagcaacattcccctagaatattacgaataacatcagagggggagtacacacatcatgtacgcaccttgtgaaattaggagtagcatctccctacgatgttatgagtaatatcacagaatgtgtactcatatggcatataccccatatgatgttaggagttacatccttctagtatgttaggaagaatatcacaaaggtgttcacacatggttaatagcatatggaatattaggattaacatcccttgagatcattacaaataacatcataagggctgtgcacacatggtgcacatgccctgtgacgttaggagtgcatttccctgacacattatgagaaatatcacagagtgtacaccttctgtgacatttggagtaatgtcccctagggtagtacgaataatatcccagggtgtgcatcccctgtgacctgaggagtaacgtctttctaggatattgtgaataatatcactaaacgcacagcccctgtggcacaaggagtaacatccacctaggatattaggaataatatcacagggagtacacctcatgtgacagtaggagtaacctcgcccgaggatataacgaacaaatacagaggatgtacacgtgtggtgacatcagcagtaacatccatttaggatattacgaatattatcacagtgtgaacaccacctgtgacattaggagtaacatctccctgggatattaagaataatgtcactgggggcacaccctctgtgatattagcagcaacatctttctaggagattacgaatgatatcacagggtgtcaactcactttgatattagaaggactgtctccctaggatataagctatctcatgtcacagagtgtacacacatggtgtacacccactgtgttattagcagcaatatctccctatgatattatgaaaactatcacagggtgtaccctctgtggattactagaagtaatgtttaccatggatattacaaataatatcacagggtgtacacacatggggtacacccactgtgatattaggagtgatatctctcgaagatattacaaataatatgccagtgggtgtaccccatgtgtgtacacccactgtgatatttaaagtaatatctctctataagactacaaataacatcgaagggtgtacaccccctgtgacactaggagtaacatccccctacaatacttggaacaatatcacacggtgtacacccctgtaacgttaggagtaacatcccccctgaatattactaataatatcacaaggtgtacaggcattgtgacattagtcataatatcctgctagcatattttcaataatatcacagaaggagcacacctgtgacattaagagtaacatccccctagaatagtaagaataatatcacagggggtacaccccctgtgacattaggggaatcatctcgctagaacatgatgaagaatgtcacagggtgttatcctctgtgccaataggagtata

SEQ ID NO: 1883375 - DNA, 4001 bp, Homo sapiens
agactggtctcgaactcctgaccttgtgatctgcctacttcggcttcccaaagtgctgggattacaggtgtgagccacggcgcccaacctaccatctgaatttctatagggaaggcatatttttaaaatcttgtctttgctcttgcctttcactgtgattttaaaactgtatttctaatgaagtgatgttaatttcagctcaggcaaatagttgtccccagcctgttaaaaatggaaacacttctactagtttccttcttatcataaattatgaggtgacacagacaggggtgaaatcagatcagtgtgacccaagacagccagggaaagaatcaaatcgtttttaaatggaatagaaaataagttgggaatcttgatttcaaggctgtaggagtaaggaatgcagcacaaaaattcaatgaaaataatttagatcataaagttttggttggaagtaggcagaaaactagatataaatgagtgattcttataggcatagctaaaggttataatgttttatagtacagaaaaaaggtagccagggagctaaaggaggatgctttctatgcagatttggagagagagcacattactttatcatcaatcatagtatctctgcctcctaatgactagtattttggtggaaattcacaggcaagcaaagctgacaaagagtttgggatcctgaattataaataaagatagcaggtgccaaatccaaatatgtatagtgccagtacatgaaaaaaaaatcaaaatataatttgaagaattccaagttccaaaagaaagggctatataatatatatgtatattatatatatacacatatatatttatatttattttagagatgggatcttgctatgttgcccaggctgacattgaacttctgaattctagggatcctcctgcctcagcctcccaagtagctgggactacagttacctgccaccatgcctgtccagaaagatatgttttctaagaagaaaatagaaaattacaacaggcacaggaaaatagaaaatggaaaaaaatctgtaactgaaaaagcagagaaatttggggggaaagctaatcattaaaataaaaagagtaatttttatatacacatattcaaacttaaagaacgattttcagggcccagcttggtggctcacgcctgtaatcccagcactttgggaggccaaggcgggcagatcacctgaggtcaggagttcgagaccagcctggccaacatggcaaaatcacatctctactaaaaatacaaaattagctgggtgcggtggcaggcgcttgtaatcccagctactcaggaggcggaggcaggggaatcgcttgagcctgggaggcagaggttgcagtgagctgagatcgcaccactgcactccagcctgggcaactctgtctcaagaaaaaaaaaaagaatgattttcagaaatcaaatctaagtcctgtcaagtgttttcaggtttgttggaaaggatatacaggtataagacaaccttattcaccaagaatgggttacagtctctgtttttcattctttccagccaagtccctatgcccactaccctcacaataagtgtgatccttggaagggatcctgcaatcttgtggacatttattttttgttgttgttgttgttgtttgtttgtttgtttgtttgtttgttttgagacagagtctcgctgttgccaaggctggataaaagtggtgagatcttggttcactgcaacctctgcctcccaggttcaagcgattctaatgcctcagctgggattacaggcatgtgccaccacacccagctaatttttgtatttttagtagaggcggggcttcaccatgttggctaggctggtctccaactcctgacctcaagtgatctgcccacttcggcctcccaaagtgctgggattacaggcatgagccactgtgcctggccaagatttgttgtttaatgttgacttttggtcaggcacagtcgctcatgtctgtaataccagcactttgggaaggtgaggtggtaggactgcttgaggcagagaattagagaccagcctgggcaatatagtgagacttcatctccacaaatatttttaaaaactagctagccctggtggtgcacacctttggtcccagctgctcaggaggctgtgatgggaggatcacttgtgcctgggaggttgaggctgcaatgggccatgatcagcctgggcaacaaaagtgagaccctgtctcaaaacaaacaaacaaacaaaaagcaacttgatttttaatgccagattatttctttttctctccagtgttctgctgtatttcctccctacccttgactgaagcttcccttgaatcacaatattcttgtcattgagactctctctcagcctgcagccgtggtagaagaaaaaagggaagagaacccgaaggcatttgagacatctccttgtcggtctctccaacaacagtggctagagactctctgtattccctgactctcaatcctgagcggaggacagagcccagagcagagtcctgggaagcacaggggctggctgaagggaaaggcggacgcgcggggccgcagggcggcgcctgggagccaggcagcaccctgggccgatgcgcggagtgctggagggcggcgctgcggagcacgcctctgtggaaggcacgcctctgtggctggaaccaaaagggaggtggatggcgttcaactttgacagaagccgaggactgcaaagagacggcctggtagaaccacaaccctgatgctgtctcgacctgggcacagttaataatcagggcaggttaataggtagtcacccggacactgataggtttcctgccgaatgttgaaagactgcgaagaagcctccctggggacagtgaccaaactctcctttgaaggcaaatttccattctcttgggaaaacacagccttgcaatccagggacatttttggaaggcagcttggtgatcttttgctgttacagattaggtttgcccccatgagagtatcacccccaccaccacatctcaaagcagcttatcaaagaattccctccaatgcttccagctctttctctgaaagcagttctggtaaactcagttttcattttctcattatgtttgcagtgctattttagtgtcccactcactaaccgagctctgacaaagaggaacgagaaggtgtgaactcagggctgcctcctaggatgactgggactgtgcgccacacaggacacgcggccctggtgggctcccagccccgcgggcccgcagctgctcagcagcctgtgcacccctggggctgtgggcacctaaagaagagagcctaggctccagatggaagcttgctggtcaaaaaagtcaaaagtggccggcgtggtggctcatgctgtaatctcagaactttgggaggccgagttgggcagatagcttgaggtcaggagaccagcctggccaacatggcaaaaccccgtctctactaaaaatacaaaaattagccaggcgtggtggcgctgcctgtactgtggtccctgctactcaggaggctggggcaggagaattacttgaacccgggaggtcgaggttgcagtgagccgagattgtgacattgcactccagcctaggcgacagactgaggctctgtctcaaaaaaaaaaaaaaaaaaaagtgtgatgctctttccggagctgggatcacctaaatttgcagattaaagatctgaaaacttgaaaatagaaaatagtgacccatactctctcattttcctaagactttccgatctccaatggaaggccggagaaaggagggctacagaggaggaaaaccacttcttacctgtgtggggtaaatgtgcctttctgctgctcctgaaaatagggtcaggtgctcactgaagtttactgctgcatgtataggcaaatccagttgcagttttctcaaacaattcttgtcttgggaattgcttccttgggagaaaacccactggtgga

SEQ ID NO: 1883376 - DNA, 4001 bp, Homo sapiens
ggataatctataccctagttaggacattcagaaaggaaaaaaatggcaaagacagcctgcctggttctaggcctcgcctctactccagagacgtctccatgccccacgcggagcgggtgcgtgaggtcagctctagcagggcctaaaggcctgggctctatcatcaaataggcccgggggcttctgcctcttttaccactatatggatgaacatgggcgtcattcaatgtcctgggcctcagtctcctcactgaaaacaagagcaaaacctacttaggcagcatgaagactcaacactttcatgtgcagagaccggtgtcagggcacctgaccccatggacatctcgggggagcctgaggcactgtccgaagatggaagcttgtatccactcctgggcacagttcctgggttcacatcccaggcacttcccttaccagctgtgctatctgcattgctgtgcctcagtttcctgcaaagaattggaaagacattcgcacctactgtgcgggtcagttttatatgtcaccttgaccaggtgacagtccccggtaattcattcaacatgggtccagatgtggctgtggaggtgttctgttggtgtgcaaaagacccatcacagtggactttaaatgaggaagactatgttagacaatccgggtgggcccgattcagcactggaaaggctttccagagaagaaattccgctgtgggcggtagcttcagctctgccccaggtccagcctgcccttcccacggcctgcctgcctggacctcgctcccaggcccccatcgtggtgccggatccaggctctaaatctctccaggtctgcctcctactggctgaaccttggctgaggccacttgtaggatggcgccattgaaagggagatggcatgcacacatctcagaactactccactccgcaggcggggagcgagacactgagcccggggacggcgaacaaccctggatgtgagacctcagacaagtccctgaccgtactgagcctgctatctcgtggatacagggttagtcaccagtccctggctctggagcggcggtgaagatgaaggcatcctgggtgcacctggcgctctgcctggcccacagcgcacgtggggcagacctcaggccgcagtcacggggctgctcaggtgctgcgatgggagaagagccaggaagtgagtctccacccagtgccgctcagtcacgggacccaggtacagcctggcagaggacagacggcgctccagggagaccctggggcagcgtggggctggggtggggctgtcacacggcagaggccctgggcaagtgcggaggccacacgaacatggggtgcagggggtacatggaaatcagaggcccccttcaggcctctcagcctcccagcctcgagccatgagttctgtctgggctcacgcaaccccagacgtggctgaagaggctggagtgtcgacgagcgctgggaagaagctgccgacctcactgctccgcgccctgccttcccctccctcctgccgtccccagtcaccccgaggcatcacccggccgggctccctggggcaacacatccgagagcccccagcaggccacacccctcccagcgcctgtccccacagggggctcgggacttacagggaacagtacagcctgggggccatcgcagatgccctccaggaaagcaggatgctctgcagataggacggctgtggccgctgccccaggaaacagcccaggacgctgcctgagctcagagggttccggacacagaccgcgctccccgctttgcaaaccacacccagtccatttcctagtgtgagtttgtctctactcatcggtttgtgtctttataagagttctaaagtaaaacaaaaacacacaaggacagtgacctagacagcacccagggatgggtcgggtcggcctccgaagggcagcagctgccatgcgggaggcaggttcccgaggagccgggcaggcttcggagaggccgtgctcgctttcccgactgtggcgacggatccacctgctatgcgttcctcagaactcactgaaccgcccacgttaatgacgcgcagttcgccgtgtgccaatgacgcctcaatcaagctgctaaacgaaggccggagcagccctgcctgtggggctgtaatgttttctgcagccttgatgagccgccctgggctgtttcaaagggaacgcagcagtctcctcttgacttccgcagtggccgtattcctgggccgtgcggtgggtgtgtctgcaggtaaacagggagtatctaggctcggatggttacagacggctttccccgtgggcggcgtcccgtgggccctatgcaagctgcgcaggccgccctgggctctgccgcgagtgcgtgggcggcaggacggtgcatcccgggcctccaccggtcaaatgctccacactgaccaccgcagcacccccccgctctcccgggcaaattctaaagcttccctagcggggagttcctgctggggaactttctccatccgccctcttggacctcacaggcttcttccgccttcccaaacggacgctgcaccccgtctcgttagaacgctgcaccccatctcgttagaacgctgcaccccgtctcgttagaacgctgcaccccgtctcgttagaacgctgcaccccgtctcgttagaacgctgcaccccatctcgttagaacgctgcacccgtctcgttagaacgctgcaccccgtctcgttagaacgctgcaccccatttcgttagaaagctgcaccccgtctcgttagaacgctgcaccccatctggttagaacgctgcaccccatctcgttagaacgctgcaccccatctggttagaacgctgcaccccatctcgttagaacgctgcaccccatctcgttagaacgctgcaccccatctggttagaacgctgcaccccatctcgttagaacgctgcaccccatctggttagaacgctgcaccccgtctcgttagaacgctgcaccccgtctcgttagaacgctgcaccccgtctggttagaacgctgcaccccatctcgttagaacgccgccatggcctgcatgtgtgtccgctccaaatctcatgttgaaattgtatcccgtgttggaggtgcctcctggttggaagtgtctgcgttatgggggtgggtccctcgtgaatagattaatggaggggctgtgagtgacttcttgctgtattagttctgtgaaagctggatgctaaaaagagcctggcacctcccccatgcttcctttcttttctttctttccttccttcctccctccctccctccctccctccctccctccctcccttctttctttctttctttctttctttctttctttctttctttctttctttctttctttccttctttcttttctttctctttctctcactctctccttccttccttcctttctgtttctttcgacggagtcttggtgtcttgctctgtcgcccaggctgtagtacagtggcacgatctgagctcactgcaacctccacctctgtgttcaagcaattctcctgcctcaacctcccaagtagctgggattacaggcatttaccaccacacctggctaatttgtgtatgtttagtagtaatgaggtcgtgccatgttgcccaggctcatctcaaactcctgacctcgggtgatcctcctgtctaggcctcccaaagtgctgggattacaggcatgagccaccgcgcctggccgcctcctgccactttctctctctgatctctccgcgtgccggctcctcttccccttccaccgtgagtggaagcagcctgagcccctccccaggtgcaggtgctggcgccatgcttctagtacaaaaaggggccaaataaacctcttttctttataaattacctaacctcaggtgttcctttctagcaacacaaacaggctgaggaacacactgcggacatttcggtgggagaaaacagtgggtagatgtcaccagga

SEQ ID NO: 1883377 - DNA, 4001 bp, Homo sapiens
tgaaagatcctcccgcctcagcctcccaaagtgctgggattataggcatgagccattgcacccggccatgaagcaagttattttataataacagtattaccttgcatttttataatgccttacattagttaatgcaatttccacatgcatggtctcatttaatcattacaacaagctggaaaggaggtcttggaatccaacttttactactgagaaaaccaaagatgagaaaaagttagacacttgctgaagactactgggttataaaacagaagaggaaagactagatcccagatattcagaccctaagttcaggtttttccattaaaccacaggtgcctgcagagtttgctagactaaaacacaagagccattttccttccaagctgaaaatgggaaagagataatattaggaagaagaaatgatttaagtagagatcactgggtaacactatacctacagttgctctataaattgcttgattttcagaatagaagctgtattccagatgatatgccacagaaaatctactccacaaaatgatatgtggccaggctagttcaagcatcatcaaattcatgggacgaatacaacataatcagtgtttttctatcctaatagaaatgtagactggagtcctatgatttcattaaaatatccagccaaggcaggatagaatgaataaaaaggaacttttgaaagatacacagatttatcaatctacaaataatagaacacagttgtatctactcttaaggggagacaaagtagctttttaaactttttatattgtgttaatattagtactccttaaatatataaatgtatgtatttattactccttaaatataaggatatacatgtatatccttaaatatataagtatatatatttaaggagtactaataaatacttcttaatttaattcattatattttaaataaatatttattaaatatttatttataaataattatatagagatagggtctcactatgtcgcccaggctggtctcaaactcctggccttaaaccatgttgctgtctcagcctcccaacgtgctgagattgcagaagtgagccaccatgcctagccttactttaagtctattaattgagattaagagaaatactacttaatatggttactgattggttactaataatagattataggttttacaagtggcataaaataaaattattttgcggagcagagatcgtgaacagggaaaataccaactgagagtcactgtatgtcatgcgagattgctgagggaagtgggttgcccatgttaaaaaacaaaaaaaaggtattatcacactcatgtatctgaccaaaaaaaaaaaaaggtaattaaaaaaaggtctagaaatcaccagagtcaaagtttgccaaaaaaaagtaacagtcatcaactcacggatgcctgatttttaaatttacaagtttaatacatgaaaaaaatttttgagtgactcaatccaccctcacaatgaggtaaaaatacctgctataaacacattatgtagcccatttgcattcttccatacaaggatgagatgaaccaggttgatcaaaacctctatcaaatgccctttacaaggcctggagaattttttgatcattctcacctcagtaagttaccttcatttacaaagagctaagtagtagggatttaacaaacataaaaagaggataccataaaaagagatagtgaaaaaaagtgttcattattttttcttacttggagttagaaaaggagaaggggagttatgggtgatggtgaataaagtttatgaaaatgaaagagtggacttccggtcaggagaccgattgcattacacctctcttcaggtgacagcaagtcagcctcaagggaacgtgaagttagacaaggtcgaccagtactctacattacgcttgagccacaagagaaccactgtacattttactgtcttcacagtggtcatcgagtgacacacacgtagagtaagtaacatcttaactgatggggatcaaaaggtaaaatacttagtttataaattaactttcctttatcctctgtgacagctataaagactgtgcaaggtgaagactaatgcagtagaacacatcttaacgctatcccatgagaagaatgaggatcaaaaggtaaaatactttataaattaatttttcttttccttatcctccgtgactgctataaagactgtgaaaggtgaaggctaatggagtagaacttccttacatccacaatgtatgggatctactgtagtctacacagttgacagtgtaacataagccttactagatcagttcattattataattctatggccaccatctgtccctactcatagtaagtttacagagacgataaaagatctaatttcagttctaccgatcccattggctttataaacccttaactgaagcttagcaaaaggattagtagaaaaccatatgaagagaacaattatgctaagaagtgctgaaaatttgtctccaaatgatatacatgtgtaagttataacttaagggtcaagaattacatgtaggccgggcgtggtggctcacgcctgtaatcccagcacttcgggaggccgaggcaggcggatcacgaggtcaggagatagagatcatctcggctgacacggtgaaaccccgtctctactaaaaatacaaaaaaaattagctgggcgtggtggcaggcgcctgtagttccagctactcgggaggctgaggcaggagaatggcgtgaacccgggaggcggagcttgcagtgagctgagatagcgccactgcagtccgacctgttctcaaaaaaaaaaaaaaaaaaaacaacaagaattacatataaatgtatatgtagtatgttagcagcaaatatttagcatgctaagtctttggtagaagtatttgttgctcagagaaattgagaaccttatgtgaaggaaggttaaaatttctacgaattttaataaaagactactcatctttagaaaggtaactttaaatactgtagtttcaagaggatttcagtactaacactcattaaatatgatactttcaattaatttatatcatacttggaagcatagttttctttcaaaaaaccggattgttgctttccttaaaagtatcctcactcagatttgtcctctctctgaaatacaggtctttgtaaaatgggtctgagagacgacagtctcattacaaagggccagggagaaggcggtaggaggaagaatatggtaatcaaggtggttgggttggtttggtttttatttatagtttgtcaggcttttgcaaatctagaaaccaccttctatcaagagtgattccaactgtgagaacacctggtacgtatgaactggcatctgtgggtttttacagtcaagaagggattaagtggatgaactgtcaagcacatgagcattcatcctatttctgccgtgagccaggcttgagtgggccttagttacttccagtcagtcagttctgacatacggcatcaaggcactgcaatccatctctcttcctcttacaactgatgacagtgtttgaaaggataactctggactttctttttttttttttttttttttttttattatactctaagttttagggtacatgtgcacattgtgcaggttagttacatatgtatacatgtgccatgctggtgcgctgcacccactaatgtgtcatctagcattaggtatatctcccaatgctatccctcccccctcccccgacctcaccacagtccccagagtgtgatattccccttcctgtgtccatgtgatctcattgttcaattcccacctatgagtgagaatatgcggtgtttggttttttgttcttgtgatagtttactgagaatgatggtttccaatttcatccatgtccctacaaaggatatgaactcatcattttttatggctgcatagtattccatggtgtatatgtgccacattttcttaatccagtcta

SEQ ID NO: 1883378 - DNA, 4001 bp, Homo sapiens
ggtgatgatgatgatgacgatagtgatggtgatggtggtggtgatgatgatgatgacgatagtgatggtgatggtggtggtgatgatgatgatgacgatagtgatggtgatgatgatgatgatgatggtgatgatgatggtcgtaatgatgatgatggtaatgatggtgatgatgatgatggtggtaatgactatggtaatgatgatgatgatgacaatgaagaaaaacaaaatgaagaagatcacgatgacaatgatgattatggtgatggtgatgatactgttaatggcccctgccccactcattatgggcactgccccataacctctgcttcccttcattgctctaccagccccttagaattagaaaggcctttccccaaagtcgacctgaaacagagtcgctcaaagggtagtctgagaaccaactgaatgagaaagcctctgggtgtgtgtgaattatgcagatacccaggtccactcgtatcttcagattatgactcctaggggtccagaaatacacattttaaacaagctccccaagtagttcttccgtatactagacatggagagccacccatacaatccagctctctcattttacaaatgaggaaactgaggcctgcagagaagcagcttggccagccaggaatggcagagccaggactataaccacatcctcaaatttcaagagcagtcccttgttgctccagcatagcctgtttagtcaaccttatgtgttaagtgccaactgtctgcaaagcacagtccacgaccaaactaaatgagaaaaaaacaaatcacataaaacgcatgcctcaaggagacatggcctgtgtaggagataaaagaataatggggaatggtgagtgccagacaaggggaagagagagaagctgagggagttcaacaggaaaggctgcacagtgtgggaaatgagaggctggaggatctcaaagatccaggaagacggcatggaggagccagcacttcagctgcagctttgaaagatgagcacagtttagccaaacaaaataacaagaagggtgccacaggccgagagagcatcatgggtaaaggtacaaggcaaaatgtccaggacatttatggggaaggggaagaagctgcatgtgtctagagctccaggtgaaatgtaccacatgaagcacaaggatgggggagccagagaatatgggtacctgaagctaggcaggtaagattggcttttactctatgggcaacagagagccatggcaggctttccaggaagggagtgacatgcaccttagacaggtcagcctgacagcagcttaaaactagatggaatgggagacaactttgtccctaagctcagtcccctaaagataccagcacatgactgtcaggcccctgctgggacagctgcccctccctaggcctgtccattctcttacctccctcctgcctctgatggggaaggggtgatgggttggaagtgggtgtgtgcaacatttaccatggccaggtctgctctgtgctctgtccccacccagcacacccatctccatccataccggccagccttgcctgttccctcacagtgatgcataagctgggcttctcctgcggtgtgatactaatgtactagccaaaccctgagaggccacatatggtgggtgagggatgtgggactgccagactgccagccagtgccctgaagactctgcatttcatatgcgtacacatttagtagtagtgtgaccctgggccagttactgattctttctgagcttcggtttcctcatctgtaaaatggggatgatgatacttaccttaaagggctgccatgaggtcgaaagacaaactatgacaaacagccagtctcgtgcccagcccagcgtgggtgcaagctatctggtggctgctcggatgatgatgatgacgatgacaacgatgacgtagcaccccatttccagctcacaccatcgggatcaccgccagcatcagcagcatcatcaagccatcttcctgcgttgtggcagcttgggcccccactggccatgcaggagccaggagatcaaatcatgaatggggctctttgcacttcaggcaaagtgcaactccaggaaagagagaagattaaggccaaatctctgcacccaaacaggatccaagaagtggggtaatctgggactcatcacatctacataaagggaggaggaagccccagggtggcctggggaggaaccccagtggcctaagagcaagttctgctctgcagctgaacttcaagaacccagctgcatctcgaagttctcgctgaagaatttggagacctgaaatatcctgttttgcatgaataagcatttcaaagatattgattacaacagctccttacatgtgtacagacagtggtgtgtcatttctcacacattttcagatccatcatccctgtgaggaggcaggaaggagattagtgagttgatgtgatagatggggaaactgaggagagggaggtaagtggtttccctgaaatgccacaggtctgatttttttccctgaaaaaggcaggtctgattctacctacatctagggctcccctttgtgtatctgaccagatgcatgtgagaaatctgagttgagttacctgtgaaagtcttttttttttttttttttttttgaggcaggatcttgctctgtcacctaggcaggagtgcagtggtgcagtcacaactcactgcagccctgacctcctgggctcaagcaatcctcctgcctcagcctcttgagtaactgggaccacagatacccaccaccataccaggctaattgtttttcttagtttttgtagagatggggtctcactgtgttgcctaggttggtctctaactcctgggctcaagtgatcctcctgcctcagtctcccaaagtgctaagatcacaggcatgagccatcacacccagcctggaagttccttcttaccaggcagagagagaagcacttccaagcttgtaggattctaggaaagtttctaatccaatctcttcatgtctcagatgagaggtgggagacctagaggaagccactgtgcccctatttaaagtaagaataaccccaaagatatcttctctggtcaaagagtttccaaaccgttgaatgtgaatcttgctaccggcagcatcagcatcaatgggagcttgttaggaatgcacattcttaggccccaccccagacttgctacatcagcatctctgggtggggtccaggaatctgcattttaacaaattagccaggtggctgcacagtaaattttgagaatttagcatgcttaatctgatgcatgctaagatctgaacaacactgctctcaagagttgggggtgagtgttctttggagggttcaacagaagtttaaggcacattttcattatgttgacgtaactgtgtttttaaaccacaatttgaaaacagcccttgaaccctaagttatataccaaattttaacaactgggaggccaccttgggccacagacttaggtcacgctttcatgtccgaactccctggaaggtggctgcgtgtgttattctgtgagcacagggtggggcgtgccccatcctaggcagtgcacactggcttgagctagaaccgctctggcgagctctctcagttagctctcccctgcttgagaagccccctagatcgggtatgaaagccagctgaaaacgtcggtgccctctgcaggtttttgtatttattatgatcctacttatacttatgacgaggcgtggatatcatttagtgatgctacgtgacacagaaataacacaacacttctcaaatttctgcatctgtttcacccaacaattataagttgagctgttaaaaaaactttttaccatccacaaccaccacttatgtgattacatgagttgatcaagaattttaatacttttttctttttttaagacagggtctcactctcacccaggctggagtgtggtggtacaatctcggctcactg

SEQ ID NO: 1883379 - DNA, 4001 bp, Homo sapiens
ccaaaatatggtaaaacattgtgctactgtcttaagtgtctgatgtaaaggaagaattgcatttttctcattaataacaaagatcaaatattgtaacaaaagagtaacctgcaaatttattcctatagctattcatatagtgtaacctgcacatcatcataaaaggcttgaacagaatgaatggatggatagatttttcaaaaaatctttgaccaacttcaagtgtgagaaacctgtaaatgtgagaagcagtgttggctttgtagttacaatttcagaatgatccattttaccctttgttgactagtgtccattttcagccagccccctcatatcccctaaaccaaaatagaagctaactaaaaagaaaattaagaagcagacatctattaattaatttaatgtgcagaattaataataaattacctctacacattgtataagagcactgctaagccttggtaagataaaatgctgttaccaaaaaaatcctaataatttttacatgaaagcaagtaaataattattttccaaaatactaatttaaacaataagtcttaaatatatatgcttactttatgttgtattgtattctgtgttcactgaggtcactgtcctagaataaacactataattttgcctgttttgtgtactagaaatacttatcctgtttgaagaacttccatcctctgtggtgtagacagatagctcctcaatctgaaacattttccttgctcatcatttctaacattgaactttgagcaaaaaccaaatatctgaaaagcattctacattgagaaaggtaatgaaaaatacaaacatgatcctaaaaatgggtaaaaagtcagtgcatagctaatttttttctttttacttttttcattttttaaagtgagttacaacttacatataggaaagtatatttatcatttgtatacagttgaatgaagttttacatatatatagacatgttatcacaacccagcaccccagaaaccttactcattctcattctagcctgtatttggtagtgcaaagataatcattattctgacctctgtaactatgtattaggtttgacataactaactgttattatcaatgtttacattgtgaaaacttttatctcaacataggttgtcatctgtaaatctacttgaaataatttctgagccaatgtcagatcatataattcaaaatataaatgattttaatccaaattttttttttttttttgagatggagttttgctctttttgcccagagtggattgtaatggcacgatcttggctcactgcaacctctgcctcccaggttcaagcaattctcctgcctcagactcccatgtagctgggattacaggcgcacgtcaccatgcccagctaattttgtatatttagtagagacagggtttcaccatattggtcaggctggtcttgaactcctcacctcaggtgagccgcctgccttggcctcccaaagtgctgggattacagatgccagccaccgtgcccggcctgattttaatcagaatttaaagcacaattttagactttagttttaaactttaatatcaaataatatattatccactctggtattttccatgtaaatctctgaatgcaaccataaggaaaaaaattaaaaatccatatatgaagattaaacattataatttgtaacatcttcattcattagataaattcctagcatataccctaataactggctgtagcatgagcttttgagccaatttttatcaatttcacttaataccatagttatttagtgaaaaatgtcatatacatatgtgtgtggcatttgtacaacatagagtgcatagcttctgtaaaggaaataatgttttgtatcctgggaccccattatcctttaactgaattgactgtcatccaagtatgggtttgataaactgacacaacagtgaaaagaatccctgtcccatgtcagcttatcaaacacactgtggacagcatgtctttggcattaaacgtattcccagtcattaaagttctgaatagaagtcacgaagcttatgttcagtgagacacaacctcagtgtttccaggtgattttaagaacacctgataaaactgaggtatagtaccactaaactttaagaattttccaaaaactagggaaaaaaagtaacatgcatagagttacagaattgcagtgttattgttcagttcgatgatagaacttatattaatgagatatacagaaaagtaattaatatcttgtccttctggtaaaccatgtcaaattatgctgtaaatatatttatactgtagaataaaacaaaatcaaatatgttttgattttttaatcctttttttcaaataataacgtatatccacctggtaaaattgtccatcggtctgaatctctcactatttttttcccaatttcatttatttaatttgaaaatgtctatcatcaaaaatttagcagccttttttggaatagtgcactaaaatcatttgtacattgtccaagttaaagtataggcatgtttgaaaaagatttttaaaaatttattctagtgctgtaaatatatttgggtgaaaagctaacttctatggtgatgtaggtcaaaacgtttacttataataatacttcatttatacatatctataataaaatagttaaatctataacatttataggtgaatttgcctgattctatatcatatacaatgcgaaaacatctttcaggtttgttctccatagtttaaccctcaaagaagaaattacattatgcagttacagtaccttatcagtggagctcgacttctacgctgcaaatggaaatgtattgcaacagtgctaaacagaagttgccctcctctttggagaaaattgcagtatccgagagctctttttaacaagggactacttttaaatgtgtctgatcacctcaaaggataagtagagtgtttcctgccagtagaattagaggaaggaagcaccaggccaaaatgtttgatgtgtgatgtactgtaattcttttcatgtgtttggtggtggcttttatatgatgatcagtgttttgctactatttgtgaccctggtgtggtccaggtcattaaagttcaaccttccttaatgtgtagggtcattaactatacctagcagcattatcataattaaggtactgttttcttttaaacaactatgtctcattttcattaaaatatttcttataattggaaaatcgacctagtgattgtgattctcatgaaagagattattcaacattggagacctgctagtactagcattactgtcgacagatgctctttaggtttcctcactttaccttttagtccttgtttttaaatcagcattttcttcccacaattacctgtgggtatataaagttcaagatggaaactagctttacatggtagttttcctggatgtgagtcttagaggcaataagaattgacaaaattgctgtcagcaatattatatacctttaatgaaacaaaatgtgatgattatacatgttctttgttattctgagatcacatattcagatattcctttaaatgtttaggtttttaaatatttattcagtttaaaatatgtaaaagtaggttctttattctttcatctttatctttctatgccctctaaatttgcttttgggtttttttaaaacttttatatcatttgttcacccattagtcatttagcacttgacaatttgacaatgatagctctaaaggaatatatgctctgttttgggatatgtgtgtttatctgtgtctgagtgtgtgtgtgtttgagggttgtttatttgaagagccagtttcatcttttcccgcatgtgagtatccagatatttttggtatttgccttctgtctctttcaatgctgatactggatatatcattaatacattaatttgaataaagctaaatgcctaaaaggatcttcatgtgataaaataaattgtctttcctccatgcataaag

SEQ ID NO: 1883380 - DNA, 4001 bp, Homo sapiens
ttgccacctgggaccacagcccaggagctggtgactttgagcagggagggcagggcacagcctggctgcccccgccccctgtgcggcccgagggcatgagggcacctgcctcacctgcgtgtggctccaccccctgctgtgtgtgcagggagccacctccacctcagtgctggccggacaggcacctgcccacttgtccctgccacggcggctgccacaggcctcccttcgtgtgggggacgctcctgccctgccggcctccgcttccacccacctgtcccgcacaggctgcaggctgagggccactgcagagcccgccccgccctgggactgcagcagggtcagggtctacactgcagggtggggtggaggggcaacactgctttcactgacattcagcttggaaacaggaaggggagggcgcagggaatgaaggggcgggaggcaggcggcccctctgccccgcctcgagtccctggcagccaccagcggggcttaccttgctcgtcctgcgcccaccgacgtcccctgcgccagtgccacacagcggccagggtgacaacgtgacccacaaccaccagggagggaaacaggctgcccgagggctccatagccgccacgcggagccgccagggctgcccttcctgcgctgggaaccggctgctccaggctagacagccccctccctgcgtgcagggcgagcgagggggagcgccgggaccggagcctgccctgcccgcaggaccgccccatacgcggcggcagccccacaacagctcccgcccgcctcctctcctcctccctccgcgggtccggccctcggcgcctccccaccctcgctccccacccggccggctcagctgtccctgcgcagggctactgacgctcaaggttagttggccttaacccctgcgtccccgcggccacacccgccgggaggaggggccagccgcacgcctggccaagccgcagccccccagcactgcccgcggcctcggcacacaccctccctccctcccagcctccccctgctgtccccaccagaagaggggcccgagcagcccactctgcctccaaggctgccctctggggacagctggcaggcatggagggatgccagagcccccacctcaagcctgcagctgaacccactgcactccttcaacttcgccctcctcaccagccccaacaccccaaaagtgagactgcagaccagggctgagggggtctgggtgagggcacatgaggcaggctgtgtgcagggcgagggacagcgcccctggcctccagcctcagccccagccctctggcccctgtccccagcaaggggccaggatttcacaaggctttcaagggctgcccacctaccgggcacgatcttcatcggggacggtggcaggagcccacggggcagacggagcgggccaggggtgtgggaggtcacaggcccctcggaggaggcacaagccactggcggcagcgtcgggtgggaggagggcacggccgtgctgctgtcagcagcagcttgtgggggaggggagcagtgggcaggggcccaggggatataaatatccgaggagggcgcgcaaggaccgtcaccacccagacttggaacatgacgcacggcgccagggcacccaggccccgctgcagtcaggtctggctggacggtgccacccgacacctcggtcccccagctcccacagggggttctaatataatagagcagggcgcgggaggtgcgggctcacgtccctgcaggaggcggtgcagtccccacccacctgccctgccaagccagggggtgctcttggaaaggccacaggggccaagagaagaggccgcccattctcccagagggccctgcgcaggtcactcaacacagcacctggccccaccggtggccgggacagccaccccaaagtcacgcgcaggccagagacccaggcagcccgaaaccagggctcaggcctgcgcctgccccacagcacagcctctcctggggtcccagggatctgggatggagacgcctctcctgggccacggcaggagactggcctggctccacccaggagtcccgaagccctgctctgtggaaggcctgggtcagagagccgggccacaggcaggcccacagcatatcctatgcagatcagatcccaatgcagccggggaaacaggacgtgggacacgcacagtcctgctcctcttcctgggacccctgtctgctgggcgcacccctcaggcccaggagaatgcacgttgacggtataccccattccacagcgtcgctcctggcaccacatggaaccctcagcaaaccccatgaagtcctataccatgaaggcctcatacagaccaggagcctgaggcgccgcctgctgtcccgcacgctgccatctgagcccaggtggcctccagtgtagttacctcagcccacagcaaggcacagtgaaccagcctggccccgggccactgggcaggccacccaggtccatgctgggaagcccgcggacaacaagagggccgggcccaccccagcctcctgctctccagccccacacctcaaaaacgtgcggccgagggaaatgcctgcagtggcccactctgggcggccaggggtcgggcgggcccaggcagccctgagggtcagggatacccaggcatgccagaaagggcccaactcccagctgagcccaggacagcatctggccagcagtgggcaggggccgacaggccggacgtttcagcccactccctgccacgtgctggggaagcctcagaggagcctgactcaatggcctgggtgagaaccagctcctggcgggaggagtgccccaggctggcagcgggcagttcttctaccactccacggaggtccggacaggcctgtgcttccgggacacacatcacacacacccctggggcagctccgagagggggctgtgcctatccctgcatcccaggtctgacggcacagaacggtggacaacgggaagagacaggtctgccagaggcggccccggccctctcctctgcctcccacagcccccagctctgcctgccctaccttggcccagctgaatcagctcctccatgctgtacctgtccatggctgccacacaggccaggctgctccgagagccggcagggaggaaggcgaggcaggaaggagggaaggggtgggaggcagagggagggcccactcatgccctggtagcagcggctcctcctcgcagccaccccttagtcagtaagcagagatgaagcccagccgactgacgggtcagaccagcccagcagacctgcctgggggtgcaggggactggcctgcctgcaatcccagagagccctccggccccagcccacgggtcttccctactgttcctgccccgcccagcagaccccccgcccagcagaccccaccctgtagcctccccttcccgctgcaggccccaccagcccagccctgccctcccaccctcccacccacattccaggcatccatgtgcccagcggtatttcaggagccaggcgggagcagagccccaaactgcccaccacaccccactccttgagactcacattcctcagccccaaaggtggtctcttcctccacctgagtcctccccaaccagcacagccccaggcatctgtccaggggcaatggtgacacctgcctcccctctccatacctctccacccaggtgcttgctgaccagtgaagtgcaaatcaaatcccatcgtaactaccccttagaagcctgccggcgatctacagaaatcccgcaaacgggtgactcggccaagccagtgatccctgtggaaagctggccgggccatagtccctccacctagagcaccctgtggctgggaagaagggcaaggcagccaggccacctccaggcttcctccttgacgcagggccacagagggtcaaggggggaggtcaaggcacaggcgtgtcctccgtgtagaggggaagtcatggtggctaccca

SEQ ID NO: 1883381 - DNA, 4001 bp, Homo sapiens
ctcccatgatatttagactatattttaaaatgcagttatagggatgaatgtatgggattcatattctatccatattgcattgtgacatatcagtttgaaatgacctatttatcatggttccatagtgtaatggttagcactctagactctgaaatgacctgtttaccataaagagtgtatctgtcaagtaatttcagaattgctccctagaaagccatcccaaaacctaacacaacacgtgttatgaggcaaagtctattgttatttatagactttctcatttactcatgtttattatcagtaaaatttttgtggggagagatttcacaagtaatcatgacataactgtatccctcagaatttccaattgaaggaagaaaaaaaagtattggtaattgttaaaatttcaactttttaaaaaattggaggtcaatagtccactggtatatactttatattggtgccatctttaaggtattttaattaagtaacaaccacagcaaaaaatacatcattcggtataactttatttactatttattgcacataactcagggtctttaattgctaaccaccgaaggttcaaaggactatttttccatgaagtttaacattaacattagtgaattcatttactcatgtggtgttttttattgtaaacatctgaatgattcacattgccgtagatcctgaactcataagcgtggtccatgcacaggctggcagcaagccagaaagccactctgcaagcaaacagatactctgcataaagaggaaattcatagcacaacattgaatgtccaacctaagtcatctcagaattatacatatattgactttttaattcacatagaatctggaactcaactggttggttggttggtgatggggttgacctgatttcgggagaattattcctgaaataattaaggaaatgggggttcaatctttcttcttagctgcttgttcctccccagcaccttcaactttcttctcctcctcttcagcttctttggtttcctctccttcttcaccttcacctccttcttcttcttcttttgcttcttcagactcttccttggcagctttaacataaaaagaaaatgtacaaaatgcaaatccagggtaagtccagtcaaaacatgtctgcaaaggttttatttgcaaacacaactgtcagaatgctaccaaaacctcccagctccactctctccaaaagcacatgtaacagacaaagcttgccatgaataatttgccactgaacacatatttaaatcgaatgagatcacttctaggtatgggaagctctgctcctctccaagacttaacctcaatatttctttcattatgtgtctggtatctatttttgttctttaggacaccaacctgctgtgttaaatgattatattaaaaaatgaaaattttgaccaatcacctcattcagagtagatgccttaggaaagttttgctaaacaaacagaaaatttatttatgattctaatgtcatatatgaataaatgagcaaggcttcatttgtcttatccacctcctaacaaatctccacacccagtttacacttgaagttgcaggggttttttcttatcataccttcttcctcttcagctgcctcctcttcctcggcctcttccttgtccttctcctcctcctcggcttctccttcagaggggggctcatccttggcttcctcagccttggcagcctcaatggtttcctccacttcgatctgctcctcttggacatggctggtgtagtaggacgggaaggagcgggtggacatcagataggagctggtctgtaaaccgccgtaggcagatcggccaaagacctgggagctctgggagtagccactggttatgcttcccacgctggtgaaactgagtcgggtctcctcgccttccaagagtttcctggggatgcagatgcaaggtgaggttaaaaaacacctgtgtttcacaacttgctctgagtaccctaaacacaaaggcaagcaggagcagggctgggatttatcaatacttaatgcctggggatcttttgatggagaccagaaaaaatataaataaatcatcctattagatttaaagtgtaatgacaagataaaaacaggactcctaattacagggttaaattcttatatatctaaataccctcttcttggaagaagccaaaaactaacacttcattatttcaaaaggactattattgaaggtttctgatccaacataactttaaatgggatctgattttcttcctaaggtttaatggctgctgtctttgcccctctattttcacctgtaagctgcaatctcaatatccaaagccatcttcacgttgaggaggtcttggtattcttttaggtatcgtgccatttcactctttgtggtcctcaattcattttctaatttgttgatcgtgtcctgtttgaagacaaaaataaaacaaaaaaaaaatccgagcataaatcccttctattattttactgtagtgtagttgcaaaggcctagtttcgattaaaatcaaggtgcacacctttgataaaatctctcctagaataacttcctgtatcttttgaaaaaccttcatgcctaaaatacccaagttcatgaagcctgagatgaaaaaaaagatggacgaaaattctgttcttctgtttctttacttaatactgtttaatgatcatcataaaatgcatgcaaacagactaagttgatagaaaaactgtgtctctcattcactgattaactcttctttagctgggttacatgccaggaaactaatgcctttctttatgagaagaaaatagccagatgtaaacaaaaaaaagaaaaaaattattttctatgaaatatttcctatgtatctaaattattttttctactccccagaagaagaaaaaaatttctactccccagaagatggagatgttttaaaatggagatctttttaaaattgtattttttctactccccagaagatggagatgtttaaacagaaatgttgtagaagattttacacataaagaaaaaaagaaaaaaaaaaggtaaaaggaaatggtttactatgaacatcactagttaactacctaaaacaatgttgactattttcctgtctacctactaaataaaggaagggagtggttggtaaaactagtcataaagcatgctggtcacagtaatccttcagaattaattgagagttgttcactctactatttattaactagatgatccgatagttgctgcaaagtaacttgtggttaatgcaggtcagtagagagctgatctcactgcaggccggaggcaacgcccaattcccacgtcttcccctcccccacccaacaagggctgggcagctttaatgcggaacgccggtgcagcagcacggagcacactcccagactacagtggcgcccgcactcacgcccttcaagtgccccacccctcccacacagtggccaaggagccaagccctatccctaagagctgcgtgcagccgcaccacccctggtctccactttctgggcgcaccaactcccccccttgctcgagtcccccgcccccctgtgtttctggccgtgccgcacctgcatagcgctgatgtcggcgttctgcttgtcctccagctcctgcagctgcttctccagcgcttcattcatgccccggcatgcttcgatttccagggtcttggccttgagcagacgacggctctcggacacctcgtccttggcggcgcgcacggcgtcggtgttcttggcggcgctctcggtcagcacggtgaagcggctcttgaaccattcctcagcgttctgcatgttcttggcggccagcttctcgtactgcgcgcggatgtccttgagcgcggcggaaaggtcgggcttggtcacgtccatctccacggagatctgcgcgtactggatctgcgcctgcagttcggcgatctcctcttcgtgcactttcttcagaaaagagatttcgtccatc

SEQ ID NO: 1883382 - DNA, 4001 bp, Homo sapiens
aagccctaattcccaatgcgatgggattaggaggtggggcctttgggaggtggtgcagtcctgagcgtggagcccccataatgggatctgtgctcatgtacacagaagaagagaggccagaactctctgttcatcacgtgagcccacagtgaaaggatagctatctgcaaatgaggatgaaagccctcaccagatgcagactcagccagcaccttgatcttggacttccagcctctagaactgtgagcaataaagtatctggttttaagccacccagtctatagtattttgttatggcagcccaagctgcttaagccatgtactaagtactcaatacacactagcgattactactcatgattttttttttttgagatggagtcttgctgggttgacaggctggagtgcagtggtgccatctcagctcactgcaacctccgccttccaggttcaagctattttcctgcctcagcctcccaagtagctgggactacaggcacatgccaccatgcccatccaatttttgtatttttagtagaaatggggtgtcaccatgttggtcaggatggtcttgatttcttgacctcatgatccatccactttggcctcccaaagtgctgggattacaggcatgagccactgcacccagccataattcacgatattttaaagccatcactgagaagttatgggagaggatcatttttctgtcacttggaggaaaccctcggcaatgtcacgagagcaagcagtggggagcaagcagacgggaggcaactggagcaggtggaggatgcagcgggcagctcacctatgctgcagctctctgagaggtgggaccgccgggcctccaggtttctgtaggaggtgagagagcagaagccaggtgagctcagaggccggtaatgttcccctgggcagcctcggcccgccctctcctcctgccccctgtggagaagtagtctgtccaaattagcaatgacctgggagcacagcccaggctgctgggggctggagttgggggacagcagcaaccccccaggataacaccaggtggcatgaaggcataggaatattcctgcaggtatttattgggagggaaagatcatcttttttcagggttctcctgggcctgaaagccagaaactatggaggtggggactcccagtttattcttattcctctcagcagcacaggctgagctcagggccctgtcctctgcaccccattgtactcacagcatggggatctggggcaggctgttccgcttctcaccatctaggaagagaggaggaaggaggaggttggagctggggacacagggacctggatgggtgactgacctcctcactattcctacaagggactctcctcccatcccagcccctaattccattctctcctagcctgggagctagtgaggccttgggccagaagtggaatcctccttggaggctgcctcaggccagatttcacgtgctccagctgtgacccctgcttcctgaatctgacccaagatggagacacacacaggcgggaccagccttctactagcaatggctttgagcttgctggggctaaaacgcctctcctccagaagctgcctctatgtggaccttgattagcagggctgtgggtaggtggaccggccagggcttaaagcctaagatgggcccactggaagcttcccgctgggctgtgggggaagaatcctcattcacttatccatcagtggcttagcttctgccactccgcctctggggactcgggtgtgctgccacccgtggtccagccactttacctttaaatggaacccacctttcctaggatggatgatgagagagccttggtgctcaccctgcagccggcagtagccgtctatgaggtcagccatgttctcagcctctgctagggatgaggttttgatggacaaggcctgcggagcagagaccagccaagggtgagaccccagagccttggctagagaccacccccagggctggagaagagatggcaggacccctgccacaacccttgcctggatgccaatgctgtctgcacctctcctggggccctgccctggagtccagactgcactctgtcacccctttcacctgtacgcccatgctctccaaaggccagtcccaggcctcacttattttggcctctgagcacatagcacgatgcctggtacctagtaggtgctcaataaatagaagcagaaactgagaaaatggaagagggggctgggcacagtggctcatgcctataatcccagcactttaggaggccgaggcaggcagatcacctgaggtcaggagtttgagaccagcctggccaacatggtgaaaccctgtgtctactaaaagtacaaaaattagttgggccttgtggcatgcacctgtagtcccagctactcaggaggctgaggcaggagaatctcttgaactgtggaggtggaggttacagtgagctgagattgcaccactgcactgtagcctgggtgacagagtgagactttgtctaaaaaaaagaaagaaagaaagaaagaggaaggggaggcaatggggcagggcacagatgggtgaaaggagagagagatgcagcctgaggtctctctgggtgttttactgtaaaaaacaaacaaacaaacaaacaaaaaaacccatgtttttgaggtcttgatgtccgcatccttgttctcttggtataacttaggcctgtgatttatacctgatttctggtcaccttgaacattccactacctgaaaaccttcccaatttcttctcctgacattaaaaaaattgtttcccgaattttcctacaatttatcatcatcctggtaccttttgtctaagaacttggtgcagttttcttaacacgatccccaaagccaggaagctcctggcttcctgtgtgtcacagacttttggtctgagcaagagctcccaatctgccattataccccctgcagagctgccaggtgcccagtgcccagagacactcacctggggggcaccttcaatgcccagctgaagtactgcctggccctcctccagcgggaggcacctgatggacctgatctgcttgaactcggccaggcaggtgggctgtgggaaaagaagggggagcttcagaccatcccactaccaggactaggccatgcagattggtcagtatgggggagccggggtgaggaggaactgggagtttctctgggagatgaagagagaatcaaacactattaaggctagaaggatcctctagttcaggggtgtccaatcttttggcttccctgggccacattggaagaagaattgtcttggaccacacataaaatacactaacactacttgatgaaggtaaaaaaaaaaatcgcacaaaaaaatctcaacatgttttaagaaagtttacgaatttgtggtgggctgcattcaaagccatcctgggaccacaggcttgatctagaccaagcccctccctatgccaaggagaaaatgaggtctagagaaagccaggacttgctcaacatcatgtgccaagctggcagtggagccaggactggacccaggtcccctgacttccaagggaatcatgccttatattgtcactgaaagagcaacactgctgagctctgcgagtaatcattgaggccttgtctccccctcccaccacctctgtgcagatgacagtcacagggatgtaaagggccatctgtcccatgctgccatctctaaatgctctccactgctgctcacgccagggcatggccttagaagaactctgctttcagcaacaggggcaagaagaactgaaggggcagacagggcgggaggcagcagagaggggacgacctccccgcctggggctgggtggggctgccccgggtctctctacctttgcgtcctgactagtcagctggcggatccctttagggccaatgaccaggtccacagtaatgttccatccttgctggaataaaaggagagtggactgttgt

SEQ ID NO: 1883383 - DNA, 4001 bp, Homo sapiens
actccctgatgctttcagaagcaaatgaaccttccctgcttcttaattgcagcctcagcatcagctgacacagcctgggaggactgcgggtcaccatggcaacccagcagggcaccgcgcagtgaccccctccctcccctccagtgggatggtcaaggcagggaggcggtagcggctcctcctgacctctttcttcttcttggcttcttctaggttgctgagcagtgtcttgcgctcttcgtttgttttttctatgagagtctttatctgtttcaccccgttgacagcattttgaatttccttattgacgtacttacttccctgattggacatttctgcaagagaagtgcaagaggcagaatgaggcgagaggaagaggtggcctcaggaccctggaatgagctggatggccagaaaggcccgttcagttcaggggctgtcaaggctgggacccccactcctgccagcaggcagcagcatggccccagccttgccctggcacaggctcccatcacaggctccttgctgactgcaccctactgcttagaaatgcagaccatgggagccggcacacccagagttatgcccagccactgccatgtgcccctggagaatgagctgggtgcagaagaaacttggcaaggaaaaaaaaaaacccagaagtgtcagctttgcagcatcaaaatataaaatattgttattttggacacaaatctttctagagttcagtttaaacagatatgtgtatttctttgttccaatgcagtgccaggcgacaggaataagaagatgagtaaatgagtaaggtatagcactggtgacaaatgcagcgaaacactgtgtcacctaagtgctacttcactggtgtttatcccatgccaagcactgcgccaaacacttcatgtgcagtttacataatgctccagccccccgccgtgcccacttcgcagagggagacatgggaagtgtgatatgataaagggtcaaagtgttcatcaggtaggaggagtatgttctggaggtctaacatacaggtggtgcttatagttaataacaccatatcataactggaaatttgctaagaaagtagattttaagtcttcccaccgtcccaccataaaaagtggtcatcatttcaatgtatgtgcatttcaaaacatcacgtcatataccttaaatatacacaatttttatttgttaattatatctcaataaaatggggggtggggggagtgtcatgagatcaagatagtggcccaaagtcacccagctgagaagaggtgaaacagactcacacccatgtctgatctgggtttttaacaatgatcctgcagaaaccgtcagctcacaggagggataagctctgggcactccaaaggggagagggataagagctccggtggtccagacacagcttcgtggaggaggcctgggagctgggctaaggggcctgggaggggaagagctgaatgaaatgcaacagccgaaagtgcttgggaaatgcctgcaaatgccggcagtctgatgcacgcagagcctgaaccaggggcctcggagctgaggctcagagtgggcccagacacaggcacccagacccagtgcacaagataaaaacggtctgtaacactggggcctgatagagaggcactgagcagaattagctaccctgccctctgacctcatcaccctgtggccagaggaacatcatgcttggtctactcaccctggagctcattgtctgagaccgtctggtcccccaggacctgcccactctcccaggtcagcagcagccccacaaacagcagcagagtcttcatcatgcctccaattctggagtctttgcacgcctctgcagagaacaggagaccatcatgggaacagctagacagcctgctggcgtcccgcccacctgctgcctgcagcagctccccagggcctcactgccctcagctgtccccacagcaggcactgctgcacttttattcctgaggaaatggggggaaatgaccagacttgccatggacacctcgaatgaaagcgaaggcaggaggtgcagggagggagggactgcaggacagcaatgttgagtggaagaaacaagaaccctggcatcggaggaaccaggctcttgtccaagccacatcctccccgacaatcagcgaggcacacaggctttctgcatcctggcctccttgtccagagtggtatcgatcatgtcagacactgaaaataccccccttaggtcatgcatccgtccctccccatgccacctccacagagggactgcatcccagagaccagccacgtcctctgcaatgtgcacctaaaccttcaccccagcagacgctccccattcaccacagcgctgcagcccccagggagtctcagcaccacctgaacttgactttcaagagccggaggcaacagcagccagcccttcacaccgaatccatctgcatccctagtgggagacttgggccgggctgcctgtgcattcaggggtggaagtagtggaagccaggaaggacaattcccttcggagagtagagagggttcgcagtggcccgaggagcaggcttcccagagaaagtccctttggaaggatgagtcctcttgctctgccaggccctccacactgcccatcccctctaagccgacagcaggctgccctgccagtgttcctgccaccactgggctggctgccctgagccacggggcacaggccatagccccggtcttacacaatggaccctttcccagaagctgaggctgttgcataaaacagaaacccctccccctgcactccacccccaccatgcccctcccaagaactgcttatctgagctcacccatttgccatcacagaaccaacaggacgatggggttccccttcctgaaatggttcacatccaaagcccgctcagcccagcaggcccatctggacactcagtagcacattaacaaggagtgcctctcatgagaagtaatcaggcgcaaagagccagggagcagcgtgggagaagagatggggtcagcgccttccccagagatggggtagggggcggagaccgggctcaccaggaaggctgtggtctcacgggctctgccccagctgcccactgagccctgaaatgcctccagcaggaacagagcctttgtcatgccagagagacaaagccagccagaaacacctctctgccaggggcccctgaaagcaacaacttctggaaaaacccattcagaactaggttctgaccagaagacagggtgctgggccatgaagaatggggcagccaaaggcaagatacaggaaaggaattccagactcagcagcgggcacagagtctgctccagggagcctggggtccctggtgaaccatccagctcagacctgggaaggaggtcgttctctcacccaacctctctaccctagcggtgaggctgaagcccagagagggcatgggactccctagagtccacagcatgctcatggtaaccctgggatgagagcccagccctcccgacccctagtccagtattctttccttgattccaagtcacttaaatatctgagcctcagtttcttcatctgtaaaatggatctaatccagacctcagagaggggaatgtgttctgtaaacacgagggtcttatgtaatcatagtaaattctgactacttccaaattagactgaggtctgaggctgggcattggcagtgtctaatcaacatgtctggagaggggcaggaaaaccgagacaagcacacagaggccacctgtggtcccccggactgtgtggctctgctttgctgaaatgattgaccactttttaaagtacttatgaatcactgcagggctggttataatgttggttctgagactgcttttccagccagtctgcaggtgatatggatgctgctgatccaaggaatgttctagaaccgtgactgcacagccgacctcctttcctttgctcggactcacctcccccctcatctcct

SEQ ID NO: 1883384 - DNA, 4001 bp, Homo sapiens
tacagcaatgcaggatgcatacatattactagtagtatagatgaggcagaggttgaacttagagaatacgcataaaactgtcaacgtcaggccgcatgggaatgcaagtgcttggtgctatttcctctttccttagcaggcatagtgtaactgtgatttaatctacctggattacagttcttttgctagacacagtcactcactgagtcactctcctgaaattgcatatgaatatatgtatatctgagcatttttctaaggcaggtttccaaaggagtccatgatcgaagagactaaaaatcatggctgggcaaggtggctcatgcctgtaatcctagcactttgggaggctgatggggggaggatcatgaggtcaagagatcgagaccatcctggccaacatggtgaaaccccgtctctactaaaaatacaaaaattagctggacgtggtggtgtgcacctgtagtcccaggtacttgggaggctgaggcaggagaattgcttgaacccaggtgacggaggttgcagtgagctgagattgtgccactccactccagcctggtgacagagcgagactccatctcaaaaaaaaaaaaatcactgccatagatatcggaggtatgtggttagcagatagtatttatgggaaatgtctccagaataatgactaaaatggctatatcagagaagtgtttagtgcagaatgcaaattacagaaaggagaatgactctctagatcagaatagtaggtgaatacagcggacaagaaatgagaaaggcaaacctaaaacaaatggtaaaatatttcaaaacataaaaattagtttatatttgctcaaaatttggatggaagaacattaaagaacagctgacagaagagacgaagaatatcatgcacagcattaggatgtgtagaattcaagggccaggcacagtggctcacacctgtaatcccaacactttgggaagccagggtgggcagattgcttgagtttaggagttcgagatcagcctaggcaacatagtaaaacttcatctctacaaaatatacaaaaaaattagctggccatggtggcacatgcctgtagtcccagctacttgggaggctgaggatggcttgatcccggggaagcagaggttgcagtgagctgagattgtgccactgcacttcagcctggatgacagagccagaccctttcttaataaccaaaaaaaaaaaaaaacaaaaaacacacacaaaaaacaaaaaaaatttcacagggttttcttgtgaatggaattctgtacgcattcttgtactttgaacaaaggaactgtaattaaaactgatttgtgtttatgccacacctggtccataaattcaacagtaaatttacatgtctttcaaaggatgggaaaagaagctcctaattctattgaattctatctaattcctatgtttttctttgttattcctttttaaaaaaaatttaaatgttgacatctgaattaggggccatccttaataaccaagatgctttgtgtgtcacataaatgttaagtatcccttatcccaagtgtgtgggaccaaaagtgtttcatatttcagattttttcagattttggaatatctgcatatacataaaaagaaatctttgggaagggactcaagtctaaacatgaaattcatttatgtttcacatacaccttataccacaccctgaaggtaaatattttaaataattttgtgcgtgaaacaaaatttgtgtacaatgaataatcagaaagcaaaggtgtcattatctcatgccagtgcttaaaaaggttcagattttggagcattttgtacttgggagtattttggatttttggattagagatgttcaacctgtattaaaaatgactattttatacttaccactccccctacacaccgatctctatttcttttcattatgtctgtgaattaaaaacaaagaacttttagcaaatagcttgatttctacaaaattcttaagttctgaatgagactttggttttaactcacccaaaaattcagcatgtgagtttcgacaatgaagaaacattggtaattttgtttgttctgacagttcaaactgtttttcaaaatatctgcataatgcaaaaaaaaaaaattctcattacaaattgtattttagcatgaggaaggtaatgatgtcaaaagagcttttaaattaaaggtatttaattctctagaaattacaggacaaaaatcatgaatatttaaagcacatcaggcttatcaaagggcttttataacttacaacttctggaaagaaatacttcattttctgggcttacaaaattatctgggccctttaattttcagaaagtaacaccactggccccttgccactgggagcaccatcagtgggagtcaactcaccaagcgagaagcccaggagagcttcatactgcatgctaatctattccattttgcaaccagttttttatgtgctgttataaaagaagttattgccactgggcaaaatgaacaaggtttccctcaaaaatgaaatctaagtatttgctaaacagcaaataactcaattatgctattaaaaaaagaaaattacatgataaagtggtagccctgaatatcttaaagagtacttgataagaaggtttttccaagtaccagataccattgtctcatttgatcctcaaaataacctgagtataaaagctggtgtcagagaggtgtagtactttgtccaagataacaatacctggcatggccaacttggaacagaacttcactgctctaattccaagtcccagcctaaacgacaaaaacctgttacgttttcaagaagcttccttctggtcccggagtataatgacaatattcagaggatacaacgaatgttcattctgtttgtcttttcacttcaacacagtgctcccccttgttctcacaaatggtaggttcaactgaatcaggataacaggtggcttattattttcttaaatgtgcttacctcttctaagcactttaatttggggaaacaatttctctgtttaacttaagcctctcttgctatatttttctatatcatatttcctgatgtgcaggactattttaccccctttgctctcttgaaaatgctaaattttaaaattagaaatagaaatgtacttcttaagaagcagtcttcaggccgggcgtggtggctcacacctgtaatgccagcactttgggaggccaaggcgggtggatcactcaagggcaggagttcaagaccagcctggccagcatggtgaaacctcgtctctactaaatatacaaaaattagccggcatgttggcacatgcctgtaatcccagctattcggcaggcatgagaatctcttgaacccagggtcagaggttgcagtgagctgagattgtaccactgcactccagcctgggtgagagagcaacattctgtctcaaaaaaaaaaaaaaaaattaaaaattaaaaaaatagaaatagtcttcctaaaataggtcgtctatgtctgtattaccaaatgtttgggttttaaaatctccttttcagattctgctgggttagaataagcaaaaatattttcctttcattaacaaagtgctgaaattttgcagtgtaggaaatattaacgacaacttggacaaaaagagattttgataatataaccagtcactatttccataacctctaaagtaaaccaaatgtcagcagttaagtgtgcactagtcattatgtcaactttactaatatatttggctctgactacacacagcaggcggtactcttcattgtgtgcactgctccacgctgtactggttattttttccacacacaattccatggaccaaaccacatgaccaagctacaaattcacagtatctaatggtcggatggaaaattagcttcctataggaatgtaggcaaaagtacagtttatgaaaataacagaggccagctgggtgtgtggttcaggcctgtaatcccagca

SEQ ID NO: 1883385 - DNA, 4001 bp, Homo sapiens
cacctcgtggaggaagccatagtgcacgagctccgaggcgaggtcctgggcgctgtccgctgaggcaatggcgtaaggcgaggcatgaggccgctgcccacccgccgcctggggtcaccgcccgccgcccaagtcccctgcccagcctacttgggagcaggtcgtaggtcagctgccggtgcagccggtcttccagcaccagaagcagagtgagctggggaggcggcggggcgtggtcggctgggggttcagggctccgccacgctcccgccttccccacggcagcgccgccctcccaggccccgctcacatgccagcgcgccttgtcctcgcttctctccaggttgcactgcatctggatgacctgcagcgggggaaggctgggactcacaaacccagcagcaagaccacatgccgcggccccaaaggggccgggaagggacagcaaagactggaaaggggggaatctctaagaggagcccatctcactgctagtggcttggcaagctaaggaaagcttcgagaagagtcgacattaggggctgggtactgaaggctgaataggagctttcaccgcggagagaacaacttgaacaaagagggaactgtgggcgtggggaaagggaggttgggcgggacaggaccgcgccgaagtgcacggtgcctgcgggatcaggcctcccagagcctgggtgtcagctgaggactcccatgatctctgctggcagccaggagcaggcagtttgcctgttaggacatgaattctggctgcactgcaccgagagaggcccctggccaggagggggtgctgcaggaaaagtctggggagacaccaggacatagatgtccgggaatcagcaccaggtgggggatgggaggggtggggggggtgggaggggtgcgggggtgggggaagattgctggcagggtggaagagcccgggtgagttctggaggaaggatgcttggagtaggttcagggcaggcagcaggatgcaggggaaggatctgaggggacagggagcctcccggaaaaggagagtgcccagcctgtcctataacccccatgacccccacaagggggtcagcctggatctggtctctggcagccaggaggagagctgggctgtggggatgcaggccctaagagaaggaggggcacctcttatctggctgttagaaggtctgagggatggcactgagcagcaggagaggggactcacctttctggtctcagagtcaaagggctctggcgtcggggtcttggccttttggacctcctccgggggtggggccagcacacggggcagccccaggggtcgagtggctgcaaagttcatcagtgggtagattccattcctggggacacaacagggtggctgggggttcaggcctgacagctgcctggcccccaaccttacatcagttctcacctgacatcctccaggaatttgtccagctccatgaaggagacttccgagtacctggcatggaagtgggaggcacatgaggggctggccggggcgaggggaggggaggtgcggggaggggaggtgtggggaggggaggcttctgggtgctgactgctcaccgccactgcagcgggggcctgcggggccggggaagctccgccaagaccgcgtgcaggtccatggccttggtcttctcctccaccacattctcaggcatgaggtctgcggccacaagagcatcaaggcggtgtgctcaggccgtgggtcctgcagggccccttccacgtcccaacctccacctccccagccaccccccgggccggcctgctgctcacactggtgctggatgaagcagtgggctgccaggagcttcagcgagtgcacctcgaagagcacgcggtggaagaggaggctgtgggcagagggccggcgggcagggtcccgggccaggcagcaaaggatgaactcctggggcacagggaggagaggctggtggtgtgcaagggctctctgctctggccccgcagttcgaggagaggtggcccctgagttccccatgtccctcctcagggacacacaggacatgcagggatgcccatagggaggagtcccagcagcagcagccaggccaggacctggtcctctgagcttgaggacagctgggttctgggattggagcaccatgctctgcttccctcgacccccaaaaaatcgtggggagaagccatgatcctaaagtcacacctgcaagcctcctacccatggccttttgatcggctcagctcgggcccaacactggagacgaccttgatgggtccccactctgtccacatccgtgcccagcccggctccagctcgccaccagccccgaccaggcacccccatctcctgaggccatggagttaagtctagactccgagcagagggggctgtggatgcagcttccatcccatacctctttttgcctgcttggcacccaccatgtccccccacaagctggagcctcatcacctcctggaagcttaaagtcaaggacttggagtgaagcagacccaggtgcagatgttggctccaccactcactctaaagccttgggcaaaggactcatctcctctgaaccttggtttctttataaaacgggcatggtgatggcagccacagagggagggtctctcttgccttcttgtccttagaatgtgctgaccccttagggccttcaggcctggaaccagtatgtgctcccactgaggtcctctttgggaggggtgcagtcagctggtatacccctcaactgcacaaactgtgatgttctcccaggtctgcctggagcaccttgctagccctagctgagcacggtgagccagctggggaggggcagggcaagctgcttacccgcatgttggggtcactcagcgagtgcctggcgcgagcaatggcctcctctgtgacccgggtgtccccattggtctggatttccagtacagccatctggggcacagagccaggtcaggcatggggaagggaccacacaggtgagccaggcagggcacagttaggaggagggcagagcacaaggtggagggcgggggcagtacctccagcgcacacatcccaaaggagaagatgtccacagcggtcccatcggccacctctgaacagaagagagcacaggacacgtaggagagaagcgcagggtaggcacggggcacccggacccagcaccactcacctccatactctggggggaagaagtgcaggttccgaagttcctctcgctcagcgcggatggggcttcggagatcatctggaagtgctgtgggagggcgcagagctgagcgggcggggacctctccaggaccccgtccccccaaagtccgcacttaccattggagaagattcggtgccacactgccaaggggcgggagaaagagtggagttagctgctggggcatcagaactcctctgcccttggctccaggcaccttcccctgccccgttcccccacccagccctgccccgccagcaccggagccgatcttgatgaggccgttgtgctgaatgaagatggtgtcgctggtcaggttcccgtggatgattggggggctgcaggcgtgcaggaagctgcagacgttggggaggggagagtaggaggagccggtcaggaggctctggagagatgggggctcggtggcgccgcgcccaggccagcccaggccctcacctgagcgcagacaggatctgcgtgcaccagcgcttccaggcctggcggcggacgcacgactccgtcggtcgggtgggcgcaggagaggcggctgggcctgcggagcccgccccgcatcctcgcccagcccctgtccgaggccgccgggcaccccctcaccatcccagtccccgaggctgccccaaccccgtcctgtccccgtggctgccccagcccgctccccatacccgggcgttcatggccttgtggttcttcttggtctttttgaggaattgcttgaggctgcctgatgacacgtactctgtgatg

SEQ ID NO: 1883386 - DNA, 4001 bp, Homo sapiens
ccccagccctgcctggagcccccagcaagaacccagtgccacccctcgaccctcccaccctgcctggcacagcaagaacctggttcctaggctcttgacctctgggctcccagcaagccgctggcctgaccctgcacagatgggttccctgtgctgtcctcagtatcccttccttagctaggagggcactctctggatcacatggctgcaggtaaggggggaaggtgtcctccctgcccaaggtttgttctcatggccaactgcaccacaccagtgctgcggccacactgcccgccccgtcgccagggggtcctgcttctgcctctccctttgggcacagccctgccagctaccccatgacacagccggcgcctcatcccacagggagcctggcagcggccactcaccagcaatgctcatgaagcggtgtgagaagatggacagctggatagggtccagctgggggcccactgtgccggggacttcggcccccacggagatgcagatgtcccctgtcttggtcacctctgcctggcaacctggctccaccaggatggtgctggggagcagagggcacagagggctgcatggggccaggcgacacccctccaaccagagatgccacggccccaggccaggggccaccccaacgatggtgggatacagagtcctgcaggcccctgcagccttgggccagagaaccctgcaccaggggccccgcagtggacccgtccacatcctccaccctggccggacttcagcccacctgttactgtcgatgatgaggcagggcccatggagcttgtgcccatagcccagctctgccagcaggtacacaggggtctcctggtagcccccctcaaagtagcactgggtcatctgcagagggtgcgggtgagtacagcgcccgggcccagcaccctccccgatgcctctcacagggcttggtccccatcccggtgccccatgggtgctgtcaggctggcacaggcaggaccaccaaccttgtccacccggggaggcccggtctgggctttgggggcatcctcgaggcgaagaccactgcggccggtgccccgcactcgcacatcgtccacgaccaccggccgctcaggtatgacaaagccaaactccctcatgtacctgcactccccgcggggacccaaggagtggtcagagtgaggcggccagacaggagggccccttgccagggatccggagtcaggaagccacgtaccgctccacaaaggctgccccgaagtcccccgcacggggcgagcgggctgtggctgggtgctggtgggcagacaccatcagagcacagtccgtgccctggtagcgcaggtgcaggaagctctcagtgctgatctgggacctgcagcaggtggttgggggcactcacaccaaaccccctgccctgaccccaccccacccagcgcccggcaaggacacctgttctgcttctcgcacaccccgggaccacctgggaagtcatcaggaggaacacccaccaagggcgtggtgaggacaacgtaagccctctgtccagggcaccctgggagcccacctggggaagccctgggcctgcagagcatccacacactgctcctccaggcggctcagcctctggtccagctgcacgaaggtctcaggcgcgtagagcagggagcagggttcctgtgcctcatgcaccacgtcagccagggccagccccagggccgacagcagcccactgtgcctgcagggatgggcagcatggcaatgggaggtcacctcccaagcccggcgcagatcacaccacctccgtgcacccacacccaggcccacctgtggatgtgcaccgtgtccatgcccagggcccgggcgatggcacatgcatgctgcccaccagctcccccaaagcaggccagcacatgggctgaggggtcatggcctcttgcctagggagacagaaggggtcagtgggctctcctactctaccccatccagcccccagcctgagcaggaggcctggggcagggagcagggctgggggcaggacaggcgggagagcagaggtggacgtacctgcgtgagtgcacggatgggccggcacatggcctcgttggccacgcgcacgaaccccatggccacctcctccaggctcagcggggaggccgggcagggcccgttggtcaggaagctgttgacctcagtggccacagcctccagggctttgcgggaggcctcaggggaaagtggttggttctctcccggcccaaaaatgcaggggaaggaggcaggcagcaggcgacccaggaccagattagcatccgtcactgtcacagggccccctgggaggtggacagggtgtggggcttgggggctggaggcaggggagcaggagtaggcagcagggatagggctgacaggaggggctgggcctgcggcggcaagcggagggcaaggccaggccggccagatcctgactcttacctttgcggtagcaggcgggtcctgggtgggctcctgctgactcgggcccaaccacaaagaggccagacctaggggaaggaagggctggggttggagttggacacgaggagggagacagggctggggtcccagcctgggaagcaggagagctgacctgaagaagaggcgggaaccccctcccgctgccacggtgttgatgtccagctgcggggcctggagggtgacgccagctgtgctggcctcgaagacgtgctcgaattccccagcatagcggctcacatccgtggacgtgcctggcaggggtggggtgctggtgggtcacttgaagacccaggggcccagcagctgagcctccccgagaccccagccctcggccctcatacctcccatgtcaaagccgatgacaggctggccaccctcctgctggtaggtggtggctgagtagcccaccacgccgccggccgggcccgagagcacagcactggagccgctgaaggtgtccatgggcgccaggccgccatcggagcgcatgaacaacacctgcacatcctgcgagcgggcagcaggcgggccatgaggggcaggccaaggcccaggcccaggcccaggagtgggcagtgggggtgcctcacagcctcaccttgagttggccctggaagccacggcagaagccctgcacgtagcgctggatggcgggcgtgaggtaggcgtcggcacaggccgtgtgcccccgagggacgatgcgcaccatgggcatggcctccgaggacagtgacacgtgcgtgaagcccagctcccgggccagcacacccacctgctgctcatgctgggcccacctatgacaaaaacccagtggcacctcgtctcccaccaggcccggcacctgctcccgcagcccacagccccacctcactcacgtgtacgagtgcatgagcaccacagccaggctgcggatgcctcgagatagcagcccctccagcttcccacgcagggcccccaggtccacaggctgctgcacttccagcaggtcccccgtgcggccttccagaaaagcccaggaggccccgttaaaggccagcaggaccctccggccccaaatcccacagcagcggcggcacacacacctttcacaggcgtcccggtgcccgcctctccacggtgcagcaccacgcgttcgtccacctccagcacctcttcatacagcacctcaggcatgggcacggcctgggggcgggcagagactcagaagaggcccaggcctgagggtccaggccggggtcctgtgtgagtgggtggtacaggtgagtggctgtgtcccaacaggccggtcggcaggcccaggagagtcatacctggcagccccagcaaggctcaccaagggggcagctctccaccccctaggcagctgagtgcagccaactgctccacccccacgaaggcagcttcttccggaaacgcagcagtaggtgcggggttccacccctcctctgcctgaacagggtagcttgggtggccccacaccagca

SEQ ID NO: 1883387 - DNA, 4001 bp, Homo sapiens
cttttaaattagccaggtgagtggggcatgcctgtagtctcagctcaggaggctaaagtgggaggatcacttgagcctgggagatccagactgcagtgagccgtgatcacaccactgcactccagcctgagcacagagcaagaccatgtctcaacaaacaaaatagtggtgggcagagagaagggtcaaagctgaagactccatgtgagaacaagtttttttttgttttttttttgagacagagtcttgctctgtcacccaggctggagtgcagtggtgtaatcttggctcactgcaaccttcaactcctggttcaagtgattctcctgccccagcctccctagtagctgggattacaggtgcctgccaccacactaatttttgtgtctttaatagagatggggttttaccacattggccaggctggtctcgaactcctgacctcaagtgatccatgagaacaggtaatttttgtacttttatttttttttagatggagtcttgctctgtcgcccaggctggagtgcagtggcacaatctcggctcactgcaacctccgcctcccaggttcaagagattctcctgtctcagcctcctgagtagcttggattacaggcatgtgccaccactcccagctaattttgtatttttagtagagacggggtttcgccatgttggccaggctggtctcaaactcctgacctgaagcaatccgcctgcctcagcctcccaaagctctgggattacaggcgtgagccaccatgcctggctgttgtactttcagagcccaaggtaagcagcaggaaaagcccagggggctccaaaccatagtccagaggttgtgggacatggcccccacatccctagggtgggtacccagagccagctgagttcttcctcagccctttgctcagggcccccgatgtgctggaataagggtaacagattcctcagtctaatggcctggctcatcttgccaggccctgcctcctgctcagctgccttgagtccttactgggacatgctgctttttccacccagggcctcccctacagaaaccccctaatccactgttctcttcagggtttgaatcaggctacacagagataggccgttcatgtgtgggcgagggtccctaatcatccccaggagccagcaccagaccaggctctgccagccttcacatggctctgaagtgctgttaggtgataacgtacagtgaggggtgtgtgggcagaggagggttttattctggacatgggtggctgggtggtcagtcccccagcaagatagaggcctcacgcacatgctgccggaccactcgatctaagagggtgtgcacatctcgggcagcctgggcagcagcctccaacacccgctccaggtggtcctcgtgcagccgggcatccatctcaagcagcgcaatctgtcctgaggctggcagcagggccagggccagctgggggccaccagctgcttcctccacatggctgaggtccgccagggctgtgccgtccacgaagccagctgagcacgcacacacaaagtctctcatgggtatcccggcatccagcactgccagcgtggctgcattcacacaagctgcataggtcccaccatctgcctgtagcacctgcagggaacccagggtgtcagtctatcagactccctccccaaccccatcacacccttccctccctggattgacggctgcagctggctcacctgcacatagatatcaatctgggagcgtgggtgcagctgtgtgaggatggctgcttcgaaagtctggcggagctgcaggcccatctcacaggacttacggtccccatgtggccgtcgcttgcgctcacctgtgctgaaggtcgctgaactatattgacagttcactagggccctgtccggcagggctcgagcccgggagccccggatctggaagaggacagacacatgagccaggcccactccttccagctcacactccactgtcctctgtgggtctgcctctccctccactttcaatgcctcagcaaggggcaactgcgttacctccaaaacaaagccccctgttttgcgctctctgtcttgcatgtgtcgccctctggcaccttttaattggcttccttgtgtccatccttgccccattccctgccaacccaagtttacaaacatcaacgctgcttctgtctcacctacacactcaaatcctaactaccttacaaaggtttcacattacatatgaaataagatcccaaatcatttccctactctacaaaaccctaagtcctcacctccccgggaaccctcaacctgatttggagttatcccctctttccccaccagcagtctttctgctctgcataagtgccttgcttgttttcaccaccgtggtcttcgcccttctggttccctccgcctggaaagcagagctcccacactcatgcgctaagcaaacactctttcaataccttcgctggccaggcagttacagcgctggaagcacagtaatgaaaccagatagttttatgtaaagttcctttctttaggaagcttatgttccagcgaggaaacaaaggggaaaatgcttaagcaaaataggcatttgagattgtaggtgcacaaaacaaagggtttattgtagggcgagaagtaccgcgtggataataaggtcgtctgggaaggagtgacgtcggagtagagctgaaaggagagggagcgagtgggggagtgcctagcacgttgaagagccgcaaagaggaaggagggcgcagggacagaggccgatgagaaaggcaggaccaccgcgcagcacactaaggacttgcgtttactccgagtgagatgcggtgctgagcatcggctgtgtagactgaggcgcgccggccgttgcccctcaagtccccgagccagcgctcagcccggctgccccgcagctcccacggccacacgattccccatcccgcgcgcccactcgcctcgtgcgggccgtagaccacagccagtgccttggtgttgccctgctcaatgtaggccgagccgtcagcctgcgcgaacacgcccatccgcgcctggatcttgcgcagctccccggcgcgccgcccgtccacccggtagccctggtccgacaagagctccagccccgccatgctgcccggccgccaggtccgctctctgcctacttctctgagccgcgggagaactacagctcccggcggctccgaccgcccggaatctacggtttccggaggtccgccatcacttccggttccggggaactacagctctccgcggccctgacctccgtggatctgcggtttccggcgttccgctgtcacttcctgtcctggtgaactggagttcaccgcggccccgacctccccggatctacggtttccggcggtccggctctacttctgtctccggggaactgcggcggcgctatcggggaagcagcggctgggcccgcagccgttcccggagctgtgccacgggtgccaggaggtgggcgcccgccgaaggaggaattgcccagtcacgccctcgtgaccagtggtgcctgcattcagcccttccccgcgccccaagtgtgaaagtggaaggatgaacccagtggggtgcgacactgacaggagaaggcattgagcggtcctaggaaagtgaccaggctggtgtcccaggatggtccacacctggcacctctccagtcctctcatgccctccctttacaccgagcttccacactgcagtcaggtgggcctcccttttccctttgaggatgcagatttcctcatcctttccagagaggggttgtatgtctgtttatctcttgccacttaacctcagcggcttcaaataataaaaatcattctattattatgtgctgcaatctggggttatctaggctcagctagatagtttgcacttaggatctctcctacagttgctgccagatggtagctggggctgcagccatcctaaagctttctccctcacatctttgg

SEQ ID NO: 1883388 - DNA, 4001 bp, Homo sapiens
ctcagggcccaccagcccccactggggtagagggaggataccaccaagggagcccaccctcccctcacaccaccagttcagcaggttgctgatgaggcccctggtgcagtcctgggaccctgtgcagggcctcctcaaacacctgccttgttgggccatagctgcaggtctggggacaccagggcctggtccagtcttggggtctttaatcaagcagtcaccccagcaaggtaaggcagcagcagggccctggggttacccctgacctcccgctaccatcaaggggggccccatctatccagcttggtggattgcagggcctgggaacaaggtgtcctgaaggctgcagggctgcgctgtctgcactgcccagcctggtgccagaagagcagagggcaaggcaggcctggggatcaggggtgccccaacctcgtggagggcagctgagagccaccagcccacctggctgcccaggttccaagtgaaggaaagaggctgccaaaccgagccctgccccaaggcgaatagccatggacatagccattgtgtaccgtagcccctcggctcaccagacccacaccagaaaggccctgtggactgcccatccctgggccatcctggctggagcccacttcccgcaaacccagggccgacctcttcccaagctgaagctgagcacggtgggtgcaagttgaccatcctgcactgagggccagagtgccgattcccgcacacccagcaggagtagcaccaggagaggacgcctgagctgagcttttctaggtaggggagtgtggggaatgggggcgtctgcctggccttgcactccccctaccggccatgcccgccctgctgcagtggagctgctgctccccggcaggtcctgggacagctgtccacacagctctggcactcgcccttgtgggtgtggccataccccccaccaggccccaggcccctggcaggctgaagaggtcactggacagcactttattgacaccctcggacccggggcagggtcagcaagactcccagctggcatcagactgtgtctggcctgctgtcgccatccctgaggggtgcaggacagagccccataggggcagagaggcctccctgggaccagaggaggatgctgtgcagccaggcccatccccagcactcgaggcctaggaggagaggtgggctctggcagcgggtgtgaggtggcagtgagaagccaggccctcaggtgcagctcaggcctctgccgctggggcctcatagttgagcacgtagtagtcgtggacgtacatgaggacggctattggctgtccgatgatgagcgacagccacacagctgcgttgccatagttgccctggaaaaagcggcccacgaaccaggccagtgggatctagggagtgaggggccaagtcagtcggccatggtgaccacagggctgggggcttcagggtccctgggcatggggagggtcagccgaggggttcaggtgcggggtaactgggcgagtgaggaggccacgtgggggtcactcacctgagccatcatgcccgtgaacgcccagaggcggaacattcgcagagggacgctcaccaggtactgagatgggagggagagaggatgccagggagtggggtgtcagccgtccctgctgtgggcatacccctgcccagggatgaggcaagatgccccccagagcactgacctcgtggaagaaggccgaggccaggaacacccctgtcctggccatccacttgctgctgccccgtcgaagcatgggcttgtagaagtgtctgcagaggagggggcatggaaagcggttcaggttcacagccatgttccacatcacacacacacacaccccacctacctgatgcaccacttgtgcacagggatgttccagttctgccagaagtaggtgacagactcggagttcctgggggccaagagaccacagggggatcagagcacaccatggcccatcccagcccccagggacaccccagggacactcaccaccagtcccggtagaactcccggtctccaaactgcatgagctcagccacggcattcaggcaggagtggaagagccagtagaagaagatgagccagatgaggtgattggggacctggcagggaggtgggggtgggcaccaagttctagaaccttcccccacatgccactgtcccctcctgtcctgtgcatgcgccacctgtccgcactcaccgccagcttcaggaggcgctcgatgatgcgtgagtagtccatgtcctgcagaaacaagcccttcagctagccatgctcctggtcactccccagccaccccagctgcaagagcacctgagccactcaccttgaagggcttcatggagttctggatggtggggaccatccactgcaaaggagggcaccacgtcagctcccagccatgcccagctacacccaaccctgccctaccccacttacctgctggatcagccccacctggagctgggtgaagaacagctgggggggaaacagagagcagccagctgaggccctggctagccagaaggccccctagcctccagtggctgcccccagcccccaacctcaccatctcaaggatccgtcgcagcagaaagcgcttccggatgcggggagagcggggaaagttgagctcgtagcacaaggtgggggcgaagaggaagtagtagagatctggaatgggaatggggggttggtaccagaacaggcccagcctgtcccccgcacctcaggcccacagaggtcctcaccgcggtaggtcagattgtccgggtagctcacggtgtgcggggcagcagcactgctggccttcttccctgcagaggctacgagcacagcagagtgggagggggctggtggggccctgctgctgcccagccccccagcaggcagccccagcccctggcagcccctcaccagccttggccctggccctgcggcaccatgagttgacgtcgcggtaggagaagagcttgaggaagaggatggtgtgcgccatcagcgccagcagggagcccactgcaggagaggtggactcaggcctccacagcgccacagccggaggccatgcccgtggctggcccgagacagatgggcagggtgggatgggggcgcacctggagtgatagactcaaccagtaagaccacagccgctgggaaacacagaatggtggccaggttggccacgtgcagcagcagtcccgcctgctccgtcagggcaccctggagtggggagcagagcactcaaccagggctcccattgcctgggagagggctgccaggcctggggagcagctcctcccaggagcgcacacagcagggtgagcacacacggaggtgaggggcactgcttaccaccgccaggcgcttctcaacctggaatgcagccacagcaaagacattggccgctgtggacagaagcaccaaggggcaggtttagggccacgtcagcctgatccccacccgaggccctcctcagagcccagctcaccaataaccaggcatggggcgggccagctatagggatccttcaggaacagagaaaccacctggatggggtccaccaggatgccatacctgggggtggagggatgggggtctgagtgggtggcaggtggggctgtggggcggggcctggacaggccatgggtggggcaggggtgggacctggcaaaggcactcacttgatgaggttctccagaaataaccgggcattgctcaagatctgcgagggatggacaggagggtgcagcccctttagtcctggccacagggtactcaccccagatcctcccaacacctctgggcacgtcccagcccgagctcagggcggcagcctcaggcttgcagacccagccctgtctggtctccatgccaagctctgagactcagcacccacctcagccaacaccagtgctgggtaaggggaagtccctccctgtccccatcacaccagacggtcccacatggagg

SEQ ID NO: 1883389 - DNA, 4001 bp, Homo sapiens
tagcggttgtccccgatgttcccagcaaagaccgtggggccctgagtggcgaagccactggtgtccagctccatgatctcctgccccgtctgcaggatctgcgggcgacagctgtgagggaggcgccccccgcaggggaccccagccccaggtcccaggtcccaggccctgcccctcaccatggtggagtcttcccggctcagaatcaggaatccgtgtctgcggccgtcgtcgtctgcttcaggggtggtgctgggttcctgctctgtgccctcccccttgggattgtcctcctgtcagggccaaaggggggcaggctggaagccacagtccagtgaaggcaggcacgcaggtgcgacctgggcacccccggcctatgagaaggcagcgccggtcccatcccagggcctccctgcagcaggctcgcacctacctcctccttacgcaccggggcgatgactgtccacatgtcatagcagccgggaagctcaaaggttgtcaccacctggggccggatgctcttctagaatgatgatggggtgggggtgtgatgggggtgtgagcccacccaggtcccaccaggaggcgcccgccccctacctgcccacacacctgcagcaccgacaaagccccgttcttcccgtggccggagcaaaccacaatctccaggtccggctcggggctgttctgaaactgcacaggactcgggggtgaggactatgccccccaccccccctcacactccagcccctgcccccagccccgaccccaaccctgggcacctcttcagagaggaaggcaggctcgcccacggcggcattggcacagggtccaatgttcaggatgctgtcacacacctgcggcacagcaagagtcaggggcccgctgggggcgctggctgggacgggggccctgctgcctcaatctcacctcaaaggagtaggtggccagctgtgttcccgactgggcctcgctgccgtacacttcaatctcgtccacctcatcctgcggcaccgacttacccgcagctgcacacagagagcccacttgagcgcagccctgggtcacctggccccgctcctgaccagccctggaccggccctcacctgaccagccggccgtcgcatccactcgcttcttctttgagggaggctcttcctgtgaggcaggaggggcactgagtggcatgccacagcagtgcccacatgaagggtggtggcccaatgggcccaggaaacccaccttgtcggcagcctcacggacagcactggccgggggctcctgcagcttctccgtgtacttgaggaggagggaattgcccaggcgagaacccaggaacaggtacccgggctccatggtgaccatctgagggagggcaggtgtgtgatggctgggccgggtctggacccagacccaacccctagtcccaactcacgctggtggtgaggacgctggcggccgccttgtcaaagtggaacgctcggacactgcgcatgccgtcggtgatgagggtcagcacgtagctgggggcagggagaattctgagtcggggatggggaccctgggggagtgaagggggccaggggaccctacaggacttgtggggggcggtgtgggcagagttcatgggcgggggaggggctcacatctcgccgcccttgagggagatgaccatcttgtcgtaggagatgaaggtggcctgggcgcagtccagggtgatccgcacaccctcctgggtgcctgtggggtgggtggtcaggccgactaggcaggcccaagccgtccccgggccccccccgccccagccaccccacactcacgaagcgggaaagccgtggttcctgtggtgaggctgttgagagccacgccatacggggggacgctctggttcaggtacaacagcgagttgacggcaaacaccaccaccccacctggaggtggacacaggctggtgggcaggctcagtgctctctccacacactcccctatccactcccaggacacacacctatgggcttgggcacagccagagcctgggtgcagtcaaagggcaggctggtgagggaccagatgacggggtgcaccttctgcgtgatgttcagtgagatggccacaatggagcacgtgtcctgccgcacggccacgcgcctggggacgccagtgggtcagccaagggccttgcctccccgcagagacccaggcccagctcctcccgagcaagccccaccacaccccataggccccgccctaaaccccatgggccccaccccaggcagaggcagctagggggcccacagtgcagaggggcctccttagggggctcacccaggccaggtctggttgggctcaaacaggatgaggagggtaggctcgtagtagccatgcaggaactgcaggtcgatgatgttgagcagcttctcgtctagggcccgcacgtcgatgatgtagctgggcaggaagctggacctctgcctggggggccaggggcttcagcaggagaggaggggaggcggggaggggagctcgggctctggcgcctcccaccccagcaccacagcctgcctcagctggcactcacccctcacccacgagcccctcgtgctcctcagccaggctctccctgcggaagggcaggaccaccagccgcgtgccgtagacaagcatggctgcacagcgcccgtcggggtccacccgcactcgcggcgtgtgtacattctgcacaaacccgtcctgggggcagagggggcatcagccaggcccagcataggagaccccgagggaaacacttggggccacagaacccagctgcagggggagggagggtggctgggcggggcctgggcgggggcgggagcgcggccctacccgaagctcaggctcctcaaagtagtgcagtgacagggtcttcaggtcatgggtgcccgggtcgtactccaccacagacagctgcggtcagagggcacagccgtggctgccgactgccggtcctgacagtgtcgcccccggcaaccaacggctgtacccaggccctggcacccactcccacgccttggccaggcctaccccaccaagcctaccactcaccttggcatccttgaagcttaggagcagggcatcccgcttggctcctgccagctgcacgctggccatggacatgacgttgccaaagaaggagaaggaggcagcaagctcgagcttctcccggtgggccttcccctctaggggagacaccagggctcagggtcagggcccagccatgcctggcacccgcacagccccaggccgccccaccacactcacctgtgctcctgtcattcttggtcagagcctggaggggagagaaagacagggcagtgaggggccacatctggcagctcacctcatccggggaacgagaaaagaccaccaagcctggcccctgcctcctgggagctctgcccaaaccctctctgcagcagggagaagggcttctggagacagctgtgcacagccccccacagcgacccccattcacgctctcatgcccacggcccagccctggcacaggcccctccccaggaagcccctacctcacggctccctagcagccaggccctgtgcggcaagcactcagggttagagtgcactctgtgtctgcacacccccaaacctgcctggttgcacacctacagcagcccagccccggcccctgggtccaaatgtcacagggcaggaagccagagccaaggggtatctgtagctactgatctgcgtgcctgttagagaagaggaagccctgcgctatcctgacgcctcgggctcccccaggctgcctctctatctcctcccttttcactgccctcccagaatgataagaggctgtgtgttctttgctactaggtagctagtttaactagctagcagatttatatgccattgcctcaaggcaagggaaaagtggtttttgttttgtttttttttgttttttgttttttgtttttgagacggagtctcactctgtc

SEQ ID NO: 1883390 - DNA, 4001 bp, Homo sapiens
cctcttccccaccacccccgcccccggcctcggggtcccacccgtcaggggcccaattccgcgaagcccctctccacagcatgtgccgctagacaaccccagtcaggctgactctttccagctcaggcccccactgcccctcccagcctccgtttcttgcggagaaacggtgaaggagggtgagcccacctccttcaggagtgctggagcaggatcaacagtcccgtgactacaaaccaccacctgctgctcctcccaccgtagatccccctcctgcagggacacctgtggatgggacttgcctacccaacagtgtggccactgtaacttcaatacccaaccctgcatttctgggttacttacattcatggccacaccccgtactcgtggccagcagttcctctttgccttatatttgtggtacgcccggccagccttcaagatgggtttgtcaattcggccacctccagccaccacacctgtaggggatcagatacctcagggaacccccagtcggtcagagcacccccacctcccctcaatctcctgtcatgcaccttcccaatactgcatccaactacccagcaaaaagcccactcgcctccaccctagggagccccttgcaccctgtgagctgacatccagtttcttcaatccacaatgggcaggcaagccaaggccctcacctccatcacctagaatgctggctgagctccaagcgcagggaagcacccccctcaccatgtgtgagacgtcaggccggccactcaacctgacgtaagacacttgattcagcctgccccatctcagctttacttattccaggaacacaacctcagagcctcccctgtgcgaggctgagttcatcacaaggattccaagatgttcccaaacagcacagtgagttaacctagactcaaatcctttttcactcactcagtaggcgtctttgagaaagccacaatctctccctgccttctctaaaaaggctgttaaccaactgcatgcaagtgcagcaatcaggaagcccacggtagaatccaagaccctggtgacttcgtcccaatctcatttaacgcctcaacagcagtaaagcaggtactgttgtgcctgttgtacagtgatgacaactgagactacaggatgagctcaaacttacagaacccaagttttagaacaacaggtaatcgaattccagggaccaagtctagccactggctgtccaccggcactcacagcatgttcacccacagccctcagcattcaactgctgcctgatactcaccaaccacagctctgttggctgaggagataaccttcttggagccggagggcagcttcacacgggtcttcttggtctcagggttgtgggagataacggtggcatagttccctgatgcccgggccagcttgccacggtctccaggcttctcctccaggcagcacacgattgtaccctcaggcatggtgcccacagggagcacattgccaatgttgagctgggctgcaaggggaagcagcatcaggccgtcagcacagtaagaaacaatgcgaaccccctcgctctaggcaacccgcgaagttgcgagcacagcattcaacatccagcctcccggtacaactctctcggcacccaccggtggccactggtctggccacgcggatgtccccacctgaagcttctgcctgcgaggttcccatatcggcttaggacgttaactcctcaggcaacacccagacccctccccaccccgaccttccttccccgccgcgatgctaacccttcttgccgcaatacacaaactggcccgtgtgaatgccctcggcggcaatgaacagctccgtccgcttcttaaaccgatacggatcccggaagaccaccttggcgaggggcgcgccgcggcccgggtcgtggatgatgtcctgtgggcagaggcggcgtgagtgcggcgttccggccgggcgtcccttcccctcccgccccggccagcgttccgcaccttgacgatgcccttgatgtagccgtgccgctcagcgaaatccacggcgcgcaggcgcgcagcgcctttacggtgcttcacgtgcgcgcggaacacagacccggcgcccttcctctgtccacggatcacacggcccatggcgacgggtcctgggggcgactcacgattagcgcggccgggcggcccgggtacccccgccagcccggctttccgggaccccgcccccgaggccgccgcgcccaccactccctaccctctccgcgggcgcccgcaccggcatcctctcaggagggccggtccgggtctcagcgcgcctcacggaagaggatggcggcggatactgcccatgccgcaaggccgcaaggatgacctacctgttcaccagcgcggccgaaagaggaaacacggcgtcagcgagcggccttatcttccggggcggggcccagggccgcgacaccttccgggcgcgccacggccagcctagcgcggtgcacgccggggcttgtagtcaccagcggccgccggccccgcctacttctcctcctccagggcccccgcgcaggcgcaccaggagacgcggctgaaggtgtcctggtgtgcgtgggctcggaaggagggtgcaggagtgctcggctttcaccggggtctccgggagggcaggtgttttctgagtggccgaggaggcgccaagtggttgagtgacctgtccagggtgtcacagagcgacccactccgggccacggggtctggggctcccggcttgcctggtgaggggcttccgtgtaggccgagggggttctcgctggtgcagagcaggagatgggcaggggagacgcgtggacccactcgtggaacgtcatggtttgcaggtggcaaatgtccgtctccctgatgaacgggcgcttctggacgcggggaccttatccactgtaggcccttggagaggtcgggcgtcgaggagaggagccccgggatccttgccgagggtgagggccggccggcccaggaagtggggagggccaagctggagggtcccgggtcgaggaagaaggagcggggatgggctgggtcacatgctgcggagtggacgaataatgggagactggaccgtaccctgaccagaaccctgtgcgggagaggtggggaaggagcaagaaatggaggctgggaggggctgtgggggcctgagctggaaagagtcagcccgactgggggtgtcctgcggtacgtgctgtggagaggggcttcgcggaatcgggcccctaacgggtgggaccccgaggccgcgggtgggggatggtggggaagaggttttccaggagagagtccctggctgagtgagcactgtcgagcacacgcgaggccgtgggtggggaggcagcaaggaggtgaaggcgggggtcccagtgggcgggagaggcttgctgtcggtactgggaggtggggtgtttcctagaccctgcaggggctgaggcagggttgacatcgtgagaaggagacaggagagggtggaagggtgtcctgtgcccgctgttgctcacaggggagaggaggggctgctgcaggaggccctcccctagggtcggcagggggatggaggaggagctgcccggtggggactcaggaagcagcacagcccacagctagggccaggggctgaggggcaggactggaccctgggggcagggtgaggggttctggggtcagcccaaaattggcccacaggcccagcctgtccgtcactcctgaacaaatctgcttctctggaggagcagaaggagagttgggtgcgggatagaggtgagaagagtgcttggacacacaggctgtggggtccccaagatggtctcacgggtctctgggatgagatgcggctaccaagaccctacgtgcagccaggagactgaccaggccgctttaaggctggaagagacatggccctgccagcatccacctgacagtcctgaggactgtgtgactgggctcagtcttgaccttcac

SEQ ID NO: 1883391 - DNA, 4001 bp, Homo sapiens
aaaaaagggggaatgatctataatgaataaatatcaagtaagcagtgcaaagagtaagtgggctacaggggcttagggaagtggagggacagagattggcggagcagctagagatggcaatggtaccctcacatacttctgaggctgcaatgtggattcacagaaatgtagacatcccagtgcaaaccatgagcaggagaaaaggtgggctgtagtcaaacggtggtggaccctgacaagtgaactaacggtttagctatgggaaaaggtgtagtattcatatcctttggtaggacagaatcccaagatactggaaagataaagactttaggtgatgacaaagagtggttttcctgttctgtgggaacacctgtgccatgaaaccaccatagacgtggtaactataatttgtggtaagatgctttttttttctcagccctcaactgttcgagtgaacacattctgcaaagttctccagcttcctgtgtgggggctctgctaggcctgtgggctgcactatttctaggacatggtgaatccagacaggttcagccctatgttttcttttttttttttttggagttggagtctcaatctattacccaggctggagtgcagtggcacaatcttggctcactgcaacctccgcctcccaggttcaagggattctcctgcctcggcctcccgagtagctgggactataggcgcgtgccaccacgcccagctaattttggtatttttagtagagacagggtttcactgtgttagccaggatggtctcgatctcctgacctcgtgatccatccacctcggcctcccaaagtgctggggttacaggcgtgagccaccacgcccggccttagccctgtgttttcaagagggatgggggccaggtcacagagaaaacgcaagatgagaaaacataatttccattaggttccagagaaagtatcagtgtccaagaggatatggaaatgagaacttctcagcagctcagaaatatcaggttgttaggcatcagaggataagaaggaagaggtgtctgcataaaaacagaaaggcctttgattctttattttttattattattattattttttagagagacaaagtcttactaagttgcccaggctggtcagtcttgaactcctggactcaagtgatcctcctgacttggcctcccaaagtgctgggattacaggcctgagccaccatgcccagtcaggtctttgattcttaagaatagtcacaggggctgggcgcgatggctcatgcctgtaatcccaccactttgggaggccgagatgggtggatcacgaggtcaggagatcgagactatcctggctaacacagtgaaaccccgtctctactaaaaatacaaaaaaattagccgggcgtggtggcgggcgcctgtagtcccagctactcgggaggctgggacaggagaatggcgtgaacccgggaggcggagcttgcagtgagccgagatcgcgccactgcactccagcctgggcgacagagcgagactccctctcaaaaaaaaaaagtcacagggatctcaatagtgcgcacactgggcaagccaggaaaatcagcctgcagaaggccccagcagtaatctgactttgcactggaggctctggcctccctaattatctctaaaatgggcacagcctgccctaataccggagctggaaactacctgagaataggaaggccacggagtcactcctgtctggtgcaaaggggacagtgtgaactctgtgcagcatcagtgatgactcaactcaccacatccttcctgtccagcacctccaggatgttgctcagaagctgcgagcttgcctcgtggtcaggcttgttggagttgtcatctaactggccgctgagctggtctgtcagcagtggcagcagcacttctctgcactctgagaaggaaaacacagacagctcacacacagcagtgccacctcctgaactgcctgtctccttcctgcaactcttcctcgaccagtaccagtagctctaagctctgcaatcagccctgcagggatgcagcccctccaggccacccaggaacacctggttttaggcacggaactttacccttgttcaatgcgcagatgaatgaattaaaaaaaaaaaaaatgacccttctcacaggtgaaggtgggaacttagcaaaatgtttaaattatttaacaatttctctagcttttcaaaacgccaacctaatgcacgaaattgagggtcatatgaaacaaataaaaccaagcaagttatacattttttttttcaaaaattttttcacctaatggagaaaatttactgaaagaagttcctataaataaagttcctataaatactgagcttccctagtacatgtcaatgacattctgctcatgtctgtgcaggcgtgtggatttcagaaagtaaggtatgacctattatgtcttctgagatctttgctattgtaacacattttataatgagttcaggtactctgaatgctacagaaatgactgttaaccgtgatcacactctaagtagaactatccagtgcatgcttgctcttctgctcaaacaccttatctttactatctcaattaccttttctgtatccttaaaaagtgatcaaagcatattaaaatgtttagtaataatttgctttagtaataaatgttttctacttatgagcattcactaaccttttgcaggcattacctctacctccaattgtgtcttaggaacatttgcaatttcaaagtgcaaattcatagggtcagaaaatatcagagcccaaggaggctactgatacgatctagctcaagtccttccttccacagaactggaggctgagacttagagaaggccactcatttgtccagttacataactagccaggggcaaagccaggaaggctctcccaccaacaatccactcaacttgtttaacgttgaggagtcctgctggtcttcagatctccaggcaatatacatacataaaatgaggttacactctgggagcccctgaccaggtagttagccccagaagaagtctccgtggctgcctcactctagcaagtcttgagtttattgggaaggcccaggtgctggacctcctgtttatatcagctttgggacagaaacacttggtggctatttgctagactctacttacaaaatgaaaagtattttatcagtgtaagagtttttcccctccatgccccactcctctcccagcagaatactagtaatctggcttctgccagcctaccccctaaagaaaacagcttggccaggtgcagtggctcatgcctataatcccagcactctgggaggccaaggtgggtggatcacctgaggtcaggagcttgagacaagctggccaacatggtgaaaccctggctttactaagattacaaaaaaaattagctgggcatggtggtgcacacctgtaatcccagctacttgggaggctgaggcaggagaattgcttgaacctgggaggtggaggttgcagtgagccaagttcatgctgctgcattccagcctgggcgaaagagtgagactccatctcaaaacaaaacaaaacaaaaaaacgcttgctttatcatgtttgccagttaccctggtgtaaagacttccaccatggtcaatttccagctactaatgtgatatcactgaacgtggggttgagaagggatgcatgtaaccagctctcctgtgggatccaacacattgctgtttccctgtcccctggtttttaaggtcatgcaataagtatagactaaagaagaataatttcttttaaaagggtcatcttttcctacttgcttgttacttcctgaggttcctgttttaaagacaaaattctctaattaatgaaccacttgcagattgttctaattaaagattaaggaacacatgattttgctcttttaggaactgttggaaataccgagctgactttagattctccttaaaaccgctctcccagga

SEQ ID NO: 1883392 - DNA, 4001 bp, Homo sapiens
ctcagaaagaagctggggccgaagccacacgcctgcaggcgcagggtgctgagtaaggggcaggcgtgcaggagggaggccagggactggccacagccgtcccccagggggttcatgcttaagtccagctcctccaaactctgtggaagacacaggctggcagtgagcccccagcagtcccacggacagggtcccccttggggcttggcttggcagtctcttccccaccttgcctggcatagcctattacagccgggcactggctggctctcccaactaccctagaccacccagggacctgcagaatgggaaccccaactccccgctgttgagggcctgctgctctctgtgcctatacctgcaaggtggcttggcctgggagccccatggcaagctggcgcaggccttcgggacccaggtgattggaggagaggtcaaggagggccaggctgggcatggtgcccagggcagccaccagctcagccacacacttgtcccccagccggttccctgccaggcgcagctcccggagtgctgtgtgcagcttgagggcccgcagcaggggtgtaagctgggcctggtccagggccagggagcaggcgctgaacgagaggcccaagccctggagctccacggcctgcagcacctgttggtgctcccctgcgggagggatgtgatgtcaccagggtaaggccggccctttctgccctctgaatcccagagggcaaaccaggcagccccttttcaacagccccaggggtcacccaccagacttgctgtagagcccactcgcacatgcctgtgggtctagcactgtgaggccctgggggccggggtgggtctgcagcaccctgagctccaccagtcactgccagattccacaccccccgggacaagctttctgggaagcttccccagcagctcccagcccatgccaggccctcctccttgggtttgactttccaggctttcggctgctttttgccatctccctgtcagcagatcatgggggctgagggctgtcctctcccttccacccacacatccaagtgcaggacacagcacccaccaggctgggggaggtgcaccccaaaacacccgaggcccaggaatgaaccgggctggtggagcctgtgtgcccaacccccttgtacgacctcacccagaaactgcagctctcctggccctcaccttgccccaggctctggcaggccctgcggtagcggtcagtcaacgggggcaggtcccacgaagtcacctcagccaacacctggaaggcaccgtcatgagccacctgggggctcccccggctcacctcatcattgctctgcagccatgagccacccgggggctcccggtgcctgaggccctggctccccctccgctctgcggctcacctcgtcattgctctgcagcacatcagggatgaggtcctgtggggccagcagggccccctctttccgtagggtgagcctgggcagcagcccgcaggtctggtagtagcgctgggccgcctgctcggccagccaggccacagagtgggtgtcactgctgcagggacagaggcgctgctgctgctgcctgcacacagccggggtaatgccccagggacccgccatccctgcccagggccagaagccccctcagctgcttctcccattcccaggtagccggcccctcctctccctgcagcccagcacaccaccagcccctctgctattcctgggggccacaggatcctcctggaacacaccagggagccctcgtcacacgccccaccctgacatgcaaacacgagcaccctggcatggagctgcacaggtgggctgcggggtagggcaggcgatgcctcacctgtgtgggacagggatgaggaagagatgatcctgaacttgaactcgaacccggatgggagggggcggggccggaccctggcaggtgaaggcagcagggctgagtcaggagccacagtgggctccaccctacacctgcctgcccggagtggggagagggctctgctccaggtctgcatacccaccaagggctggcctgccgcagagctgtccccactgggctctgagaccctgggggtgctggggctccctggaggttctgaagccaggctgctgggccctgcgttaactggcgcactgcaactctgcatgcaggtcaggcggacctgcttggctcgggcacggggcctgctctcctcactgtccgacccagaggtactactgggcctgcggttgtctccagtgccccgggggcggggccggcggctgcgggtcaggggcatgtccagctccagccagtccccggccaggcactcctcctccgggatgagcgctgcctggggggcaagggctttgctgtggccccgcggtgggccaggccccagccggctctgagcactgcccacaccccggatggctgcctggtaggctgcccggctggtgctggctgtggctgcttccctgttgctggcggggccaggcgtccaggctgccacccgttgtgctgtggccgagcaccgaggcctcttctgggacggccgtgcggggcctgcgctgtcctcgccttctgagctgctgctgctgctggctggcccatgcctgctcctccgaggcctggccatggctggtgccgcctgccctggggagaccctgacatgggcctgagaggcctctgggagtctagtgctattagaggggggttctgggcaggggctcaaaggaggagaggtctcggggtcaaacagaaggctgcttggggtgtggaaggcctgggagctgtggggatctgtgggagagagaatgcgtgttgaggcaggggcccggcacctcccgctccacctgtgatggagcatctcccgaaatcagggcccggggactctcagcgtaggcacagcaaccccagggacaagggacgccctgcttgccttggcccgaggcagccgcctggagcagcatctccatggccctggccttctgccgcgtctccaggtccaggtccctgcggtacagcttcacccactgctgcagcgtctccagcgggctgaggccctgtgtggcatcagttgagcaggggcacagcagcccccataacctcgcccttgccctctgccccaccaggctcacctttcgagtgcggagggtgacggacgccccccgttcaagcagcagctcagccacctcgaagtggccacagttgagggcatcgtggaggggggtgatgccttcgcagccctggccacctgggtcgtccactgcggccccgtggtccagcaggaagcggacaatttctgcagaccaggagacgtaagcccagctcccgatgccccgccaggactgactcttcgccccacgtgtccaccaaggtgcgccaggctccttctgtcccttgctcacctagatgcccgtagttgcaggcctcgtgcagaggtgtccagccacagtagtcccgagggttaagggggtggccctgtgaccaaggacaggaaggagcctggccctgtgtacctcacagcctggccccagccccgtgagctctgcagcctaagctgagcccagggcctcagtcttagagcccagagcaagtccgtggccctgccctctcctcctccggcctaggtgtcaccagtgaaggacatgcttccccctgagacaggtggaccagccacagcatatcctccgcctctgtgcctgcccggtccccttgtggggagacagtgcacctggtcgcaggggcatgaggcaggcggggcgggaaggtgcccagatctcagcccatgggctagcccccatcctggccaggctgaccaacttagctgtaacacagatgcataccacacagcaggtaccccattttttttttgagaccagccaggctggtctcaagctcctgacctcgtgatctgcccaccttggcctcccaaagtgctgggattacaggtatgaaccaccgcgcccagcctgggcaccccatttttttgtgtttttttt

SEQ ID NO: 1883393 - DNA, 4001 bp, Homo sapiens
acggagactgtgaggacgtcttcctggaccaggtggtgggcgggctggcgcccctgctgctgcacctgcaggaccctcaggccaccgtggccagcgtgagtagccagggggtgagtgggatggggtgggtggcctcaactggacttggccccagtgccgcatcccttaggcctgcaggtttgccctgcgcatgtgtggccccaatctggcatgtgaggagctctcagctgctttccagaaacacctgcaggagggccgagccctgcacttcggggagttcctcaacaccacctgcaagcacctggtgaggggtggggccaggcggggcgtggtgggtggggcggggccaggcggcactgaccaggcctctccccagatgcaccatttcccagacctgctgggccgtctcctgaccacctgcctgttctacttcaagagcagctgggagaacgtccgagctgctgcacccctgttcaccggtaagcaccaccccctgccccacccccacgccgcccggcagccccgcctgatgcccccacttcacagggttcctggtgctgcactcggagcccaggcagcagccgcaggtggacctggaccagctcattgcgggtgagcacccctccacggggcccctccgctgggccctgctgaccctgtaggcacccgcagggactaagtgattttcctggatttcaggactttttccctgtcactggtgacctcatcgtctctagtaattcacggaaacttcttaactgttccaaaagagcttaaaaaacactaaaaaaggaaaaacgatctttccgttggctcctgagcctcccagcagaggctgtcaggagagcgtggcccacgcgcaggcatgggcatgccgaggtcacagcccgcaggcagcccccctcctctacccccagcgctccagatcctgctgaaggacccggcccccgaggtgcggacgagggctgctgaggccctgggccgcctggtgaagctcgcctaaggctccggccagcacccccagcgaggagtatgcacccagacctgtgcctgagctccaagacagggcctcctgaggaccacagcctgggcacacgactggaggggcctggccccagaacaggcactgctggggaccaaacccaagcccttcagtgagggatgtgcccaataaactcatctgctcccagcgagtgactgacagggtgcgatgctgagcctcttaggggatgggccagagggtgccctggactggctgtgttgtccccactgtttttgcaaaattgagtgaggggaaggctcggcgctgtggtgggggcggctttgttggcaaccccaattcaagaaggtgggagcaccaggcagcacagggtaaaggctctgttgacttcagcacgaccaccccagccccaggcaggcagaacagctaggtgaagaggcggacagtcccgtctgcccccgaggagaagacccacggctgggtggggtggaagatgacgtccagcactcccagatctcgggtcagcacgtgtcccttcagcaccttgacgggcaccagcaaggggttctgcagaaggtcactgtggggacgaggagggctcagggcacggccagacaccactgccctggggagggggccaggcagggtcagcactcacttgtacaccatgccatggcagacgatgacactgccgtcgtccgagcctgacgcaaagagtgggtaccgcgggtggaaggccacagcccgcagagccttcttgtggtgtctggggggagggaaccaggttgaaggcaggctcgggctgaagggaggggctctgctggccgcctccacccccagctttcctcacctcagcatcctgtatggcttggtggaaagatccaggtcaaaccacaccagcttgctatcgtagctcccacagatgacgttgtcacctagggccaaaggctgtgatgcaggtgttcccgctctcacctgcagggtgcactgccctgcccgtcacctacacccctcacctgcagggtgcactgcccctacccccacccctcacctgcagggtacaccgcccccccccccacccctcacctgcagggtgcaccgcccccacccctcacctgcagggtgcaccgccaggctggacacccacttgcagttgggcatcagcttcttggtgagctcctggcgcagcaggtggtagaggcggacgctgcgctgggacgccaccaacaggaagggccgggcagggtggaaggccactcgctgcacctgtccgtggctgcggcggaacggactctggctgcggcgacggctcagctggtgaatcagcacctgggtgtggccttgggtggccagcaccacggccaggtagtccccacgcccgtgccaggtcacctgcgtcactggctgcaggagagcaaggctggctgagtggctgagccgggcccctcccgctgcagcctcacccccaaggcgccccacgtaccttcccgtggcagatgcgcagccgcaggcccacttggcgctcctcctctgaggcctccagccagcgggccggctgcaaggggggctcctcaggcgggacgaaggcgctcaacagctgatctgtgctgcccgccaccagccggtcccccagagctgggttcagcagcagcaccgagtcctccctgtgagccaggcccagacacggcccctaagcacagtgccacccctggctccccagcccccagggcctccacttacacggctgcagccaccaggcagacagcggggctggggttccaggccacactcttcaccacgccccccacgggaacagtcctcacacagcgggcagtggccacctcccagagccgcagggagccgtcgtcagagcctggatgcggcagagacagctctcaacacctggccatcccacctgccccccagctcaaggctgcccccagctcggacccacctgaaaccagccactggcccccaggagagacactgaggcaccggacaaggtcactgtggcccctgtagacctgaggaggcggcggcagtgaggagtcagactgggagggtgcaaccccagccccctagtctccacttaccagggcctggcacgtggggaagggctgcaggtccctcggccgaggcagcttggggatgaggtcctcagggtctacattcacctggggcaggagagcgccaggtcagccttgccccctgtgccacccccctggtgtgccacccccacacaccctcatcttgcgctgccgtgggcacaggtacaggtcaaggcagcgctcgaagcgttcctggatgaagcgtccgtaggcaggcacggcccgcaggctcgggaacttgcgtggcaaaaagctcagcttcctctcgcctggctcctgctgttcccacgccaagcgctgtggagaccaagacacaggggtggggagggtcacagggaagcatggggacagggtcccggcccccaggatgcaggcccacctcctcctcgctgagcaggtattcagggggtgggttgtacgactcggcgtggcctggcagggccagcttgggagcaggtacgtgcatcttgtggcgcccgagcacggcgttggggtcctcctgggcccacaggtcatagaagctgggggtggggtctcggggccggcgaggctggatccagcccatcttgatggcgtgcaccatgcgagagacctgcatagacagccgggtcaggacgggcagtgcggggcggtcagcccaggccaagccccaggggctgtgtgccccaccttctccttctccaccagggaggggatgaagctgcgcttgtcggccgggcggttggtcaccgggtggatcatgacgtccccgctgaagaagtcgacagccggctgggggagaagatgtgggcgtgtgggccagagtggctgaggccctgctggtgcctccaggacccccgccgcccaggggccagcccctgccacctacctcataggggttgaagcccacatcc

SEQ ID NO: 1883394 - DNA, 4001 bp, Homo sapiens
ttgtatagataaacattagaagacagagctatttagaaaatgcaatatatatattatatgtaatatctattatatatgtaatatatgcccatgaatcttaataatttatagctgaagatcaatttctgtcatcaaacacatttaggcaaaaatctcctcaaaaaattattttagacgcatcctgaacagttcttgttccgacttacgtgacatagtcacggcacccctaagctgcggcttggcccgtctgaggcccaggctggggaaacaggctcagccccctctgcctccagctcccgtcccactctgtgagaccaagggcccaggtccctgggaaagctggcttacagtctcctagaataatgttaggacatttctttctagaatgcctctcatgtggaatttagaagtcttttgaaaatattaattcctgaccagaaacctggaaatataggaaagattaacctctgtttttcacaggttgaaaaatgtaagaaaaaaaccttcacatgaaattcccaggagaaaagagctagttcagaaaatcagtgttgggagggagcacttcaaccccagagtggtgccttcatctgggaaagaaccagctctcctcctaagtatccagcacttttaatgaaagctgtctgatccacatgtcatgggctgttttagccgaagagaacaacaggtcaaaaccaaaagtctgatgggaaaacctgcaacttcaggcaacagctggcaagtcgtaagcccaaaggaagggcagaggaggagctgcaccccccacttccaaatgcaccctcattcccaaagtgttccgttgctttgaatttcatgtttgcgctttttgtaatgaggggaggagcgtggattgttagctgagacagtgcaggaaatggtttttgtcaacatggcgggaaaacttatcagctgtcccaggagaaaagaagatcgttttgagggtttgtttttcttgctgtagttgcttaattcaaggtaagcccggaacagcactccctgcagaactgtctctagcatatcaaaatattagtttgatggcacaggtctcagccaaacaagtagttttgttggaagagaaaagagaatttaatcagcataaacaaacaaacaaacaaaagccaattccctcattttttcctaagataatcaccttatttttctgtttaatatacatataaaattttgcatttctaccaggaaccatcctttgtggtttttttgttttgtttttttgttttttgttttgttttgttttttttgatggtggagtctcactgtgttgccaggctggagtccagtggcgcaatcttggctcactgcaaccaccgcctccctggttcaagagatgctcctgcctcagcctcccaagaagctgggattataagcacatgccagcacacccagctaatttttgtatttttagtagagacagggtttcaccatgctggccagcatgctcttgatctcctgaacttgtaatccgcccgcgttggcctcccaaagtgctgggattacaggcgtgagccaccgtgcccagccagaaccatcctcttttactctctgtctaatttctaaattcattttcttcaactataatttactccaagaactggaatttgtatttagggcataaattacatatccagtaaacccactggctctgtgcagtacacttcccaggctccaagcgctgtccccagtacgggaagtcaaagaattcaaactccactggctccaacgatgacctaaatgtaagttatcaactcaaacacaaactccagtatttcgaagctcaagatttttcacttggaaacaagaagaacaccttattcctcagtagagaaaaggaaagaactttgttagaaatgagctggcattcttcgcagcactttgtctctcaggagggaaggacagttccaagctttaattctgctaaagccagggccctgtccggtacggggcacagcccggacctcagcagaaccacagcgcggggctcagagtgagcctgaagacgttggtgggattggttactgggtgtgcaacaggcaaacgagcctccactttcaacaaaaagaaacccagtgtggttatgctgggctcagcctacttggccgtatttaccaattacctaaataggaacttatacaaccaattagccatgtacctagagccaatcaaaaaatgggaacgtcaacctgcattgagaaaaatttctcaatatattgtccatggtaagattccatgcggaacgttcccatccccgggagaatgcaagacgctcaccggtccacaaaatagcccatgacggggctctcagtggtggtgttgggcggcttccaggtcacgatgacgtagtcccggttggcgtcgtggcactgcaagtccatgggtgcaccgggggcccctgtgaccagcgggtcagcatcttggggcagggagagaaaaggcacacgcctgtcatttaaaggctggggtcactgcaaagcctgtttacagctcctccaagctccaattctatccccttgatttgaccactgtttaattctcatgttcaaagtactagaatatttcttactctggcgggttggtgacaagaaatataaaattatgtatgaattaaaaagcttcaaaacatagaatccttgataaaacactgagtctacaatttttcgtcattagatcctgaattacaggtcatcttctcttggtcctgctatggtgcataacggcacgttggcaaaaatgtgcggatgaaacagtgacaataatctggcatttctaacacctgagaaatatcacctgagatactcttctatttcaaaatccttaggaaattgggcgatttactcttttcgccaactttgagcaaatatttgggacaatattgcatcattcgtttctcagtctattgatgaccctaatgcaattaggtttaattacagctgcatgaaaaccaacagagcaacatagaaagttaatacactgaatgtgaaccttcttatctaaactatgtatttattcagcagccctggctgccctgtgacgcatgcttagcagggtgagcactatccagtttcctgctcacatatcttcagggtattaaaagctgaggatttcctgacattgagccaaatggtttcctctcacattcaaaagcctcagaaagcgatgaaaatggttaaactccccacctttgccttattttcctcctgttgctggtgctgagtgagcaaggcgatttgagccgtgttgcatttattgcctttttatggggcggagcatcataccagcaggcacatgcagaagacggaagggacatttaacgcccgcctaacaacagcagtgaaacttggcgggagtgtctaacctcacagactcgcaagctcaggctatcgtgtgggaagtgaggagggtgagatacgtttggttgacatttcttctctttcttttcagatgaaatattctttaatgatacagtccttcctttaagctctgatctaatggatgcaatggaaaaagtaatcatgaagatgtatggatgcgtcctgcaccccactggagctggaggcaggtgggaaggtgagaacttgggcagcaggtaaggatgcccggctgatcgggatggagccgggagcccggggacccggagagcagcagcagctacatggcgcaggagcgctctgacgccttctttgtaggtcagctgtgcctcagcaaggaggctgcccctaaacccagaggctgctgaggtgcagcccagggcagaagcaggaggggagtgaaacagacactgataaaagcgtaggtggggccgggcgcggtggctcacacctgtaatcccaacacttgggaggccgagttggggggccaatcacttatgatcaagagttcgagaccagcctggccaacatggtgaaatcccatctctactaaaaatataaaaattagccgggcgtggtggtacatgcctgtagtcc

SEQ ID NO: 1883395 - DNA, 4001 bp, Homo sapiens
tcacaataaataaattaaaaattttttaaatggcatgcctgtacaccatcaataaccaatttaatgaataaaaatgtaaataagctattaaaactcagtattgcaaaaatggcaatgttccccagattcatttacaaatcaaaaacaatttcaatgaaaatcctgacagtgtttttcatggaaaattgattttaaaattcatacagaagagcaaagtaccaagaatagctaaaatagttttgaagaagaagaacaaggtaaagaagatgtggagttgacacatggttatacaaatgagagagcctaaaaatgaaacttgtgcatgacagaggttgcattacaattgaaatagatgaactatttgataaatgatgcagaaagcacatgtcttatccatatggaaaaataaaattgtgttccttacaacattcacaaaaataaattttatgggattagagatatgaatcaaaaaagcaaattgtagaaactgctagaaaaaatacagcaggccattttaatgactttaatggcagggaaggattaccttaaaacacaaaagactaagaaagcacaaataaagtgaaaagacaagccacaaagcagaaaatatctgtaacgcaaatgactgacaaagaaaaccaataatatttaaacagtaaaaagcaaataacctaacagagcaatggacaaagataacaaataggtaaatcacagagaaaccccaaatggccaataaacatacgaaaacacattcaaccttacgtataataaggaaaaggtaaattactacagaattgagatattatttcaaagtctggcaaaaatttagaagcctgagagtgccaaaatggggacaaaggggaaactcatattctggtgtgcgtataaattaaaataacgacttaagttgaacatgcttatagcctacaatgcaaaaattccaatagaaactcttgttcatatttaagaaatgaaagtgttacaagaatattcactgaaaaatggcttacaacaaaaaattagaaacaactatataattcatcaataaatgagtgaataaattgcagtatagttatacaatagcatactccactgcagttaaaacaaattatcagtacacatatcaacatatatattctcaaaaacataaaactgagttaaaaaatgagctacagaatgatctcacatatatacatttttaaaacttgcataacagcaaattttatggataaacactcagcgacagtataaaaatattcaggagaatgaaaaataccgtatttatgagaagggtttctctagggagggaggaagaagaggaatggaaatatggaaaggaacagaggaggtatcaactgtatctttaatattagatacataggtacacaaacagatacagatacatatgccataatttcaagatttcaaggtagttgggttgtgagtacatggatatttattttctatatctctatatatttgaaatatgttatacatttcctttatattagtaaaaggaaacattttaaaaaatagagttgcagtattaaaataaatgcaactcaaaaacaaaatgttgagttaaagaatttagtcaaagaaatacatgtatgtgtgatatagtttatgtactgggtaaaacaaacatttttttataactacgtatgtattggtaattgtacaggcttttatgggaatgaacaagtccaaattcacgatgatggttgtctctggggagtgaataagaggaacaggattagggaagggtacacaggaagtttcagctaaatctatgacttctttaaaaagtctgaagcaaatattgcatttgctaaagcttagtactaggggcttttaaaaaacgtatctatatgtaaataatggtagcaacaacaataatagacaatacagagccaacattttgagcacttattatgtagtagccacactgctcccatccaagtactaaccaggcccgaccctgcttagcttccgagatcagaagacatcgggagcattcagggtggtgtgaccatagactagcagccacacttctaagtatttacatgcataatcctaaaaacaaccctaggaggtagattcattactatcctcatactatgaggaactgaagcagagggaggtgaagttcatccaaggttacaaagttaagtaattaatgaaagtaagaaaagaagctaggactcctactccagcttacagtttaatacctatgttattaccatcatttgttattcatttccgtatgttgaaaatatttctcagaaaacactattaatcccccccaacacacacacacacacacacacacacacacacacacacacacacacacacacagatatatttcagtgtagctcaaactggttctaaagatgctaaaagaattctaggtatgtcatgaaaaaagcagcatctcaactactctactgatttacatgtttgaggtctggtattttttaagaccattatttcatggtcaaacattatttcttcaatagccctaaaataataatttagaatcctagaaactgacatggggaagcataaaatataactcaacatctctctctcagagggaaaactggattatttacctttaggtctgaaaactcataataagagtttttagtaagcagttctggcaagaaattgaatggaatttcaattattcattttttcctagtctctaagttatgagttggtttattttttaaaaagtcagtagctaatataatgataaaatatcatttgtataggactatttataccaaaataaaagggaaattggcattctcagtgatcaaaaatgtatcagcatttattatgtgctaaccccatactctctgtagcagtaaccatttcttaaatgtacatttctgttaccatgtcttaaaaatgtcccctcttctcaagcaatatacccacaatatcattactatcatctacagaatgtctttaaaaaacaaaaaagttcttcttgcgaagagttcagagtatagtaataggggaaacagactagtaaacaaaagttatctgtaatccttaagtacgtcaataaaggtatttaaaagtattagagtaacaaaggttggaggagatggaaaggtggctggtgcacttttataagaggaaatctggaaaatgatgaacaggagacaccacattagagtactcttttaagaaaacttgttttaaaagaaagaagagaggctggcatggtgactaacgcctgttaataccagcatctggggaggtccaggagggaagatcacttgagggcaggagttcgagactagcctgggcaacaagtgaaaccccatctcttaaaaaaatgaaataaaaaattagctgggcatggtggtgtacacctgtagtcctagctaattgggaggctgaggcaggaggattgcttgagctcttggagtttgaagctgcagtgagctatgatcatgccactgcattctagtaagactctgtttctaaataataatcataaatacataaaagaaggtagggtaatagtaggaacacagattctagaagtactaaagataagaaatacttagcattaactcctctgatctattttccttgactacatttatctaagactaaatcccagctgttcatttactactcaagaacaagtcacttaacatttcaaagcttcaaataaggtactagatgtttaagaactctaaattacagagggaatctgaataaatgatctctaaagttctttctagatttaaaattccataattctaagactaccagaggctctgaactctttaaactgaaaaagaaatcacaaaatattcagtatgcaaagaagaaaaatcaagatcattgagtttttatacttgcatcttgttacttttgcaaaactgttattaataaaacaatttctaacctgagcatcagtaaaattcccataaaaagcaaatttttataaacgttggtaaagtgcttctccc

SEQ ID NO: 1883396 - DNA, 4001 bp, Homo sapiens
actgagtttcaccatcttggccaggcttctcttgaactcctgacctggtgatccacccaccttggcttccgaaaatgctgggattagaggcgtgaggcattgtgccaggcaatttttgtgtgtgtttttttttttttcttgagacggagtctcgctctgtcgcccaggctggagtgcagtggcgcaatctcggctcactgcaagctccgcctcccaggttcacaccattctcctgcctcagcctcccgagtagctgggactactggcacctgccaccatgcccggctaattttttgtatttttagtagagacggggtttcaccgtgttagccaggatggtcttgatctcctgatcccgtgattcacccgcctcggccttccaaagtgctgggattacaggcgtgagccaccgcgccaggacagtttttgtgtttttaatagagacggggtttcaccatgttggccaggctggtcccgaattcttgacctcaggtgatccgccagcctcagtttcccaagggttacaggcatgagccaccgcacccgtgtactacttttataaatttaaaataaaagagaaaaagaagagaaaaggtaaacccacatgtagtccttgtccacttgaaactgaggattctattggcatggaactgaatttaactaacctgatatttatgtatttagatactttggcattcatgtttgctaattcatctaacagcaagggactaaaagggtgtttatgcaccatgagatacataggattaaaaatgtagtgtgcagccaggtgcagcggctcacgcctgtaatcccagcactttgggaggccgaggcaggcggatcaccagaggtcaggagttcgagaccagcctggccaacatagtgaaaccccgtctctactaaaaatacaaaaattagctgggcatggtggcgtgcacctgtagtcccagctactagggaggctgaggcaggaggatcgcttgaacccaggaggtggaggctgcagtgagctgagatgatcacgccactgtactccagcctggcgacagagcgagacttgcctaaaaaaaaaaaaaaagaagttgaattattgaaaagttaacatcatcttgcttatattcatcttcaaattcctttccttagcctcagagtcattactcagatataaacaggctcaaaatgcaagtgtgtcaatcatacaactgaatctctaaactttgtttattgattttgcttgaaaatattttataatttagtgaattacctgttcaatctgattgcaactgaaaatttgagagtcctactaacctgcaatatttcttttaaagaaatgtgacaacttgcagcaattatatcttctagccaagtgtactcactgaatacacatgtcctttataatacagatctgtggtttatttggttgatatcaaatttggtttggatattcacttcttttttttttttgtctttttttttgagacggagtcttgctctgtcaccaggcttgagtgcagtggcgcgatctcagctcactgcaacctccgcctcctgggttcaagcgattctcctgcctcagcctcccgagcagctgggactacaggtgtgtgccaccacgcccggctaatttttttgtattttagtagagacggggtttcaccaggttggccaggatggtctctatctccttgacctcgtgagctggccaccttgggctctcaaagtgctgggattacaggcatgagccaccacgcccagccccagagattcacttcttaaggtgattttaaaaatcttcaactttaaatatgttgtttactttggtgaaactaagtcaataaaagcactactatttcttctatgctatgctggtttttacacccgagaagatttagaaattgttcagataagcttcagagtagttatattagtgtttttggaattattcagtttctcccatccaagtactaaccaggcccgaccctgcttagcttccgagatcagacgagatcgggcgcgttcagggtggtatggccatagacaattattcagtttctaacaataagtttttttttccagaagggtgaagttatactttttatgagctgccttatgtggctttaccaatggaaatgatcaaataaatcgagtgccaagtttactcttaatttcttcatgctacatagattcagttagtctaaaaagttgtttggttgaatttacacaagtttagcaatgtgtgcattaaatctgcatttccccagaataaagagctgatttcttagaccctaaatcacaccaggagttaaataccacttatccagtcaaataagaggtatttttgaagcactacaaaaagaaagaatagacaaatattatggtccagtgattctgataaatacaaatgatccgaaaccttcaacctgggaatcaagtgtaagcaatgctcagttttttttcctgaactccctggagaagatatcatggaaataattataatgctggagaaaagcttagcaaataagactctagctaggttcccttcacagtctcttgcaatgaaaaaaagaatttaaagagcctcacacatgatgtaggtgagtgttggaagttctgattgcttatctgaactctcaaacctttggctgcatgcccacctccagggtgaaccctgtcatcttttgcatgaaacagaatgaggtgatttgaacctcggagtctatttcttccctagatgcatgtgtacaatttctattaattttaatgagaattatgtttgcacattgaggcaggataaatcccttcgggaggaatcttgcccttggatgcatactgtaatttccattaaagggataaaaccccaggggatccatacatgggcgcctgagggcaagatctgaccctctgcataaaaaacactgcacaaatcaccaggtcatcctagacatgtagatgccaaaaatataagaggttagcaagcatttattttagcctgtattcaggtgatgtgagtttctcagagttacgcctttaacctgcggttcctgtaaggaagaaataactaccaagcaatagagtctactctttcaataaggatattgctaaagaacaataaccaatgtaagatgaacaatattgtatatattttaaaaagaaataatacaagtaaaataaaagagacaatgaaagttgtgttaattaagaaagtgacctactttactactcttgtttccacaggagacattgaagattatggacaatttaagtctattcatcagtgaatcctgcgtgaaaactttttaagtggccctaatacattatgaataatctcagggcagagatctgttttgaaggagatatgattgatggtctatcattcctaattcactgtttatactggtagccagcctactgggaaaatacctcattcatcagggtattagtgaattcaaccaacgtatggcaccttcattttaacaaactaaaggagaaaagctaaatgggggaaattgacaaccatctctgattctatgataatgcaattaggctgctcctctccagagcttttgctaattcacaaaacagcttcagtcggcaggtcataaatatatgatcatttttcacactttgaaaagtaatgatgccttgacatgaatcaatagatcttggtgaagtcctttatacttttatgttcagcatgcaagtcagttttaaaactcgtgtgtattaaatctgacttgctatccagcctgtgtttacataatctaatttaacaaagtctcaaataaacgtgtaaatgaagtgtttatagtaagcacaaggaaagtttccctttcattgagaaagtgtgatatggtgcatcaaactattttaatttgcaccctgaaatacccatatttgcaaatgtgccacatacagagagctgttgctcctaaaatttggtagtttctatattgagtttgcatattatgctcaatagctgaattaaaaaaaattctactgca

SEQ ID NO: 1883397 - DNA, 4001 bp, Homo sapiens
aatacatgaccttgttttatgtgtttgttaagataccttaatatacattaatactgaattcatgtaactcatgtcacccatgcctgaaaaaaagcctccctaacatccattttctccaaaaggctcatctcttccttcttgtgctaaggaacaccaggtaacacttctgcgctatgcttgggggccattttaaacagcaaaatccacccacaaaaggcacaaaaatgtcaagaacatagcactcaacagaccatgaaagggatactcgtctgggaagtgtgttatcaggtgacgcaaactttttgttgctctgcacacatccatgaaagcagcatgcacactgatttgggggttacaaataaattttagtgagtaggcaaatttgtaaatacggaatctgcaaatgagaatcaactgtttccttaattcctgcaagaatccaaatgcctactccccaaatctgttggctctggccacttaaagtttgctctatctgaaaaagcagacatttcaggaacagatgaatatgacttatcttcgaatctcacaacaaatactgacttccaatcaatcagctacctaacgtataaagctatgaacccaacctggcactagattttggtgtgtgaactagtgtgtgaactttatagatttgacttcaagtgtctcaaaatagccggctcttttaaaacctcaaaatttgaaccattttgtattacaattttgaaaaaatatggtgtttctctgccttaacacaatgaagaaaatctttcaaaaaaaaaaattgtaatgaagcatcagcccctgagagggtatgtctgttgtgaggcaaaatacaaaatgatcaggatccccactggatgcactgttctatgctaaagggtaggagggtggagtttgtattatcttgagtttcaaaacaagaagccaaagcgaaaagcattctaggtacagaagcatcactaggcttcatcagcattgagggctgccactgtcacaagctagggttttgtttagatttatttaatcccgaaggttaatagaattgtttgtttagcatggaatgagataaccacacgtttaacttagaaagctaactctagcagtagtccacagagaatgatcggttagaaattaaaacctaaaagtgtaaactgcctgggttatcagttttatgcagataccctatactccaggctagatcttctaaatccatcctcctaaaagaaccccacatcttcacctttaacaagtactttgggtattacactaaaattaagccacaatcatgaactaccaaattaaagacgttacaagaataaggtttaaaactaatcataacttttaacactttaatattaaaatcataccaaagcctatcttatctacatcctcttcaagagtagctatcattgttttatatcatgtaagggtttaagctaataatctcatagcctagaaacctcaatataatcatcaactggcaggccaggcatggtggcttatgcaggaataagccttatgcttatgcttgagcccaggaattcgagaccagcctggacaaaatagggagacccaacctctacccgcaaaaaaaaaaaccccataaactggcttatcttcaaaagtggatgggtgtcagtcttgtacatgaaatattaagatcatgtaacaaatacatgtaacaaattgtttcaataatccgtatggaaaccttaactcataaaatgcactacaggaattgtcttgtgccttttacataaaaccaatagaccccctgaacttaacagtacatttttcataaaagattcttatgtcggctcagcaccattaagatattacctatttatgcatggcaattataaagactttgaaaaaaagcaaatccgtgcactgtttaaggaatttttattaaagcaagaattttataatccaaattacgtttccttgctcagttatcaattctgttacttaaaacagaactgacattctgagctattccacagtaaagaattacaaaattaaagaaaggaatgctttaaatttttgtactttgctgaaaattctttttcccagggtctataaaacattaatttgtttttatattttactatttttttgtgtttttttgtttttaaatcaataagtaatctaggactagcattatgtttgctagacctggcatttgctcggtacataaggttcaaagtttcctttcctttttttatttattttatattttgcaatgttttttttccataatatttaagtttttcgatgtttagatatttttcttcggtgaagcacaagtttcttttcatggtccctgatcaatctgtaaatgttaaaaaaacaaattaagaccaggactatcacttgtcagtagcaaattaaagcccttagccaaatgcaatgtggttgtttttatccatagttttactggaacacagccatacctgttcatttgtatacatactatctatggttgtcttgacatggtaacactggaacaagatcatttcagagataacacagtcctcaaagcccaaaatatttcctatctggccctttacaaaaaacatttgccaatccctggtcctgatcctggctgcactactcaatttcttgggagtgatgaaagacagtagtagagacccaagggcaccacccaaaaaggaaaggtaaaactatgaaagccaacctgtgacaggtcattttatatatatattactatacaaaatctggcagggcgcagtggctcacgcctgtaatttcaagactttgggaggccgaggtgggcggatcacttgaggtcagaagttccagaccagcctggccaacatggcaaaaccccaagtctagtaaaaatacaaaaattagctgggcacggtggcaggcatgggcctgttaatcccagctgctcgggaggccgaggcaggagaattgcttgaacctgggaggtggaggttgcagtgagccgagatcgcgtcaatgcactccaggttgggcgacagaacgaaactccatctcaaaaaaaaaaaaaaaaaaaaacaccacctgaaagtcctgggattttaaaaatccaacagttaacgggtaaaattcctttaattcctctatagttagttccacttttccttgaaaaattagcaatacatttaaatgaactgtaaaatgatcttttgctatgtacatttcaaaatatgctcaacaaactttataaaagatgaagaaaacaagcttaaaacaacaaaccagagggaaaagctcactttaaacagttggaacaccggtggcactgttaactgctttctgggcagcctctttagcttggtgggcttgtagtacagctacagcttcatcaacctaaaaaaggggaaaacagataaactggttcaggaaaggaatggaaataaagagtttcataatggtaacataccaattcccaacaaagataagtttcttccctcaaatgaaagtataaattgttacactaaacaactatatccattcaattttgagttctattacaccactattctagaattatgaatcgctcccctgcactactctttccttgtcctccccacactcgaaaaatatttctctttctccactagagaaagcagcagcagttgagagtatggctgttggagctgatgggatttgaagccaggctctgccacttaagagctgtgtgagcatttggcaaattattcagcctgtttcagtttacctatctataaaatggggataaatagcgccacaggttattatgcagactttacaactgtacatggcttatatataacacgatgtaagtgttctgtacaattaagtccccataaaaagccacgtaataactgtgtaagaggcaacttggtaaataaatttaaatcaccttagaacggagtgactctggagactcgagcatatgaagaagttctgaattatcaatctccaacaacatgccagtgattttaccagcaagagtagggtgc

SEQ ID NO: 1883398 - DNA, 4001 bp, Homo sapiens
ggcgtttcatgttggtcttgaaggccaatgaggattctgacaagcagaaaaggggaaatgagtggcactctataacaaagccccagaggcttgaatatgtatggcccacttaaggatgtgcaagctggttgcagttgtgaatttaggcacaccctaacttgtttaatgtacacttcgagagagggcaaatttgagattagctgcatttgacttattaaggcaacatgcacaggcagtctgtttcagcctgaaatttacagtctgaattaacgagagagcatatcatgaaggcagcataggcagtaagcaagacccctctgcattccagacggatggcgccacagagcaattagctaagaggggtcccaccatcacaatcactccatattgtatgtctcttaccagaatagtggttcaccaggtcctccaggcactggaaggtgagcctcggggaaatgtagtaccagttgttgggcagacggaaaatgcggtaatgctttacctgcctgtgtctcaccgacagtgagtaaaaccctgcaggaggtggaggataagtcagtgggctccacctgtcctcaccccaaggcacccagctaaccagcccaccaccactgaggcagggagacctgcccacccttgggatacaacagtgatgctaggatgcagcccctccctccactagacccttctctgtttagatgttgcttcccgttagagactgcagaagtgtattattgtgtcaaagcagatatgttcatcacatggtccttacaggttttcaggaacacaggtttcatcctctttgctttttttttttttttttttttttttgagtctgggtcttgctctgtcacccagactggagtgcagtggtgccatctcagctcactgcaacctccatctcctgggctcaagggatcctcccacctcagcctccagagtagctgggactacaggcatgcgccaccacgcccagttaattcttttattttttgtagaggtgcagtgttgctacattgcccaggctgatctcgaactcctggactcaagtgatccgcccacctcggcctcccaaagtgctgggattacaggcctgagctaccatgccgggcctcatcctctttgctttttgaggcaaacacatttggggtgcttccacatcctgaggccaaatggaatgattgtagtttggttgcaacctgtagctccaggatccatggtcgtttttggactccttcccgagtactctccaagatgtgatccctactgttttgctctttcagcccctgtcccaccaatgctgccacagcacacatttgagggggtccttgcagttatgcccccttttcctttgtctatactctctctgacttatgcttagtcttctcagaaatctggagaagctgagtcatctttctgggtatccgtaagaaccacgtgaaaggcgggttattgctccttaagcctcgttagagcaatgacctgatatgggttggtaagagtagaaccgcagccatgtgcctcgatttcctcaaatgcaaaatgaaagaattggatgtaggccatgtttcagggtcctctcttgctctggggttccaggagtagaaaacacccaagagacagaggagaaagggagctgattgattatttgctatctctgctgggcagggctaagcaattgccatgaaatctctattaattctcagaaagatcataggaggtattgcccccaattattttaaagatgggaaaacagaggcctagagcccctatgggatatggccagaggcatggggcttggaaatgccaccctggggtgtgacccttgtcctcacacatccctcacagtgctctaggcctgccgtgagtcaacccagcatgagccttcccgtaaggtcagcagaactgggagtgtggtaagcagaccgagggtagcaagtgaaacactgtcagagctttgcatacccaaggtgggcctgccacacccacccagccccagcacaatggcacatctgcctgatgacatcgttatttttagatgagttacgacacccaccctgggttcttcctccctttggccaggccagcttaggagtttctttctgagtcggggcatcctgcctccggggacctctaggacaggcacaggatgttttgcttttgcattgatctttctgtaccccagcatatttgggttttttagagaaaagttgatcgcagattttttttaaatcatatatatgtggtccctgctttctgaaagcaaggctgatgctcattttggtgaagggctctagcaccaggtggctttggcacttattaggtgcatgggaagtactctcagatagtgtgttttctcttctttgatattgaatgtacaagaagcaagccaagaacttgaagataccttctgaattttaaaaaagttattattattattcagtctgggaaaaccctagctgttaagtatttggggataaacatggtactctcctactgtaaatctcatggtctagatcagggagctgaggcttagagagagagaagcagtaaattagtaatttgtaaggctaaaattggaacttgggacccttgctttgcatcatgacaaagagctcactctatttgtgtttttactgtggtacttaatgcatatgatgcaaggaaattgtaatgctagtgatgatggtgactgtgtgagaggacacatgtgattctcggagctgtctgatttagttacggagcacagaggaaactgatatcgggactgtctgtgcagcaagagcaacacaaatactatgacatttgaatctcaccacacccttacaagggagaggtgttctctccatttcacagatgagaaaactgagttcagacaaatcagtcacagagcttgagagcacagcccaggcccataccaaaggccacattctatctgcacagcatgctgcctacacactgcgttcagttttgttctcagttgctggaaaaatttccagcaggagtcatcaggcctgatgttggccaggcccgtggcagtgcccagccggctccccactgcctgtctctagtccccttgcttccccactggcctccccagcagcgtgtgggctgcagggagcttaactacattggatcaatttgcatggacgtaggaggaaggaaaatgaagccgtgtaatgagtcagccaggagcaaaacatgcttgtctgccccggatggggaaagatgagttgggggccactcacctttcttggtctcactctctctgatcatgaaggagccgacctttgtgtctggcagctgcagcagctcctcggccttgtctctgcccaggccctcaaacagccagctgggaaggaggaagacagccattaggatccggaacaagccctcccccaggaaaggcaggaatgcgccacccaccgtactaagcacctgaaacctaatcctcacctcaacccactgagacaggaagcatcatctctcttccacagatgagaatactgagggttccagtgattaagtagtttgctcaggaaaccatgtcagcagttgatagagttaaaattagaatgcatttttctgggacatccaattccataaccacctcacttcactgctgctcttccttttatttatgtaattttttttttggaaatggatccctgctctatcacccagactagagaacagtggcgtgaccttggttcactgcatcctccaccttccaggttcaagtgattctcctgcctcagcctcccaagtagctgggattacaggcatgcaccaccacgtctggcaactttttgtgtttttagtagaaatggggattcaccatgttggctgggctggtcttgaactcttgacctcaagccatctacctgcctcggacttccaaagtgctgggattacaggcgtgagctaccgtgctcagccctgctcttcctatttgatatgttaagggatgtgatcacctctgttggattggtagcctcata

SEQ ID NO: 1883399 - DNA, 4001 bp, Homo sapiens
tatgctataaaattcaacacaaggggagagaacaagcaaattccatgagcatatataagtgtatcggatctactccattgatgctggagctatattttcacagtaggatcctcttttgttaaatattacagtagtaggaaaacctagcagaagaatagttcactgtttctctgattttgtgagtgatgtgggctgtggaatttactctttgctgctcttcccccaacctgcaccctacccctgcctccgaggtcagccttgcctgctgcccctgactgagaggaccccgacgtcaccccaccccaggttatactcctctgagaaggtcccttcatcccttccccgaaatacatcccctcaaatctctaatttgtgtgaaccattaatttcagatattgtaggaaaaataagcagggaaaatacgcaaaacaaaacgtggatggcacataacccatagcatctcgcagggtgtgtacactgaagaagtctttaccaacccgtagttaggaaaatgcgtgttcagaataactgggccttcccgcggtcctctgagtcaaacagatgaccacacattgccagaatgagaagcagagcagcttcacatccctgcttctgaaatgtttcccaacagctcattgaaacaatctcgagacacctctctcccccaaacccagcgtgtttcgggaatggctctaggaattctacttttgcattgcctcactctccctttccccgtccagaccatggtattggatttacagcatttcttacatcctataaaagtccttttctgccaacagcctggagcgcgctggattgaatgacgctctcccagcacagccggcatttgcagtgcattagaatcttgccgtcacttgcacacgtcaccaagttactttagtgagagttcagcctagctatggctctgctgtgctaacagttgcttttcaatattttgtttgaggctttggaataattcaaaggcctacacttttttttttctaatttgtttccttggagttttacgcatggctacttcagaaaacgtcagttttatgtcattaatgtcatcatcttctctggattctcagaattcaaaattcacaggagcatggcagccttacattcagtctattcttttcataaaaaaggaagtaaactgcaacagttcgcctacgctatggagactggagtggtcccacctctgtaattctatctctgtctgccccacagctgtgccgaagcgagtgccacttgtctgcagggccgtaccgcggaaccctctttgccgaccagccagcgatgtttgtctcgcctgccagcagccccccagtggccaagctctgtgaactagtccacctgtgcggaggccgggtcagccaagtcccccgccaggccagcatcgtcatcgggccctacagcggaaagaagaaagccacagtcaagtatctgtctgagaaatgggtcttaggtaagaatccaggcacacagacgctgtggtgtggtccagatctgtggacaggtttccagggagggcggcgtcaggctcacacccccttccacgcagctggggcacctgggttgatgtctcagcctccagcatctgccctggcagcgtcgtgtggtcaccctcggcattcccgctccttgctgttagcagacgtacagttcacgaggaaatgggaactctaactggacttccccacttgacttccctggctcgtgtgaaaaatccaggctacccaaagccaccccgggccacccctgtgggcacagactctccgggcacccctcttagaccctccctccccagtgcctccttgtcctgcttcaggagtccctggcagcgcccggcactggggcccaagcccccgtccctgtcatctcctctcccaggtacatctcatgatcactccgtctgctcatgtgctcaaagggtgttaaaagacgtcaaacgactccatcttttatttgacaaagtgagcacagtgtgaccgtaatgtcccactctggcgttcatggagctgcgccaggcgccgtgtgcgattctggggaggaagaggtggtaggagctgagctgagatcggaggaggctggaaccccacgccgtgctaacacacgggctccaggagacttgcaggtgatccccggagaagagggttaaggaagagtgtgaagcaaggacggcctggggaatgcggaggaagcaggggcagcgtctgtgctagaaattacctgccctgtggtggagtcatatgtggcgggacaagcctagggctccactgtggggaaatcccacaccctcctccatggggttgtgataaacatgttagtttgcttgggctgccatcgcaaaatactacaggctgggtggcttcaaacaacacgcattgtctctcagttctggaggctggaagtctaagatggggtatcggcagcgttggtttcccctgaggcctctctcctgggcttgcagacagctgccttcttcctgtgacctcacgtggcctttcctccatgcacacacatccctggtatctctgtgtgtgtccaaatgttctcttctctaaggataccagtcagattggattagggctcacccaatggcatacttttatttgcttttatttatttttttgaaacagtgtctcgctctgtcacccaggatggagtgcagtagcatgatcacagcttactgcagcctcagcctctctggctgaagtgattctcctgcctcagcctcccaagtagctggaactacaggtgcacaccacgatgcccagctttactttcttttttttttttttttttttgtagagatggggtctccctatgttgcccaggatagtctcaaactccggggctcaagcgatcctcctgctttggcttcccaaagtgctgggattacaggtgtgagccactgcacccagccccagtggcatcattttaacttgtctttttcaaggccccatctccaaatacagtctcatcctgagttactgagggttaagacatcgacatacgaattttgggcagacacaattcagcccataacaatgaatcactctagtttcagcccctggggccaagatccttacccgactttagaggtacatcccctctctctctctcaatctctctctctctctcctgttctctcattctttttctctctctttgcttccatctccttccatgtttcctattcagtctcctttcttagtacttttgcatgtctctaaatcctaaacttctggcttttctcatcatctgctcaacattatcccttaatagacaagtagatactgtgtttgttcaagttacattcgtatctaactacggacattttacaagtatcttttacatgactgatggtcatcctttcatatattttagaagtgtggcaatcaaaagtaattttttactctggtgcagagtaattcatcttttgcctggaaaccaacttccaaaaaaaaaaaaaaaaaaaaaaaaaaaaaactattgattttagtcacagtccaaaagctaagaggctgtttactcttttctaaatgccaagaatataaccttcaaaacatcctatgttctgaaacagaggttgttgttttgtttttctggagaagtgtattatcaaaatgccacggactgcagaacagaactgggcctgaaagcatgtctgggccagctgacggaactgtgcacacgattgatatccacagtgcatatcaacaggcagtctttttggagtttgcaaagcgtgtgccgtgcagtgcccgagcctgcctctgcactcgtgtttccaggttgggtggctctgacagccccttcctgtgggtcctgcgtccttgtgtggagtcacgcttgctcggcagctgctcacttcctccggttgttttgccgctcggctctcccgcccgtgggttttcaggaggcgaatgtctacctgcttaatcctgaggcttcgatcccgcaaagcccttcagagttctctgacttccagg

SEQ ID NO: 1883400 - DNA, 4001 bp, Homo sapiens
aaagtaatgatactgtaatgctgtaataataattcttcttcattattagctgaagtgcttctataagaagaaatatttctttatctactacttaattatccatagtatagtttgtacagaaatagcagaataaatgcttgattactttagctaatataaatttgataaataagaacaatatggaaaactcattctcttgaatatgaagacatttaaaagtttagtaattaatgcagtctggtattgatgcagacatacacggacaaagcaatgtaattgaataaagaaccccacaacaaatatttattaaaccttcacacttttttaattcacaaacaatgagtcagtatgttatcagcaacccagaaacctccctcttatttcttttcagctactgctttttcagaagataaccattatctgacatctaagcatattctaatattgcccattttgttacttaaatcactgaaatcatatggtatgtacttttttagtattgggctttttaaaattcagtatatttctgacttttttcatattgctgcatgccattatagatcatttttgttcttatttctgtataatattccatcgtgataagcatggttctagcaatgaggaaaaagcaggtaacaaaggaaagtcactgatttcatggagcttgcattctagtgaatacaatatatgaaaatatatatatatagggaagcaacatagatgtttgagttgttgggctattgaaaaactgctgctaggacaatttgttatccatttggaaaacataaaatttagaatagtactttatgccacatacacaaaaaattatgccaagaaatttaaaattttaaatgtaaaaggcacagctttaaaacttttagaagaaatgtccatttactaattacatttgtaatttattaaacatctacttgtaccaagcaattttgtgtgtataatggatacatcagtgaaaataaaatacaaatatctttgcttttatgaagtatacatataattcattaagacataataaaaacataaacaagcaaacttagaaacaagtaacaagtaacaagtaaacaagacaactagagccaatggggagagggaagtaatgagtgcctgcagagctggggctagggttgcaattttaagtagaatggtgtacttgttggttttgcattactatgaaagaaaacctgagactggataacttatcaagaaaagaagcttatttggctcacagttctgcaggctgtacgagcatggcacaaacacctgcttggcttctggtgaggtctcaggatgcttttactcacggcagagggttaagtgggagcaggcgtgtcacctgttgagagcaggagtgagagagaggggagaaggtgccaactttttttaaacaaccagctctctggtgaactaatggagtgagaactcactcattaccatgaggacagtaccaagccattcatgggggatctgtctgtgacccagagacttcccactagaccccacctcctacactgggaatcacaatttcttatgaaatttggagtggcacacatccaaaccatatcagatggtcagggaattataggagaaaattctctgtaaccttaggatatagaaagatcctgaaataagacttaaaaaacaatttaaaaactccacaaaccataaagggaatgcttagttaatttggctgcatcagagtaaatacttttatacatcaaaagacaccagaaagaaagtgaaaagaaattgagaagatatttgcaatctgtaattcctccaagtattagtatccagaataggcaaagaattttaatgaatgtggaagaaaaatacaaacaaccaatagaaaaaaatagacgcaggatatgaatatgcaactcataaaagaggaaacccaaactaaacctaagaaaaaatactcagtatcgaggaaaatataaatttaatccatactgattttttacttagtattctatttatctgtctatcttatcaaattagttaagattctaaaagaaggatttcactgagatgggcacagccatgaacggttgctgggatcagagaggtagcattattctgaatttgactgaatgcttttgcacctcctgtcagaataatggcatgtgcttttgggttacattggatataagaaccacgaatctaggaagcaattgagttctggctctacttgtccttctgagctatgcataagattaaacacacctcccttaatgtctatagtaaatgtagatttcttcttctatgtatagaagtccttgaagatgaaaaaaggaagaaaatggtactctcaagaaccaagggcatttgaaatataccaagccaagttgatgtctaattacttaagaaacatcaatttatagattacccaggacccttgtttcttattttctttcttgatgctcagttaatgtttatttcaattcaatacttattaaagtccatcgaaagtgataaaatccagtcttataaaaatattgctcattaaaactgctataaaaatgaactgtcctgtgcatgatgtcaaaatgaactttctaaaatgcacatctggtcactacactcccatatacattctgtattccaactttaataaattacctgcctttctgaaaacagaagatgcttttgcaactaacacattctgttctctctattctagaaatatttatggggcacctatgatatgccaggcactgttatagtccctggggtttcagctataaataaataataaacatcatgttttcatgaaacttctattaaagtgggaggacatatacaatagcattaaaaataaataatatatcagtgtcctgagaacaatttttcaaaaaggatatggggatagagtgatggagcagggctattttaggtagaatggtaaagaaagacttggattggaagaaatttgagcaaagatttgagggaagtgagggagccagccaagcagttaccaaaaaatgaatgctctgtatttgtcaacaatgtaatcaaaatagagggttagtgcttaaagtctaaaaatatgaagggcaagatgccagtatctgaaaacaaataaaatattttaaacattctcactctgccaaagaatatttttctcagaagtaaaaagaaaatggtatagccttttgagattcacagactatcctcctagtggaatgatcaattctgtaagcgttggaccacagaaatatttaacttttgaaattcaatatagatatatcttattctcataaaatattttctatagaaaaataaaagggtctgatatttaacttaacgcatgagcgtgattcacctattttcttcttacctaagacaattctttgtattctctttgtgtgcagaagttgagtcttgctttttgtactgtattttctctgctattccttcctccagttaagatactgagatctagaatgaaattaccaacaagcacctgaacactcctgcaaaactctttaaacaggtgaaatatgtgtatctggactttactggggatatttaaaatataagtagtaatctgaggactggttatcatcatcttccatggggctcaaccagtcttttcaataacttgctttctcaagggttcatttcgtggctagaagtgtaaccatcactccaagcactgacagctgtcgcaatgtcccctgtccagctccctaaacacatagttcattcttgaaccactctgtctttcttgaatttgtaaactatactggatgtactaacaccaaataacactcatcccaccacatccttcctagtaggacatatgggtaaatgaaagagaaggatacaaaagtaagtatttctggtcatatgaaaaatataattaaagacagggataaaaggtatttttaaagacatcttgattacaaattaaacatttaaaatagccatggagtactggggaaataaaatggcaaattggccatttggagatctattca

SEQ ID NO: 1883401 - DNA, 4001 bp, Homo sapiens
ttcatatagtgtaacctgcacatcatcataaaaggcttgaacagaatgaatggatggatagatttttcaaaaaatctttgaccaacttcaagtgtgagaaacctgtaaatgtgagaagcagtgttggctttgtagttacaatttcagaatgatccattttaccctttgttgactagtgtccattttcagccagccccctcatatcccctaaaccaaaatagaagctaactaaaaagaaaattaagaagcagacatctattaattaatttaatgtgcagaattaataataaattacctctacacattgtataagagcactgctaagccttggtaagataaaatgctgttaccaaaaaaatcctaataatttttacatgaaagcaagtaaataattattttccaaaatactaatttaaacaataagtcttaaatatatatgcttactttatgttgtattgtattctgtgttcactgaggtcactgtcctagaataaacactataattttgcctgttttgtgtactagaaatacttatcctgtttgaagaacttccatcctctgtggtgtagacagatagctcctcaatctgaaacattttccttgctcatcatttctaacattgaactttgagcaaaaaccaaatatctgaaaagcattctacattgagaaaggtaatgaaaaatacaaacatgatcctaaaaatgggtaaaaagtcagtgcatagctaatttttttctttttacttttttcattttttaaagtgagttacaacttacatataggaaagtatatttatcatttgtatacagttgaatgaagttttacatatatatagacatgttatcacaacccagcaccccagaaaccttactcattctcattctagcctgtatttggtagtgcaaagataatcattattctgacctctgtaactatgtattaggtttgacataactaactgttattatcaatgtttacattgtgaaaacttttatctcaacataggttgtcatctgtaaatctacttgaaataatttctgagccaatgtcagatcatataattcaaaatataaatgattttaatccaaattttttttttttttttgagatggagttttgctctttttgcccagagtggattgtaatggcacgatcttggctcactgcaacctctgcctcccaggttcaagcaattctcctgcctcagactcccatgtagctgggattacaggcgcacgtcaccatgcccagctaattttgtatatttagtagagacagggtttcaccatattggtcaggctggtcttgaactcctcacctcaggtgagccgcctgccttggcctcccaaagtgctgggattacagatgccagccaccgtgcccggcctgattttaatcagaatttaaagcacaattttagactttagttttaaactttaatatcaaataatatattatccactctggtattttccatgtaaatctctgaatgcaaccataaggaaaaaaattaaaaatccatatatgaagattaaacattataatttgtaacatcttcattcattagataaattcctagcatataccctaataactggctgtagcatgagcttttgagccaatttttatcaatttcacttaataccatagttatttagtgaaaaatgtcatatacatatgtgtgtggcatttgtacaacatagagtgcatagcttctgtaaaggaaataatgttttgtatcctgggaccccattatcctttaactgaattgactgtcatccaagtatgggtttgataaactgacacaacagtgaaaagaatccctgtcccatgtcagcttatcaaacacactgtggacagcatgtctttggcattaaacgtattcccagtcattaaagttctgaatagaagtcacgaagcttatgttcagtgagacacaacctcagtgtttccaggtgattttaagaacacctgataaaactgaggtatagtaccactaaactttaagaattttccaaaaactagggaaaaaaagtaacatgcatagagttacagaattgcagtgttattgttcagttcgatgatagaacttatattaatgagatatacagaaaagtaattaatatcttgtccttctggtaaaccatgtcaaattatgctgtaaatatatttatactgtagaataaaacaaaatcaaatatgttttgattttttaatcctttttttcaaataataacgtatatccacctggtaaaattgtccatcggtctgaatctctcactatttttttcccaatttcatttatttaatttgaaaatgtctatcatcaaaaatttagcagccttttttggaatagtgcactaaaatcatttgtacattgtccaagttaaagtataggcatgtttgaaaaagatttttaaaaatttattctagtgctgtaaatatatttgggtgaaaagctaacttctatggtgatgtaggtcaaaacgtttacttataataatacttcatttatacatatctataataaaatagttaaatctataacatttataggtgaatttgcctgattctatatcatatacaatgcgaaaacatctttcaggtttgttctccatagtttaaccctcaaagaagaaattacattatgcagttacagtaccttatcagtggagctcgacttctacgctgcaaatggaaatgtattgcaacagtgctaaacagaagttgccctcctctttggagaaaattgcagtatccgagagctctttttaacaagggactacttttaaatgtgtctgatcacctcaaaggataagtagagtgtttcctgccagtagaattagaggaaggaagcaccaggccaaaatgtttgatgtgtgatgtactgtaattcttttcatgtgtttggtggtggcttttatatgatgatcagtgttttgctactatttgtgaccctggtgtggtccaggtcattaaagttcaaccttccttaatgtgtagggtcattaactatacctagcagcattatcataattaaggtactgttttcttttaaacaactatgtctcattttcattaaaatatttcttataattggaaaatcgacctagtgattgtgattctcatgaaagagattattcaacattggagacctgctagtactagcattactgtcgacagatgctctttaggtttcctcactttaccttttagtccttgtttttaaatcagcattttcttcccacaattacctgtgggtatataaagttcaagatggaaactagctttacatggtagttttcctggatgtgagtcttagaggcaataagaattgacaaaattgctgtcagcaatattatatacctttaatgaaacaaaatgtgatgattatacatgttctttgttattctgagatcacatattcagatattcctttaaatgtttaggtttttaaatatttattcagtttaaaatatgtaaaagtaggttctttattctttcatctttatctttctatgccctctaaatttgcttttgggtttttttaaaacttttatatcatttgttcacccattagtcatttagcacttgacaatttgacaatgatagctctaaaggaatatatgctctgttttgggatatgtgtgtttatctgtgtctgagtgtgtgtgtgtttgagggttgtttatttgaagagccagtttcatcttttcccgcatgtgagtatccagatatttttggtatttgccttctgtctctttcaatgctgatactggatatatcattaatacattaatttgaataaagctaaatgcctaaaaggatcttcatgtgataaaataaattgtctttcctccatgcataaagaatcaattttattatcttacttattgatttctttagaataacttgtgaacacctaccattcgctagctatttgctagctgtaaagctgcactggtgacaaaattattcataatctttaccttcatgaaaca

SEQ ID NO: 1883402 - DNA, 4001 bp, Homo sapiens
tgggtgagcgcgaacggcagactctgcaggctgcgggccgggcgggcacagtcagcaggcgttggggccacggttaggcccgcagggcaaggctggcactcaccggttccccgccacgtccagcacgtgcagctctgtcgtgtgggccagctctggtggcaggacggccaggcggttgtccctcaaggagaggacgctgagtgccacacagcccccgatctcgggcggcagcgcctcgaggtggttccggtccacgttgaggttggtcagcttagtcagctttcccagggagcggggcagggcctggccaagaagaggaggtcagaggacgctaggggcttgctgggggtgggaaggagatgacagcccctggcaggagggcacagacaccccaggccagctccagccagggtccctcacagcccctggagaccgggacaaggacctgaccacagaagctgtctccaccccacttcgtgccctctgctccccaagctctgcccactgccctcagccttcagtccccaccaccaaaacaccccaccaggtcatccctgaccctctcccatgggtgccctggactgacctgcgaggctgcgccctgtgagcctgtctggtgccccactggtctgccctgtcatccctagggctccccaggcccccagttccagcctgcctgctcagggccagccccttcccagggccctgaaccccagagtccctttctccatctccccagtgaggaacccccccggaaactcccatgaacaccctccccacagctagctcctgtttcccagcctggggatggggatagcaacaccaccgtcccgaaccgtggcctggtgcctcagcttgccctgctttgtgaggggcaggcagacgcccctggggagcagcctgctctccatctgtcttccctacagacaaataagttcccattcctgcctcttctgtaaccgctccccagtgttacaacatacagcgataaacacgagacctagattcttcacggtaaacggcaaaggcccctgccctggcctcactgccccgcctcacctccggccagcatgctccccctctgacaagagaagagcccttcctgagtggctccacgtcaggctgccaccagcaccccccagcagcagacacaggctgatgccctgtccttgttctgcacccccgacggccccatcctttctgcctcccaagccagaccctaccatcagcaggttctccgtgaggatcagctcagagaggttctcacagtccccgatggcctcggtcacctcgcacagccgattctggtctacctttaggatggatagctgcttcagctgacctggcgtcggggagacagggggacaaggctgagcatggtccccagacgtgccttacccacctggccagaagcgccctcaaggcagacagcaaggcccccagccccttctgccgccgccgtacttcgggaggaccctacctaccttgccccacaagcctgacccaacctccttcaagaaaacaccaggccccagtggcactgccacccttccgccctcacagactccaccgccccctccagcaccaccagctgcctcctcagccttctgggctgccccagggtcccacctcccctccccagggacagctcccagagcctgggcacactcaggatcctcccctgtgttccacaccacacacagccccgacgccccacgctcctcccagggccaggctccgtgtgccccacccaggcacccccaggcacactaaccgatgccgtcgggcagcctccgcagcaggttctgggacagcagcaggtcagtgagcagcaccagcccgccgagctcagcaggcagctcctccagccggttttccgacacgtccaggcacaccaggcgccgcaggttcccgagctcctgcaggtgggcagagagtcagagcgcggatgggcacgaagcagggggccagccccaccctgactcaccgggggcagtgctgacagctggttccggtcaagccacagctcccgaagattgggcagagcccccagagtgtctggctgcaagaaggaacagagaaaatagtgactatgaggcaaagcctcctgctgcgccgtgctcaagagactatacgcccccacacccagctcccacccgcctgccctcccgaggtgccccttgctgtcggatctgctcgctgtccccttctttgcccttgcttccgtggcccgccctccggtctctgccctgtcaggcctccacgcaccagcacttccagatcgttgcctcccagatccagctgttccagcttgaccagaaatgacagggacctgcagaggaagcagggtggaggtgtggccacgcagccctggtccctgggctgtggccctgccctggctgttaggagaatgcctgtcacactcacgctggcagggacttgagcaggttctcccggagctccagggtcaccaggttggcgaggctgaaagagagaccaggcgctggggcaagaggaaggaaagcagtggcagcaggggcagggccaatcctggtcccccaccccaccctagttccacctgagaaggcactcacttgcccacgtccccgggcagtgcctgcagagacacatcattcagggccaggtgagccaggctgcgcagctgagtgaagccatcagggagcctggatgggaggaagcagaggccctcggatgaccagtccagggctgtgggacccatagcccctaccgaccccaccacaggctgccacccacctggagagggggttcccgctgaagtccgcgatctccagagccttgcagaacttgatgctctccgggatctcagggatatctgtcacagagggtcacagtggacagatgccatggcctgcaggccgtctgcagccccagcggacactccccagaccccacccagcccctgcccaggctccccaccgttccgggacacgtccagctccaccagctgcatgaagttggccacctcgggaggcaaccgctggatctcgttgtcgctcaggcccagcttgcgcaagttcagcagccggaaaaaaggctgtgggcagggaggacacggactctgtggcagagaccactgcagagcagagaagagctcctggacacgtgagtgtcacaagtcaagagtccctaggcctctgtctgctccaggtcacaccgggtcctggggtctaaccacgacaccccatttgcaaaaaaaggaaagaaacacacggtacacacgcccactgtggctgcctccctctactcttcacaccagcctccactctgagaagacacctgctggcgaccagacaaagccccaatcccctaccctgtgtcttacctcagggcccacccagcccctgaaccacttctgccaccctccaggggcccacactggcctctgctactgcatcctgacaacaagcctggcctggttctgcagcaagaactcagtaaacgctccccacaataacacagtaccacaggcacagtgctacgcgcgaggcctgcaggtggccacagaggaccgagctgtcactgccacggccagaacagggtcacattctttgggacacccaacccctaggtactgatcacccagcaccccatctccagaaaagaaatactttttaatctgctttctccagcctcctttcttgtagcagccttaggagagcacctgaccacgagaagcaagggtaaagaaagggggacagcgaacagatccgagagcaaagagtacatcaagagggctcccccactcacccctgcacccagcaaaaaaggagaggaggtctggacccacctccagagcggcccaagaagctagtactcatcagccacctgaatccaagttccaccctaaccccatccacctccctgaatccccacgggtttcactctgaggctccgcctccaggctcggtgacaatcgctatccccaggcaagcacctgatgaccgctgccacctgcgcca

SEQ ID NO: 1883403 - DNA, 4001 bp, Homo sapiens
gctgcgggcccatccacacccagggaccgcgcagccctctgccagctgtggcgggccatcatcctgcgggacgacgccgccatgagggcgcacgcagccgcactgggggtgcaaggtgagggcgtgcggggatggctggggcaccacagaagggagtcgggcggcgcggaacccactcagagccccctccctccctccctccctccctccccagactacctcctgttcgccgagatgctcatgcagcgccccgtgcgcctggggcagctgtggggctcgcacctactgagccgcgaagaggcggcctacatggtggacatggcccgcgagcgcttcgaggccgtcatggcggtgctcagggagctgccgcggcccatgctgctggtgctgcgcaacatcaacaccgtgcgcgctatcaacgtggccctcggcgcccccgtggaccgctacttccttatggctaaaaggtcggtggcccgaggaggcgcccgggccgtggtggggctggtgtggggctgacgcggcgctaacgcgggtgtgtgcagggctgtccggggctggagccgcctggcgggcgccacgtatcggggtgtctacggcaccagcctcctgcgccacgccaaggtcgtctgggagatgctcaagtttgaagtggcgctcaggtgagtggccgcggggcaggtgggtggcgggggcctgctccccacccacctgtgacctgtgacctgacccacgcaggctggagaccttggccatgcggctgaccgccctcctggctcgtgctctggtccacctgagcctcgtgcccccagcggaggagctctaccagtacctggagacctagggtgcagccgcccagggccggcggggcccttttcaccttgggctgacggaggtggcggggctagaggtgtagacaccccgagccccgtgggcactcgcactggggggctgtgacagcagctgggccaggaggccgtgtaatgaccacacactcctctcaagcaaaaaatgtttttccttgtgttttgtacaaaaagggggtgggaggtagttccgtgtgctggtggtgacggcatccacggggctagaagtgggcggtgacgcggtccgtctccagcaagtcgtccaggatctgcaggggatggaagggtgggtgggtgggtgggtggggatgcacacggaggggcggggcgcgcggggggcggggcgcgcactcactatgtctggtgtggtgccgatcttcttggctagctcgctgcgctccatggtgctcaggtacaggtagcggttgagcagctccccatccagcacgttgcgcacggcattctggagggtgcggcggtccacgtgcagcatcctggggcgtacaggcacaggtgtcagggcaggctggggtggagggggtgctgcacgggggcggggccggggctcaccggaaggcgcgggggttgaggccggcgtggtgtggcagcatggtggtcagcgcgttctgcagcatcagcagccgccggtaggtcttctcctgcatgggcagcagcagcccgatgccgccgtccagggtggctggcaggggtagggtgagggttttggtgtgagccaggccaaccctagggccccccacccagacacacctgctcccccacactcaccaaaccacgtgatgtgcttattctcccacacgaccgactttttgctgagcccttcagtggccccccggcacggggtcctccagaacgtgttcacgtgggcacccacgtggaagtctgcccgacgcagcaggcgcatgcccccgaaactctccttggctagaccagaaaggcctaggggtcactgctagcccagccccggcccaggcagagggggtggaggaagcactcaccttcgggcaggtacatgtacaccatgaggttgcggtcgcggtcagacactggggagcagaggcccagggtcagccccggccacccccagagcctcagctccccagggccctgcccacatacccagaaaacccagctgggcattgtccaccatgaagtccacgctgtacacctccaggggcttggcatcctgggggcgggaagggggcgtcagaggtgccttgggcgggtacccacccagacacgagcaccgccgccacaggtgtacccgcgacaccaggctcagcgtcttgctttcctcctggtagcgcagcagcgaaatgctcttcatgacgtcggctgccaggatgaagttcttgacgctgatcatctggtgtatgtagagctgcgtgtcgatgaaggccatgcccgtcagctcgctggcccgcaggctccacaggaaaatctgggggcgagggcgagggtgagcgggcgcggacggggagccgggtgagggtgagccgggggacacacgccgggtgggactggcacaccttctggccgatggccgacaccaggtggccattgcagtggcacagggcggtcacgggccccttctgctccttctcgtaaaggactttgaacttgttcttggtcaagggctggccaggctcgggcaccacctcaatcacatccatgatcaagatctggagggcatgggtatggctgtgggatggctgtggggatggcagaggggctgccagttcccgcccccgctcactggccccttacccgccctcggcacgtgacctcctccccctgcatgaggcaggtcccggcggccacgtagcctttgaggcccgacacggtctcctcactgcgcagagacactgtcttcatgcaggtcacatgctcccactcctgcagctcgatcctgtgggggccaggggcctcaggatgctgcctggaggccttgggcagaccccacccccgccggcccagcctcacctggcattgggaatagcctcccagctgaccggggagatgagctggatggagaaggcctcctgctgggggtggatgtaccgctcatctgtggggaccaagggtgacagtcagagtagggcttccccaagatgcggctgaggatgggagtatggtgtgggcgtcaccacctctctcgatggtctcaaactccttctcctcgccagtcatgcgtgggatgcgggcacacggcgtgttggtgctggtggccacagcatacacctgtgggttagtgagggtcacacaccagtggcccggccaggcccagaaggtccctggtggggtgggggtgggggcagaccttagactccacgtggtaagccacatagtgggccgtgcagcgcagcgggatcttcctgacaggccatggggcatcataggacaggtaggcaggcaggacactgatcctcagctcgccctggggtgggggcacaggggtcaggggatccagggctagccaagggcaggggcaggcaggcccaggccgccaagagccctgggatgttgccctcagctctgtgggagcaggggtgggtgaggggcagctgtgtcctggcgaggtcctggaaggggctgccactcagcctctggggctcctcctgtccattttcccacgctcagctggggctaggggtgctggccacaggggatgggaaagctaggccaggagggcactggaggctgcaaagggcagcccacagactgccatgctggggactgaaaaccaggcagagggagccagggctgccctctttcatggacagtcctgagtcctcaggcacccaggaagcactcaccgcatcccaggcagggtctcaagtgacctggtggtgtggtggcttaaatagggaaccaggatgagaaagcctgtgtgccctcccaaagtcacagagcagccaaggggcagagctagcactcacgtcagctctcctgagaagtgtggaggccaggccctgcgagggcttgcccggcgagccggcagagcagtggtggggaccccaggggctgcagccccagctcccaaccacccctttccagacctttggagcaaccaagtcacaggttccacctcctcgacctcaaccccatcgccctctg

SEQ ID NO: 1883404 - DNA, 4001 bp, Homo sapiens; identical to SEQ ID NO: 587633

SEQ ID NO: 1883405 - DNA, 4001 bp, Homo sapiens
gcccctatacctctttgaacattgatcattcctgaaagagtatgcaaatgaaccactaataagatggcattcttctgaatttaatcaggaaaaggtaaacacatgttatagaattaaagatctaaacacacattttgagggatatactcataggatattgaaggcagaggaattgtttccaaataaaacagcctcctttgaagtgagagtacatcaaagcaagttcttcttacctttgggaatgtagccttcttataaatttacatggccacttggatgggtgatcagggcataattttcccttcccattttgacctatttgggttgacgtttagtgcatcaccacacaatgatttgtctatctccccactaaactatgaatttttttagggtaaggactttttctttaatctctggttccctgccacattgcaaatgacctgttgcttgggagacactaaaaggatattgaaggaagggagaagagcaaagaaagggaggggaggcaaatggaatggagtccagttagactcatggcgctcattcaaagttgtcaaaacactcaattcctgttggccttgagggagcttcctgactcccagagcactgggggatagtgagaaataggtaaaatttggaatcaggagacttgggtttgtgtcctagttatgccatttcatgcatgtgtgtccttagatgaggcatttaacccccaagcctcaatatcatcttctgtagattgaggattattatgtctaccttaaagagatcttgagtgattaagtgaaataaaatatgtgaaagcattcaacaattttttttttttttttttgagacagagtctcactctgtcacccaggctggagtgccgtggtgcaatctcagctcactgcaacctccgccttctggattcaagtgattctcctgcctcagcctcctgagtaactgggattacaggtgtgcaccaccatgcccagctaatttttgtatttttagtagagacagggtttcatcatgttggccaggctggtctcgaactcatgacctcagatgatctgcctgccttggcctcccaaagtgctgagattcaggcatgagccaccgctcgtagcaagcattcagcaaatttttaaatgccatttaattgttacctaccattattattaccctgaaatcagagccatcttccactgaactctcttttctgtttaatttggcaaaatactgtcttttttttttcatccaacaagaagccataactttatttatgatagaaacagtacaaatttcaaaccaagctgcagttactcatctgagacaccaaaaaagttgctttcagatggttacattgttaattccataatagcatttacaatatcattactgttcttcagggctcggactgcctttgctccccacacatttgcttgtgacaggaccaattctatatccttaatttctacacctgtttcatcgacctcttcgtcttcactgccctcttgtacagttggagtctgtgtgttttcttgaatgtttgagacagcttcaccttgaactttgaatttctcagcagctgctagttgtgcttcctgagataaatcttcaatcttggcttccccaaaaaccatgtaggtatccgaagcgggctcttgtagacatctggttttgtgatgacaaagaggatattcttagatttccggatggtgactctagtaactcctgtaacctgttgaagacccagtttgaacctagccttccgtgccttcttttcactccgcctctgttttgctttactgactggttcttcatcaatttcagctgctaccaccaactggacttgtgcggttacctgggtggaatcctgttcttcaagctctggtactgactcatcactgtcagattctgttccagaccctgtctcagcctggggctgcagcaactgctgctctatagcagggacggtttctgtggcttcgccaggcattttgtggagggaacgtggaatcaagatggcggcagaaagagagccagagagagcgtgacccacgtctgttgcagaaggaagccggacgcccaaaacactgtattttgatagaatgctgtaaagaaggggggaaagtctgattttaaatttattttctcttcttgttctcaggatttcggttaagtgtattggatggttatcctctttaaaaaactgagagcaacagtgattccaatcaaaggtttgctgttggcctccagttaaatcagaaccgcttgagaactttataaaatacagattcccaagtcccaattccgaggacctcaattcaattgtccttgagtggggatggggaaacctgtagcttaaaaagccgcccagctgagtctgatgagaaaccaggctaggaaacctggacaggctcctttttccatttaaaactgtcagcacctgtaatctgagcaccttgggaggccgaggtgggcagatcacctgatgtcaggagttcgagaccagcctggccaacatggtgaaaccttgtctctacttaaaaatacaaaaaaattagccaggcgtggtggcgcatgcctgtaatcccagctactcgggaggctgaagcaggagaatcacttgaacctgtgaggtggaggttgcagtgagctgagatcatgccactgcactccaccctgggtgacagagtgagactctgtctcgaaaacaaacaaagaaaaaactgtcagaaaagctccaagttcaggcaagtgagtttttgaatatgccccttctacctggctaattgtcagctgaataaaccctcacatgctatgagggttcatggcattcaaacttgttgtttgaaactagcaatgttatagaaatgccagcctcagcctgagcatgccttttctgtaacaaattcacaggtaggcacatgcacctaaaatcaaagctctggagctagagtgggaaatacaggattagtagggctcttagaaaaaacattttgatctcttttgtcttatttcctcagcttcaagagaaaacggcataaggcatacctctgtctattttacagggatttattatgattatcattattattatttatttcactgtttttttagagacagggtctcaccttgtcacccaggctggagtccggtggtgtgatcatagttcactgcagcctcaaactcctgggctcaagcaattctcctgcctcagcctcctgagtagctgggactacaggcatgcaccagcacacctgacatgcagggatgttttgacctgaaaatgaatgtgaaaaagtaatggtgattcgaactttttggaaaaactcctctgcctcatcatctttgggctcagggtatctccacagttaccattcagcacaaatcttataaaaattaaaattctacatttctattccaattccactgggactcatgtatggctggtggtaaattggtacaactacttcagaaaactgttgagtagtatctagcaaagctaaacatttgcataccctattttgctcctatgcacatacccaacagaaatgtttacaatgtttaccaaaagtgatgtactagatgtgcatagtactaattataatagctcaaaactgaaattacccaaacgaccatgtacagtagcatggataaataaattgtaatatatttgcacagaataccatacaaaaaagaaaatgaattatctataattacatgcaaaattagatgaatttcacaagcatgagtttgaacgaaaagctagacaggaaacagtcaatactgcacctacataaagtacaaaactggcaaaactaagaatttgagatcatgggtctccaacacattacttcagcttccaggactctcttccagcatgaccaaagacacctcttcacacaagatggtagcaacaaattataggtgcagtcgcaccaaactcacagaacaattgaaaatcctcaccactacattcgatccaaaaccttgctcaggttattctacca

SEQ ID NO: 1883406 - DNA, 4001 bp, Homo sapiens
tcttttttccttctatgcactttattatttttttaattttcccataggttattggggtacaggtggtgcttggttacatgagtcagttctttagtggtgatttgtgagattttggtgcacccatcacccaagcagtatacactgcaccatatttgtagtcttttatccctcgaagatggacttctgatgggtgaaaaacatactagtctcacagggaagagtagtggggagtagacccacagtgaaggacagcagatacttttgagcaaataatagaatctacccagtaatgtgctgataaatatttaacaactgcctctctggaggaacagaagccctgatttgtacatttgtcaatttccatggtataaatactctcaccgtggccaatttcaagtcaccagtgtcatgtcatcaaatgtaaaattagaaagagacatgtacaattagctcttgtgagccactatgagcatgctacagcataccactgaatcaacctcagtttaaatcaattatttgctaaacataagttgacttaggcctgttccacaatatgaagaacccctgcagtcttgctgtggattataacaagggaggagactattatgtgactcagcataaacctgccttaaacctaaactgaggatttgcagtagggatgaggaggactagacgactcaaaattaagtcttcatattatttgctatttcagcattaattggaaaattcaaggggacagtaagaatgtgagattgaaataaaaatagtattttgcctctataaataagattcagccccaggctcctcttctgcagaaattcttattaaggacttggctctcctccaagaaaaataaggtagaaatcattcaaaaccctttacttccaaattattcctgataggagctgcttgatgagtatagctctctagttttgtatgtttacaattttctaataaaaggcttgtttaaaatatccctgagctaggaagtagctcttacatacttaagtcttaagccattttttttcaaagactattccttttttttttttgactgaatctctctgtagcacaggctggagggcagtggtgcaaacacagctcactgcgcctccacctcccaggcccaagtgatcgtcctacctcagcttcccttgtagtgggaactacaggcacccaccaccatgcccactagtttttgtatttttttgtagagacagggttttgcattttgcccaggctggtctcaaattcctgggcttaagcaatcctcctgcctgggcctcccaaagtgctgggattacaggcgtgagctaccgtgcctagcccatgtattctttaagtacactgacgtcatctctgtgggtggtaacactgggcaagttgcttacgtgtcctgaatttgtttctccagcgataggacaggataataacatccaccttacaaagcgattacgaagcttaaatatctggcatacataaagtatctagcaaagcacttgcacatggtggccactcaataaacagttattagcattcactaatgaggatactgattagaattatcatgattattactgagccatgaaactagaggttttaagttactatttaaaatagtgcaagactctattcaatagcctcagagcatttggcaggaataatttggctgttgattttgagtgcatctgacaggaacaggaatgacttttgcagctcccctggatgcatggatgttattgtaatttaacaaaactcacctctccagttgctagtgcattttgtctgttggcctcaaagcttggctcaaattgtcaggccaatggaaagactgaatgctttgcctccaggcaaaattgtggcctgcagagggtggaccctgcattgcatctcagcgagaacggaaagctcactcagcatgctgcagtctttcatactgattttgacataaaacatcaggcggaaattccacttctgactctgcagtaattgtggaggagccagagggccatccaaacacagatgtctggcatgacgctgcacacctcacgaggtcacaggacagacattgcagagagatcgtgatgatcatgcataaaggagagcccaccatcttcagggcgcaactcattcattcttcctccttcattgttccggagttactgtgaatagtcaagattattgtttcagactttttccaatgtcttgacttacaatggcgagaaagatgttgatgctggtaataatagtaaaaatggtgaaagtttttccagagtttcaaatgatggaactctgcatcctactattgtgtagcatgtgtgagtacgtgtgtgtgtgtgtgtgtgtatgtgagtacgtgagtgtctgtgtgattcaacatatgtatgtgtgtattgattcctcctgagtagccccccccaaccctttttttttttaactaagtatgtcagcttctggaactgcacataacagttttccagcagtgacactcatgcatagcacagccatcaaagacctggaagccatgtaatacagctgacctttgaactaggggaacaacccctgtatgcgcagtcaaaactcccaagcataacttttgaatccccaaaaacataaccattagtagcctactgttaaccagaagccttactgataacataaacagtcgattaacccatattttgttatatgtattatatactgtgttcttataataaagtaagccagagaaaataacattaatgaaaaaatcgtaaggaagagaaaatatatttcctcttcattaagtggaagtggatcatcataaagctctccatcctcatcatcttcatgttgagtaggatgaggaagaggagaaagaggagaggttggttgtactgtcagcaatggcagaggcagaagaaaatccaagtatagcagctcaacgaagttcaaaccgggtggttcaagggtcaactgtaaagactactagaggcagaggctcacttaattgcatgttcagaaattaagagtttaacattattagaatatgcaaaggcatacagagtgacataatggactttatatcactttatatcatttatatataatggactcagaagcaagagggtgggagtggggagccagggataaaaacactacacattaggtacaatgtacactacttgggtgatgggagcactgaaatctcagaattcatcactatataactcatccatgtagccaaaaatgacttgtatcctaaaagctattgaaaaaaaagaatttaaaattgttagtatgagcagctccacaaatttggggtgcaaatatggtcatattatttacttttccaattaattcattgagtaaagcttgctgctataacaacaacaaacaaacaaattttcagttatttctcgctcatataaccatctaaattagatgtttctggttggagggcagctttcctctacagaatgatccagggctcaaagcataattatactcttttctggccagtggggtcttgcacccactctactaaggtagctttccctagggctcccaggagactcctaacaaagccaacttaactttctgttacctcttctgataacgccaggaggaaaaaaattatgtaaaagctttatattcactgaggcatcctactatattgaattgtctgaaatgaaagaacatttcatctccagattttaatagatgattgtctatgaaataaagaggatttagaggccaggcacggtgggtcatgcctgtaataccagcactttgggaggctgaggcaggcaaatcacttgaggtcaagagttcgagaccagcatggccaacatggtgaaaccccatctctactaaaaatacaaaattaaccagacatggtggcaggcacctgtaatcccagctactcaggaggctgaggtaggagaagtgcttgaaccctggaggtggaggtggcagtgagccgagatcgtgccactacactccagcctgggcaacagagc

SEQ ID NO: 1883407 - DNA, 4001 bp, Homo sapiens
aaatcatacaaagtgctggaaaataccacttgattttccctctctccccttcaaacaggtagccagaagcaaaaaaaatgacctacagtatgcactggaggaatgacttaggtattaaaactttcactgtctctgttgtttcattgtctcaccagtgaagaatctgagatttccacgcaaatctccaatagctttggtgtgcacacctcttgctccctgaccttggccccttgtgcttttcatagagacaccctggggaaggcagtttttgatcataatggttgtcacctgagctggcattaccaaaaagctgggctccagctgcccacgcagtacaggtatgggtagtaaggatagctgttatacacggagaccagggaggcccgggagaaggcctcctctttcagggccggcaaagaggagtgcttctccaagtctcccagctccgaggagagctgctttcgcttagtcttatagcgtctgttctggaaccatatcttcacttgggtctccgtgagcttgaggttcttggccaggtgggcccgttcaggggccgacaggtacttctgatggctgaacttcctctccaactcgatcacctgagtgtgggagaaggcagctcgggagcgcttctgcggctgcttaggggtttggggaagccttggaagggcgcctgaagtgttttcagagtccaacagataagaccccaagtgcctttctggaaaggagagtggggaaggagggatgggaagacaaaagttacatgttagcagggaagagaacagaattcaatccacccttatctctttagtgagtgaacaaacagcccactgtcatcgtggatacatttcacttttttcacatgactaaggagctctccggagtgaagagtgagtaaatatgtttattacgcattcatttgctaagaatcatcaagaacccaaagttagagacgtttcgtggttgaactttctccctactgtctagtagaattatatggggattctggatctgtgtgctgaggagaggcgggagagggaggcagggaaaatgccgtggaacaagatacccgggaaggccagaccaaaagacatccggtgttaggatccaggtgggcaagagagggcttgtgccactggagacgcagaggcaggctcattctgggctttaattccctcttcgctaaacgaggcgttcggtcgcctcatcagaagtgacaggaaagaaaataagtggactctctctcctggacaccggagggaaccccgaatataccgctttactgcccacgggattgggaagcacacggaggctttgctggtcaacccctgctttgtcactgttaataagttattattagttctcataactaccggggggctggcgccgatcgcgggtggcgcggggcgggatccgctcctgggacggtggagggcggtggcgctgcagtcgcgccggcttctgagccccagggagcggagggcacggagccgggcgagtcctgcggtgtcagaatcctgcgccgccctgacgctggggctcagggttcattccgggggcgcgcgcgtggctgcggaggcgggaaggtccctctgcctgtcgccgcggagccccgcgtccctgcaccccgagctctgggggtccgccttgggctgccccccttccccggcctcgccgcttacctggctcggtctctgccagcgtctcggcctcctccggcgcggcgcggggcccggtgctcagctggtcgttctgcgccccggcgcggctgcgtcctccctctggctctggctctggctccggctccgggtcgcgctgtctctggctgctcgtgcggccgccttgccgctgcgcgccgtcccgcaggatgtcctggatgaggaaggacgtgagcggcttggacggggtcggcggcgcggccccctccgctttcgcctccccgggccgcggctccggaaccctgagcatcccggcggccccgccttggcctgaatgcacccgcccggcccgcaccgctttcactttccgcctcccggctcgcttatagcccaggggagcgggccgcgccgccctcccattggccgcgggacgggccgcgccgcggattggccgccctgagccccaggtgaccccgccgatctgcgagccctgagcactgccccgctccgctcctccctaggggattccttccccagttccctctccttccccaattccctctccttccccaatttcctctccttctccagctctcctccctccgccctgagccgttttcccaggccaggagcgcaccccaaagcggggctcctctgccccaacccacccgcaacagagagaagctcctggggatgggacgatcaagacaaacagtccagttagctcttcaggaccgtcagagccaattacaggggatgagcacgcagtcactgcagccgcgcggtaccgtgagagttctgggtgctctctctctctgggagagatggtgcaaactcagatctgcaatatctacgacctcaaagaggcatgacaagtaggtgcagccagaccccaggctgaaagaaggaaaacacctttgccaaagccttttcccgttgcagaagtggttttctttggtggttcctttatccgcaataacctgttaactttccttcctccccagacacatgacataccatccttttgaaaagtttccagacggatggaaggcgttttaggccaggacaaatgcaaaaactgcatttaaaaaagtagttcaaaagaacatcagcatactctttttgcagattaccaactgttaacatgtaacccattggctaaacaatgggttagccagattggtccaaccggtactgtgactggactggacggtaccgtgacaacagacgaaagtggaacagagatgatggaagtattttctttccttgtcttttctcttcttttttttacggacagggtctccctctgccgcccaggctggagtgcagtgatgccatcataactcactgcagcctcgatttcctggattcaagtgatcctcctgccttggcctctcaaagtgccaggactacaggcatgagtctcagtgtcaggtcgatgatggaagtattgaattaatgttaaatttactgaaattgcacattgtactgtcagtgtacaagagaatatttttaggaaataaacactgaagtaagtaggagcaaaggcacaagatttatgaaacttacatcaaatggttctgaaacaaggatgcagattgatagatcccacgccataaagccgatgggttaaatggtaacagttggtaatctggaaaaagggtaggctgatgttttttagaaccatttttttaatgcaacttttttgtctgtcctggtctaagacggcttctattcaactggcaacttttcaaaaggatggtatgtcatgtgtctctggaggaaggaaagttaataggttattgctgataaagcgaccgccaaagaaaactacctgtgcaacgggaaagactttggcaaagctggttttcttctctcatcttttcaaagtctctttatattagaacattctttaatgttttcttttgaatcattgtagattcacaggaagttgcaaaaataatacctccagtgtcctccaaagacatctatacaactgtaggacaatgtagaaaacaggaaatttacgttgggacattacagttaactagactacagacgtcatttatttatttatttagagatagggtcttgctctgttgcccaggctggagtgcagtggagagatcatggctcactgcaacttcaacctcctgggctcaggagattctcccacctcagcctcctgaatagctgggactacaggtgtgtgccaccctgcccagttaatttttgtagtttttgtaaagataaggtttcaccctgttgcccaggctggtctcaaagccctgggctcaaacaatccttccgcctccaccacccaaagtgctgagactacaggtg
